United States Patent Application Publication US 2019/0348154 A1 - sequence listing, part 53

SEQ ID NO: 196605 - DNA, 12600 bp, Klebsiella oxytoca
atggaagttccaaatttcaaaaaatcccgtctatctcaactgatctcccacggcttgattatctcaggtcgcgggggcagtaaaggtggcggcggcgcaaggacgccggttgaagcaaacgacacagttaacagccgcgccatggcgtcagtgttggatttactcggcgagggtgttgtcggtggcctggttgatggtgcgaaatccatcttcctgaacgacacaccgcttcagaacgacgatggttcatataactttagcggcgtaacctggtggttccgcgatggttcgcaggatcagtctgtcattgacggcttcgacttcatcgaaacgccaaagtcagtgaatatgcagctgaagcaaaccaatcaggttaacgtcgcgctcgactccgctgatagtgatcgtgttcgtgtggttatgaagttcccgtctcttcgaaacgtcaacaaagagaacggcgataccaacggaacgaccgtccagtacaagttccagatcgatgccggtaacggtaaaggctttgtggacatgattgcggaaggcgaaaagacttctctcatcaccctgacagccaaaaagactggtgtttactaccgcagctacgttattgacctgccgaagccggccaaagcgtataccttgcgtgccatccgcctgactgaagatcacaaggatagtagttacgtgtatgacgacacgtatgtcgactctatcggtgagatcgtcaacaccagtctgaactacccgaactccgtgcttgctggcctgaaaatcaactcagagcagtttggctcgtctatgccttctcgttcgtacctgattaaaggtatgaaaatccgcgtgccgtcaaactacaacgccaacaccaatacctacgatgggaattgggatggcacattccagctggcctcatcatccagtcctgcatggattctcttcgacctgttaacgaatgctcgttacggtctgggtgagtttgtgaaagagtcgatggtcaatatcggtgagctgtatcagattggccgttactgtgacgcgttcgtggatgatggcttcggtggcaaggagaagcgtttctccatcaacacccagataaccagtcgccaagatgcttatcgcgtcgtacaggacatcgcaggggctttccgtgggatgatctattgggctggtggcatggttcacatcacccaggattccccatcagaccctgtcatgctgttctcaaacagcaacgtggttaacggttcatttgcgtacaagggttcgtctcgcaaagaccgctactctgtggcactggtcacctacaacaacaaagaggatggctataagcagagcgtcgagtacgtcgaagaccaagaggcgattaagcgctatggcgttcgcaagacagagtctgtcgcatttggctgtacgtcgcgaggccaagcgcaccgcgtaggcttgtggaccctgtacacgtcgcgtatggagtctgatgttatcactttctccgttggcatggattccgtattcctgatgcctggcgacgttgttctgattgccgacaaattccgcgccggtcgtcgaaacagtggccgcataactggcttcacgagcaacagtattaaactggacgccccggttgatctgacggcggttggcaatcacatcaccttcatgagttcagaaggcaagatggttgagcgcgacattctggaaaacggaaagaatgtctcaacggttacgtttaaaaacgcgctgagcatcaacgacacgccagtcgctgacgcagtatgggtgatcgcgcaacctgatctcgcaccgttgcaggcgcgtgtcacgagcgttgctgagggtactgacgggacgtcgttcaacattacggccatccagaacaacccaacgaagtatgaagccatcgacagcggtgcgcagctgatcccgcaaaacacgacggtactcgatccgacgttctcaaaaccgtcaggtttgaccgtcactgaggggacctatctggcgtctccaggcaacctgtctatttctctgacggccgcatgggaagggaagtcagcacagtattacgttagctggcgtcgttctgatgcaggcaatgtatccaactggaagtcccagcgcgtaatcgaagagcaattcgagatccgcgatattgccgagaacggtcagtatgattttcaggtgtacgcggtatcggtcagcggtcgcaaaaccgacaccatcagcaccacctataaagttctgggcacgatgtcggcgccagaggctccaaccggccttaccgccgttggtgactatcgctctgtcgttctaaattgggtcaacccgtcatccgtcgatttggatcacatcgaggttctggcgtccaaaattaacgacaaggcgaaggctcagcttatcgctaaggtgtcaggcactacattcagccataacggtcttgaagattctgtgacctggtattattgggttcgtgcggtcaataagcgcggcatgatgagtccactaaactcaccgctggcgaccactgcgaccacacgcgatgtcctgtcattcctgaagaacaaaattaccgagtctgagctgggcagtggcctgctttcggatctggatagcaaggctgtctcgactgaagtggatgcggccattaaagaggcatctgacaacgcgcaggcaagtattgacagcgttcgcaaagagtcggccgacgcactgtcagccgcagaagacgcgattaatgcttcggtaaaatccgcacaggattcgattaattcctctcttaacgcggcgcaaaaaacgctgaatgatgccattagcaaagaggcgtcagaccgagctaccgcagtcaacaacgaagcctccgctcgtggaaaggcaatcgctggcgaaactgctgctcgcaacaaagcaatttctgacgaggcggctgcgcgaagcaaggctgtttcagacgaagccacggcgcgaaacaaggctgtcgtagatgaggcaaccagtcgagcttcagcgatcaacgactctattgcgattgaggcaaacaaccgctcaaaagctgtatctgacgcggtaacatccctgagcagcaaaattgatcaggaggccaaagaccgatccacttcagttgctgcgctggacaccaagacagcgaacgcgatttcttcggagactgctggccgcgtagccgcggttgaaagtgaggctcgcgcccgagctgatggtcttcttcaggaacagaacagccgtcagtctgagatcagtacgctgaagactcaggttcagacgtccacggactctctggcccagcaaatctcacaagtggccgcaggcactggcgagcagttcgatagcctgaatatctggtattttgacaccagcaatgaaggctggactgaggacgataacggcaatacgccaatgagcgtaaccagtgatggttggctgcaatctgccagcgtcaccgcatcgtaccgctcgcctaacaatatggcgattgatgcggccgcataccggttcgttaagctgcgtctgaagaaagtcggttcaccagtttgggcaggtaagctgttctggatcggtgcatcggaaggtggctggagcgacgctcgcgcactgaccatcaacgagcctgagtatgacgcgaccggcgtggcaacactgaccattcacgacattgactggcgctcgtctgcaactgtccgccgtttccgtttcgacttcctgaaaaaccaggacagcaacaactacgttcagatcgactggattgccgtgggtcgaccgactcctggtgctggcatggccgcgcttcaggacgagaagaacgctcgcgtaagtgctgatgccgctgaagccgcaaatcgcaacacactcgcggtacagatgcgcggctcatacgacggtaacgatctgtccaaagttggctctggtctgatttaccaagagcagcaggctcgtgttacagccgacaaggctgaagcgacatcccgccaggcgcttgagacgaaggtcaatgacagcgtttcgtcagtcaacaagtctctggatactctgaacgagcaagatcaggcaatggcgtccgatattacgggcatcaaatcctctctgtccggcaaagctgacgcctccgcgcttcagacattgcagacgaaagtaacccagcagggttcaagcgtctctactcagggtcagtcgatcaccaagttgcagaatgacctgaacaccgccaacaccaacattggcaagaaagcagatcagaccgctgtgaccgcgcttcaagggactgtgacccagcagggtaaagatattgcctctgcgaacagcagcatcaccagcctgaagtcctctatcgacgcaacgaatgccaacgtcgcgaagaaagccgatgcctcggcagtaagcaatctctccagccgcgtaagctcgaccgaagataaggtttcaagtcagggtgacagcattacccagctgaacaactcactgcaaagcgccagtgccgatgcggacgccgctaagtcaactccgggcaacatcctcaaaaataactcgttcgagcgtgggtttgatggttgggacaataccggttgggttactctggccgcgcagctgccaaagtctggaagctacattcttcaggcgtcaaaagttccgactggtgatcttgcatgtaatcagtcaatcacgcttcagagcggcaaaacgtatcgcttcggtgcatgggttcgtaagtctaacgacttagccgtgtctaacccgagcaatacaaaaatcagcatcaggaacgacgctggcccgattcaggatctgctcatcgtcgcaaacagcctcagcaccagctggagcatggttagcgctgaatataagcctagcaccgacgttacgctgacaatctctctgcgagcaagtctgagcgccggttatctgtatctggacgacgtttttgttattgacgttaccaatgagaaggctatcgatgcgcaagccagcgcaatgtcttcgcttcagaatacagtgacccagcagggtaaagatctggttagccagggcaccagcatcaccggtttgcagaacagcattaaaacgaccaatgacgcggtttccaagaaagctgactcttcagctgtatcctctctgcaaagcaccgttacgcagcagggtaaagatatttcctcggcatcgagcgacatcgctacgctgaaaaacaacctgaacaccaccaatgccaatgttgcgaagaaggctgacgcgacagcgctgtcctcgctccagagtacggtaacgtctcaggggaacacggtaacatctcagggtacgcgaattgactcgctgaataactcactgacgtctctgaccaaaaacgtctcaaacaaagctgacgcttcagccgttcagacgcttcagaatactgtcactgagcagggtaagacgctgaagtcgaacactgagagcattgacgccttcaataattcactcagccttttgggtgacatgggaagcaatattgttcctaacttcgacttcaggaacgggttgaacctgtggtcgcagcggatcccggacaatatcgtttggggagagacgtctggcgatggcactccgggcgtggtgatgaacaataccggcgctggaaatccgggtctgttctccaacaattccagctggttccctgtaagcggcaagcgtcgtttccgtttcgtcgttcgtgcgaaggcattatctggcaccggtaatattctggttcgtgttttcacagatcgcgccaatgccggtgcctacacgcaagacacggtcatctttggtagcagcttcgaaacaaagaccgttgacctgccatttaccgcagaaagtgtcaccgctatccgagtggccatctacgccttcccgaatgtaggatcggtagcggttgacagtgtgagcgtctttgacgtgaccgatgccactgcgatcaataccaacgcatctgccatctctacactgcaaagcaccgtgacccagcagggcaaagacctctcgtctggttcaagctctatcacgtcgctgaaaaatagcctcgataccacgaatgcgaacgttgccaagaaagccgacgcgaccgcgctgtcgtctctgcaaagcaccgtaacccagcaaggtaaagacatcgctactgtatcaaccgcagcaacgtcgttgaaaaatagcctgtccaatactgacgcgaacgtcgctaagaaagccgactcttcgactgtaagcacgcttcagaacaccgtgacgcagcagggtaaggacatcgccaccgccaactccagcatcacgaatcttcagagcggtctgaatacggccaactcgaacattggaaagaaggctgatgcggccgcgctcaacacgctgacctctcgcgtttctgacaatgagaaaaagacatcgagccaggcggatagcatcactagcctgaacaactcgctgagccagcagtccaagcgcggcgctaatattctgcctgatggcacgtttgagagttacgctgtcggggatgacctggccggtggccgcgttattgtgacgtctgacgacgctcagagtgggagcaagtgcattcgagtaactcgacctaacgacttcaacccatcctccacggataataacgacaacatcctgcatagtggttttcaggttcgtgatggcgctgttttctatcttgaatattgggtgaaactggatgcgaaccacgctgccatggacccggcgactcaagtctctgtcggcatgtcgattcagtatcaggatgattcatggcagtggccggcaatcagtaaagcggtgaaggatctttccacaactgcgtggacgaaagtatacgggtatttggtcacgagcaaagtcggcgtcaagcggtcgctcgttcgcgtttccgtgccgaacgttgtatcggtgaaagcgggcgatgcgttcctgattgacaacatcgtcattgttgatgctaccgatgcctacaatgcgcagcagaccgctgacgccaacgcaagtgcgattcagagcctcaactcttcagtagagaaaaatggcacgaacatcgcttcccaggcgacggccatcacgaaactgaacaacgatctgagcactgcgaacggaaacatttcgaagaaagccgacgcttcagcggttcagtcactccagaataccgtcactgagcagagcaaaaacctgaccagtcaaagtgatcgtattaccggactgcagaacagcctgaataccaccaacggaaatgtcggtaaaaaagccgagcaatcagctttagattctctgacggggcgtgtggctaagactgaaagcggaatcactgcgaccaacagcaacgttacgacgctgacagctgctattcgtgcgggtaacgcttccagtggcgatttaatttctaacccaacgtttgacccagcgttcagtcagatgggctttaacgtcgtctcaagcacttctgagggcgttcccgctggctgtccatttagctacgttgctaaaatcgcttcacgcgatcatcaccccaatttcgcagcaattccggcgacactggatgatgtgatcgaaatcaccgcgctggtcgcgtgtggtgctggtgccgcgaacttcaatctgtacattggcacggccaccagcccaaatggtggagttggtcagcctctggcggctggcggcggcactaaagcgtcggcaacatggcaaaagaccacatggcgtttcaaggtaacgcagacgatggtcaaccgcggctacattcgaccgttcctgcaaatcgaacaggcttcaccgttcgggacgatctggtatgtaactgactggcacatgcgcaatatcaccgccgctgcctcagcccaggatacagcagacgccacctctaaagccgtggactctctgacctcgactgtcgcccagcagggtaaagacatttcgagcatcagctctcgcaccacgacgcttgagaatggcctgaagacaacgaatgctaacgtatcgaccaaagccgatgcttcggcgctgacggcattaaccagccgtgtatcgactgcagagggcaaggtgacgtctcagggtaaccagatcacaacgctgaataacggcttgagttctgccaacaccaacatctccaaaaaagctgacgcctccgcgcttcagagcttgcagaatacggttactcagcagggcaaagacatctcgtctgcgaacagcagcatcaccagcctttctaactcactggacagcatcaatgtcggtggcgtgaacttggtgaaagactcggcagagatggctggctgggataataaggtcactgagaagtatcgcgggaatgcggtaattggtgtgacggttaaatctggcgccggttataaagatctgcgtgaggttgttctcgacggtcccgtagatggcaaagagtatgtttacagcttctacgccaaagcgggtgtagctgggcagaatatgactgtgttcttctacaacccgaacacgtcgaccgcatctgagaatagtcaggggaataaagactcgaataacgatggtcgctccgtctttacactgacgactggctgggttcgctattgggttaagtggaagcagaccgcaaccaccggcactaagcgcctcattctctgtcgtgtcgaggcagcagcgaaagatcagactgtttacgtcactagcccgaaaatggaaatcggcaatcagccgactgagtggtcacctgcaccggaagatctggcgtctggcagcgatcttctgacgctgaaagattccgtgacggcgaacagcaccgcaattcagtctgttaactctcgcgttcagactgttgagggtaaagtaacgtctcagggatcatcaatcacgacgctgcaaaacaacctcaacacgacgaatggcaatgtgtccaaaaaggctgatgctaccgcactgtccagtctgcaaaataccgttacccagcaaggtaaggatatttcagcatcgaacagcagcatcacaaaccttcaggcgtcaataaatcgccgcactgtgttcacagtaacctcaaagggcaccggttcgagcgctaaagaaggtgtttttgatgagtccgggaataagctgtttagcccgtctcgcagctactccatggtcactttcaaggttaattcggataactccacctcgattaacaccagcaaagtctatgacgtcttcggcggcgcggctaacggcaagacaatgtcggacgacattacagcactggctaacggcacttacgtttgtgtgctgaccagtgatgagcctatcggcaaccgggcatctatttcggctgcaatggagctgctgggtggcacgacggaagtcctgaactctctgccgtaccgcggcgcctacatcctgctgggcagaaagggcatgaaagctggcgacggtctggagcttcgcgcaccaacgggcggagcggccgattcgtacatctcaacctctgttgagtttgttaacggaatcatggccggtctgggtgccgctggtggcgtaatgatgaaagccgacgcaaatgcctctgcgatctcgacgctgcaaaacactgttactcagcagggaaaagacatcacctctgcgagcagccagattacgacgctccagaatagcctgaatacgacgaacagtaatgtcagtaaaaaggccgactctactgcgttgtctgcgcttcagaacaccgttacctctcatggaaacactctgacaagccagggcaaccgtgtgacctcgatcgaaaacaacctgacgctgggtgacaatatcatccccaactctgcgatgctgaacaacgcacagggttggaatggtagcgcgacaacggttgacggctacccggctgtaaccagttcagcagcctgggcgccgacgtcacctaagttcgctgtaacacctggtgacaccatcgacttcagtctgctttgtctggccggtgcagcaattaacggtctggcttggggcatccgtttcgacgggcctagtctgtcgaacagcactgtctacgtgggatcgtcaaactatgtagctggcgagaagaaaactgtaaccggcactatcacggttccagctggcgcaaccaccggccaggttcaaccaaacaccggcggcacaatcgcactgacgctctataacgttgacgtgactcgtcgcaatgccggtactgttgcgaacggaaaggcaatcagtgatctgaccaacaaagtcactcagcagggaaaagacatcacgtcggccagcagctcgatcacgagcctgcagaactctctgaacacgacgaacgccaacgttaataagaaggctgacgcgacggctctgtctgcgcttcagaatacggtgacgcagcagggcaaggatatttcttccgcagccagctcgatcacgaacctgcagaacgggctaaacacggccaatggaaacatcagcaaaaaagctgacgcaacggcgctatcgtcactccagaacaccgtgacccagcaaggcaaagacatttcctctcagggcgcgtctttaactcaactggcaaatagcctgagcgcgacaaacgacagtatcgatgcgtcaggcgcgatcccggggaacatgattaccaacgcttcatttgagcgtgatagcggtggctacaccacatggagcggcccggtctccacaatgaccgctcaatccccgaactccggcagcaagattttgaaaattgcgtcaggcgcaccggcattggctggtcagaaaatcacttacgtgaaaggtcgaacgtacaaaatcggcatgtgggcgcgtcaggagtctaataccacgatcaacggtggaacgagcaatactaagttccgcgtagctgacagcaccggtcttatcgcgtcgtttggctatggcccgttcactacgtcatggcaggaaatttcgtggacttggacggcaacgaaagacatggtcgctgatacgcagatcaccgcgtctctgaatgccggcttcatgtactttgacgacttctacgttgtcgacattaccgaccgtgtcgatctggatgcgacatccagcgctctctcttctctgacatctcgcgtgacgaacgctgaagggaaagtgacgacgaacagcgccagcatcacgacgctgaacaataccgtgagttctttgaacaaaacggtagcggccaaggccgacacctccgccctgcagtcattgcagaacactgtcacgcagcatggaaaagatctgacagcggccagtggcaacatcaccagtctgcaaagctcactgtctcaggttcgcaagtctggcgccaacctcgttattgacggctcgttcgaaacgctgaaccctactggcaacttgagcattttcactggtgacaagcactctggtaatcgctgcgcacgcttcaaacgaacagccgcaacaaacagtggcggaaacaatgatgcgagctatggtgactggttcgacctacgagccagtcaggttgtttacgtcgaaatctgggcgaaactggatgctgaaaacaccatcaaatcaccgggtggctacgctaacgtcggtatgcaatggcaggacagcgctcaaaagaatagctggccttcagcattccagatcaaattcgataatctgacgacagcatggcagaagtttagcggctatgttcgcgctggcgctgacgctttccgcggtatcctgtggatgtcgattcctcagaacacgacaaacattcagggctactcattcctgattgatgacgtgatcatcatggatgcaacggaaggttacaacgctcagcagacagctaacgcagcgtcaacggctgtcagtgatctgtcgacgaaagttactgccattgacgggaaagtcactgcacaaaccaatcaactggcctcaatgcagtcgaaggttgacggtgcgtcgtcgaaagtggatcagctgtcgaaaactatctcagacaaccagagcacccaggcttctttaaacacgagccttcagtctcagattagttctcaggcttcggccaatattaaaaatcaggctgatttaaacagcacgatgaccagtatcgcgtccattaaatcgactcagagcactcaggctacgcagttgagtgccgttgcgaaaagccagaccgatatgaccgcgacgctgagcaaccagaccgcatctatccaaacgcttcagaaagccgtttcaaataacgactctctaaacagcacttggatggtgaagatggagacgaacagcgcagggaaaaaatacgcagccggtatagcgctgggtattgatggtaaaaatctgcaaagtcagttcttggttcaggccgacagattcgctctgatcaatacttctaacggaaacacgacgaccccatttgtgattgaaaatggcgtgacctatatgaatgcggcttacatcaaagacgggtcgatcggcagcgcgaaggtcggggatctgatgagcaatggtttccaggaaaacgtgaaaggttggaggatttctcgtgatggaaccatgaacattaatggttctggagctggtggggctagaacgactatcactaacggcaagattgaagtttacgactccaataaccgcctgcgtgtgagaatgggtattttctaa

SEQ ID NO: 196606 - DNA, 1530 bp, Klebsiella oxytoca
atgagtatgtacgaagtaggcactgtaacaggtgctatcaaccaggcaaaagtaactggcgcaacgacaaagtggtcacaggcagctctgggggttcagccagggtcaatactggttgtttatcgaaatggcagtgcggatctgtacgccatcaagtccgtagacagcgacactcaaatcacgctaaccagaaacatcaccaccgctttcgctgctgcatcctatggcattatcacgtcagaaacagccagcacgtcgtcctttgccaaccagctcgctagcgcgttttccctttggcgtagcgttgtggccggttggtctgctgcattaaccgggaacgggaatatcacgatgacagaccccatgaccggtgcgtctgttactgttccagctctcaagggcatggcaacgatcgcgggtggtaataacttcaccggaacacaaagcattgatagtgatgactcgggcgttattcttgggaaaaacggcgacattggtctggttaagaagaatggaactttcgggaagttgatggtcgggcattctactcgattttccgtagtccgaagcgccaacgaccgcatctctgcgacagatgtccaaactgaaataatgggcatcgacggcaatgatgatgttttcttcaacagaaacattaatgccggtcggtcgttgtatacccagagtattgagctgtcatacaccacgccttacatagacttccactacggcaactcgacagcagattactccggtagacttattcaagatgccgcagatcaaatatctttcactggctctcatttgagaacagagagggatttacgtgtcggcggaatggctcagttcaatagccaggtaaagtgcatagggatggatgcgtttctggggcagttgccttcagatccggctgggaaggttggtgacataatccagggaccgcactggagtagtaggtttaatgtcagaggaaaagacaacaacacggctcaaggcagaagccagttatggtttgaggaaaatgtaggctacaaccaccgtatggtcgttgaagtggctggtttcaatgcggcggttcaatactggcacttccgaagcgatggtcagatttgggggagtacaaagggcgatgtagcctgggccggtacatcagacatacggtttaagagagatgttgagagctatgacggccaagagtcgttggataatatcaacgcgctgaagctggttaaatttatttataaagatgacgacaaggctcgtgttcgacgcggcgtgatagctcagcaggcgatgaaggttgacgagtgctatgttaagcgttcgtttggctccatccttcactcggaaaaaagaagcgacgacggtgctcttatttcacctgagtggatcgaggaaaaggagcgtctgattatcgacagcaatcctttattaatggatgctgttagtgccatccaggtgctatccagagaggtaagtgaattgagggccgagaacagtgaattgagatcattgcttcaatctaaatag

SEQ ID NO: 196607 - DNA, 252 bp, Klebsiella oxytoca
atgattcaaggcttaatcgcccgtttcaaagcgttcgtgatgacggctacggccgtcattgcggtactccttggggcatatatcttaggcggtcgctctgctcgtcgtgcggctgaaatcaagaaccagcgtgaagaaaataaacggcttcaggcgacagtagagataaaaaatgaagcgatgggtaaagtcaggagtatgggcgatagcggtgttgacgctgagcttgccgctcactgggtgcgagattag

SEQ ID NO: 196608 - DNA, 666 bp, Klebsiella oxytoca
atggaaaccaaactcatcatcgtcggcgggacgaagggtgggccgggtaagtctacggtcgcccagcaggtagcagcttgtttgcagctcaagaagaaaaagaaggttcacgttaccgacatcgacatccagaggacaacgacctcatggtgcgaagagcgccggtcaaacaaagaactcgacctgatccccttctcctacatcgaaaacgacattgttaagcaccttcagtcactgaatggccggtatgaatatatcgtcgtcgatgctggtggtttcgactccgaaatccagcgtgaggcgatgctgattgctgatgtcgttctaatcccactcagaccaaagcgtcgtgatctcaaatctctgcgcgacctcgacgttgtgctggatagcgttaaagcctcgaacccggaagttaagatccgcgccgtcgtgaaccagtgtccatcactaccctctcaggtgtcacgcatcctctcgtcgaaaaatatcattgagtcattcggcatcgagtatgcgccaaccaacatctacaaccgcaacgtatatgacgacgcggaggaagccggtcgctctatctttgaaatgacaggcaaagagcgcgacaaaaaagcagaggcagagattgaagagctggttgattatttaatgagtctggaggcgtaa

SEQ ID NO: 196609 - DNA, 357 bp, Klebsiella oxytoca
atgaaaatgggtgacctggcaaagaagccacaagcgagtgaacaaacacaggacgcagagacaaagcagccgatgcgctcaccaacacgagcacagggcaggccgtcccgtggcaagtccagcatcaaaagccgcaccatgagcatcgaggatgagtttatcagtctgatctctgtcatggagaacgtggaccgctggaatcgcttcacgcgctctgacgtgatccgtgccgccatcatgaacctggcaagcgaatcaccgaagcagatcgctgaaaccatttccgtacttcgcgaaactccagcttctgaagcagagatgcgcggcgagcaaatccgccgtgagctggaacagtaa

SEQ ID NO: 196610 - DNA, 723 bp, Klebsiella oxytoca
atgaatgaaaattttgaaagaaaactctggctatccaccgtgccgcttgtgtctactgacgtgagaggcttcccaacagggatagcttcggggtgttttgtaaggtatggcaataaaagattgcttctatccgttcaacatgcaaccggaaatggcgaagtatgggctattcagcaacagtatgttcctaatcgaggtgcagaattatacaggttaggcggagtcaactttttaaggaaaaacaaaataaatacttcggaaattgtggatgttgatttttcctacgttgaagtgccagaatcaacaattgccaaacgccaagaaataaacccaaacactgctgagatcctttctgaagaatatatttcaacactgacatcttctttagaaaatcaaccatgtgcaaacactaagtatggttttagtgggcttattaagccatcaatagatcagtgcgggggaaataattttctagttactgaatcccgcatttatactggccttgtgtatcttcgtaccgaaggtgactatcattattttaaacttcctttcaatcatcctggccaccaacatttccaaggttgtagcggcgcaccaattatcggtgaagatggtaaactggttgctttagtttgtggtgggaatatcaatacaaatgagttgtgggggatttcactaagggcatataaattttccgtagatgttcttgttaaaggcctataa

SEQ ID NO: 196611 - DNA, 1068 bp, Klebsiella oxytoca
atgagcattatttccgagaaaatatcttctaggatcaaaacgttaaagcaagagttcgctttaaataaaaacgttaaacatcaaggcgtaaagggtgaattaaacgaagtagagttgataaaaataataaaagacgttattccaaagaagtatgagatttcaaaaggtataattgagaactcatctggagagcagtcaaacgaaactgatattgtaatttatgataatgaaatcctgccgccatatataaatagtgaacttgcattcgtccctgtagaggcagttagatataatattgaggttaaatcaactttgacagcaaaagagctcgaaacaacaattggaaaatttagaaaatttcgatcaattggcggacgctcccccactgttctatttgccttttcaagtaacgcaaaaaaaagcgaacttagtagatattatgataacgatgttaacttcttaacaaacccagcaattagtgtactctgcatttcagacaagtgttactattacaaacacacagaaactaaatacctaaaagactatcttagtaattctgatataattaaaagcatcctgaaagatgaagattttgaaatttctaatttcaaaaatgtcattcaagatactttaaaaaacgatgacattctctcaaaactaacgaggtctcaatttgccttattattacagtcttctatccaagctaaggcaataggtaccaatgttgacaccaaaaaactgacaataaatgacattaattataatgaaataacatttaaaatacaccaatggattggagtagagtgttgtaataatgatgtagagttatcatttttctctggaatatcgaacacattatccaaggaagctttcggtagttacttacttaacgataaaaaacttcacctcaaagttttttctatttgctatgaagatatgtggggtaatttaagttgtcagcgatttgataaaaacggcctagatgaggatttgaatgatgtcagcttcaattttcaaagctcatctgaggaaagtaaaataatctttcaccttaaaaaatcatcatag

SEQ ID NO: 196612 - DNA, 156 bp, Klebsiella oxytoca
atgatgacacgtttattagtgaggcgcgacaacccgaatagtgaaaaaacctcactggccgggcaaactaaaaatcaaattgctctcataatagcggcatattctgcctgcccggaatgggattgttattatctgaataaaattaacctgtcttga

SEQ ID NO: 196613 - DNA, 1467 bp, Klebsiella oxytoca
atgccgattcggacagcgactcggatagcgacagcgactccgattccgacagtgactccgattccgacagcgattctgactccgacagtgactcggattcggacagcgattcggactccgacagcgactcggattctgacagtgattctgactctgacagcgatgccgattctgacagtgactcggattcggacagcgactccgattccgacagcgattccgactctgacagtgactcggactccgacagcgactcggatagcgacagcgattccgattctgacagtgactcggattccgacagcgactcggattccgacagcgactcggattccgacagcgattcggattcggacagcgactcggattccgacagcgactctgactccgacagcgactcggattcggacagcgattcggactccgacagcgattctgactctgacagtgactctgactccgacagcgactctgactccgacagcgattccgactccgacagtgactcggattcggacagcgactcggactctgacagtgactccgactccgacagcgattcggatagcgacagcgatgccgactccgacagtgactcggattccgacagcgattctgactctgacagtgactcggactccgacagcgattccgactccgacagtgactcggattcggacagcgactcggactctgacagtgactccgactccgacagcgattcggatagcgacagcgatgccgactccgacagtgactcggattccgacagcgattctgactctgacagtgactctgactccgacagcgattccgactccgacagtgactcggattcggacagcgactcggactctgacagtgactccgactccgacagcgattcggatagcgacagcgatgccgactccgacagtgactcggattccgacagcgattctgactctgacagtgactcggactccgacagcgattccgactccgacagtgactcggattcggacagcgactcggattctgacagcgattctgactctgacagcgactccgattccgacagtgactcggactccgacagcgactcggactcggacagtgattcggattcagacagtgattcggattctgacagcgactcggactctgacagtgactcggactctgacagcgactcggattctgacagcgactcggattcggacagcgactccgattccgacagcgattccgactctgacagcgactcggatgctgacagcgattctgattcggacagcgactccgattccgacagcgattcggactccgacagcgactcggattcagacagtgactcggattccgacagcgattcggattctgacagcgactcggattccgacagcgattctgactccgacagcgattcggattcggatagcgactcggatatcccgcaagccaacgcggataccaataccgctctga

SEQ ID NO: 196614 - DNA, 2454 bp, Klebsiella oxytoca
atgttaaaaaatggccaattaacttacgtaacacttttcagttcagctggagttggctgctatggtttcaaagtggaaggtttcaagtgtgtcgcaacaaatgaactgctcacaaagagaatggatattcaaaaaaacaataatatttgtgagtatgaatcaggatatatagtaggtgatttagcaactgataaagtcaaaaataaaatctacgaagaagtcaacctttgggcaaaaaagggaaatgatagagttgatgttttatttgcgactccaccttgccaaggtataagtgttattaatcacaaaaaaaatgaacaggatataaatagaaatagcttagtggttgagtctatagatgttgtaaaaaaaatcaagccacgcatttttatttttgaaaatgttatggcatttcagaaaacattatgcatttcacctgatgagcgtattatccctataggcaattatataaaagaagctttaggggaagattatattatcactggtacagtaaaaaacttaatgaactatggttccaattcatctagaacaagatccgtagttatcgggattgataaatcattcaaaaacaacctgactcctttagatatttttccagactatgagagtgaaaagactttacgtgatgtgatttataatttcccagcccttagttggggagagataaacgatcatgacttttatcacgcatttagaacttatgatacaagaatgctaccgtggataagcgatctaaaagaaggtcaatctgcatttgataaccaagatcctaaaaagcgcccacatagaataatcaatggtaaagtagtagaaaatgtaaagaaaaacagagacaagtatactcggcagagatgggatcgttttattcactgcgttcatacaagaaacgatcaattagccgcgcaaaacacaatacatcctgaacaagatcgcgtgtatagcattcgtgagcttatggctatgatgagtatcccaaaatcttttaaatgggttaataaagatttatctgatctaaataaattaagtgatgatgaaaaaaaatccatttataaaagtcatgagttaacaataagagcttgtgtcggtgaagctgtgccaacgggatttattagtaatatagcaaaaaaaatcaaggcttcctttgacaaaacctatccatctcctactgaaattaataaaataattgcaaattacaatcttgaatcaagagtaatgttgaaagattttctttctaacaatcctttagatttgaatatttcttcattgatgagaattacagaactttgtaatgcaaaaagagaagaaaatgccgccttttacacgaataagtttattgtcaatgaaattgtaagctctttgcccaattttaataaagatacagttcgaataatcgaaccttatatagatgctgattccattgaaaccttaaagctattattaaaaaaaataaagataccaaataattttaagatcaatatcattcatgaagattttttgacaatgaaaattgaagaaaaatatgatcttgcaatcggaaaccctccattttccaaggtgaatggtaaatgtgccaaaaagggactttatattgatcaagctataaacaaagagacattaaatctttctgcaatgtttcttgaaaaatgcatccaaaatagtgaatgtgtttctttagttttgaataaaacgattttgagtaatcacgaatttcgaatttccagggaaattctaagaaaaattgagattagaaatattattgactttggacgctatgggttcacaggtgtgtccattgagaccatgaatttaatcgtattcccgaaaaataagccaagtacaacgctcatctataatatgaagcataatcttcaaatgttgcaatcacaagaatacattactgatccaacattcccttgctttgttatttatcgagatgagacatttgatcttgttgcaaataaacttaatttcgactgtttcaatgtttatagagatagacaaataactaaaaaaatgacttctgcttatccaggtaaaaactcactatgggttctcaaagcaaaaaacatcactgatgataatagtgtacaacacattcagaattatgatcagtatattgacaaaaaatcagcacaagaacttagcgtttataaatttataaatgatacaagcgtatatttaacgccaaatatgacctacaatccgagaattgtgaggaatgtacctaataccttggctgacggctcaactgccatattaattccaaaaacccctacggagttaacggaaaagcaaatagcttatttttctagtgatgaatacagaaaattttatagcattgccagaaacttatctactcaatcaattaacgttgacaaatcaagcgtctttttctatgggatattaaaaaatgacaccaaacttgatagctaa

SEQ ID NO: 196615 - DNA, 498 bp, Klebsiella oxytoca
atgaatacccgcccactgctgatcctgctggttgccctcaccctgcacgccgtcgaactggtgaaatgggagcgtatgccgctgccggtggcgctgaacatcgggcaggagcggatcgtctttgtggaccgtaatgtccgggtgggctatccctctgcgctggaaggcaagatgcgcattcagagcagcaacggcacgttgtatctgctcgccagccagccgtttgccgtcacccggctacagcttcaggacacagagaacggcgagctgatgttgctggacatctccaccagcaagagcgagcatatccgggaaccgatgcgcattgtccgcgatgagaaaaaacaacttacgcgaaacccgatgcagttcctgaacccttaccctccacaccgcttccggtcgcgctcacccgctatgccgcgcagatgctgtctgccccgttgcgcaccatggaacctttgcctagcattcagcctgaaggcgtgcggttggtaa

SEQ ID NO: 196616 - DNA, 201 bp, Klebsiella oxytoca
atgagcccagaacaaatcagcgccttccaggctgccagcctgatgaagcccgatgctgtcagcctggtgatgctcggcctgttcagcgcctttctgctgctgtgggtggtctggatgctgaaatcagcagaaaatccgtgggggctggcgctgaactgcttctcctcgcccccgcagaagctggaggcggctaaaccatga

SEQ ID NO: 196617 - DNA, 321 bp, Klebsiella oxytoca
atgcaatattatcgcttaatattagcaattctggcacaatttttttgctctcagcactctgccttcgccacctccctcaccgagcgcgaagagctaaccctgtccctcaaccagcttaaccaaattgaagcctcgcttaaccgtgcccagcaaagcgccagaaccggcatcaacgagcgctactactttgactatccgcgtatccatggtgatatcaccaccctgcgtagcgggattgacaattatctcaccctccgtgcccaaccgagagatacagcaacgctcgtcggacaataccgggaggagaaaaccacgccatga

SEQ ID NO: 196618 - DNA, 798 bp, Klebsiella oxytoca
atggaaaaaataaagagcatatctgattttatcgaattaataaaaaaagaagaaagttttggagttttatatagagggcacagtgataaaagatataaattactaccttcagcatttcggtggtatgataaaattttaaacagagaaaaaactcgactagatagagaattagaaagtaacaaaataaataaaaactcatatgatagagagcaactagctttaccatcgaaaattgaaaaggaaatattaaaaagagaaagaaatgcaattagaatatttctttctgagcatacaccctatactcaatacaaaatagactcagtattagatggtctggcattagcccaacaccatgggatgccaacccgtcttttagactggtcactttcccctctggttgcacttttttttgctgttgaaaaaccaagtggcaacgatgctgctgtatatattatgcgtgatgccagttggttagatgaaacaaagctcaaaaaacactcaaacctgagtgttgatgattatatagccgtaatgaaaaaagatatgcaagggaaaatatttatgccaaaccatataacaccaagaattaaggctcagcatggtgttttctcaattcataatgaaattaaatcagaatttagacctgacaacataactgaaataacaatagatggaagtttcacctcacaaataaaattcgaattaaaacagttaggaataagtgagaaaactgtttatccggacctctacggcctttgcacagagttaaaatggttgaagtttgaagggctggactga

SEQ ID NO: 196619 - DNA, 900 bp, Klebsiella oxytoca
atgaattatagagttagtgttattatacccacttatggtagagcatctttgattggaagagccattgaaagcgttctttcacaagagtacgaaaatatagagataataattatagatgataactctgatgaaaaaaaatctcttgaaacaaggaaaataatagaatgctatttaccaaatccagcggtcaaatattttaaaaatgaaagtaacattggtggtgctttatcaaggaacgctggtatcttaaaatctacaggtgactttattgcatttctagatgatgatgattatttcttaaaggagaaaattaacagacaattggaattcatgataaatggggggtatgatgtaacattatctgatatgattattgaagatgaaaatggtaaacgtctcaataaaatccattcggcacagtgttctggagtaggggactttattataagaggtgttgccctcactccaatgatattagcgcgtaaaacttgtgtattagatgttgggatgtttgatgatacaccgagatttcaagatcatatatttatgttaaagttactaggtaataaagccaaagttggtgttatgaacgaaccgttggcggtccattttgaacatacaggagcccgtataactaattcagataagactttcaatggctatgtgttacgaatgaaaatggaaatggctttatttcatttgttgtcagaaaaagaattggcaagtgccaagttaaaacatgccactttaaattcaaagattcttactgatagggaaaatagctttgttggggttttatatcttttgagaaatattcatttaatcaggacatttcatgatttgaatatttttttcagaaatgttgttaggaatcttttctttcggaatcataggttctaa

SEQ ID NO: 196620 - DNA, 816 bp, Klebsiella oxytoca
gtgactcggatagcgacagcgattctgattcagacagcgattctgattcagacagcgattcggattccgacagtgactcggactctgacagcgattcggattccgacagcgactcggattcggacagcgactccgattcagacagcgactcggattcggacagcgattcggactcagacagcgattcggactctgacagcgactcggactccgacagcgactcggattcagacagcgattccgactctgacagcgactccgattcagacagcgattcggattccgacagtgactcggactctgacagcgattccgactctgacagcgattcggactctgacagtgactcggattcggacagcgattcggattctgacagtgactcggactctgacagcgattcggattccgacagcgactcggattcggacagcgactccgattcagacagcgactcggattcggacagcgattcggactcagacagcgattcggactctgacagcgactcggactccgacagcgactcggattcagacagcgattccgactctgacagcgactccgattcagacagcgattcggattccgacagtgactcggactctgacagcgattccgactctgacagcgattcggactctgatagtgactcggattcggacagcgattcggattctgacagtgactcggattccgacagtgactcggattctgacagcgattctgatactgaagcacccactgcagcacagaacatcacggttaatgacaatgttggttccatcactggtgtgcttcattccggtgatgtga

SEQ ID NO: 196621 - DNA, 126 bp, Klebsiella oxytoca
atgccggaaccaggcattctggaagcccgcatcggtaacgatgatgactctggccgtcgggttcaccgccccggcaagggcatcaaggaaggccttttgtatctgtccattctgctgcttttctga

SEQ ID NO: 196622 - DNA, 534 bp, Klebsiella oxytoca
  misc_feature (250)..(259): n is a, c, g, or t
atgaacggcttctcattcgaatacaacgggattgctttcaaagcatctcaattgggaaaagggtattcctggtctgccttgcaaagcagaatcgactaccaacaggaacgtgataatgctttcctgtttaaactgaaatcatctgtcagagaaacatctgttagtgcaactcatgatatggccataactacagatgctcctgaaaccacgacagaatacgttaaccgccccatagaagcacttatcctcnnnnnnnnnnaagctgttgcaactaacaaagaagcgatagcaaccgaagcgttaaaagtagcgcccaagcgaagctatgcagtgtcagcgttcaagtggttggaatacatcccctacctcgatgtaatttatcgtatgttaaaaaacctcaaaatccccccccttaaacgccctcgaaaacacaaaaccatcactggcgtgagaatgatagagataacatcatcaccccccaaaactgccattgaaacaccacataaatcgcacagagcttcgctttcaatgtag

SEQ ID NO: 196623 - DNA, 603 bp, Klebsiella oxytoca
atgagcataatccactgccaggccccccgattttaccgccgccagcaggcgctgttggaactggctttgcagcgccgccgcttcggtattcagcgcgcgcagcgccgctttttgctcttccgcaagcgtggctcccgcaagggtaaagcgttgccaggttacctcaaggagacgtctggactcggcgtcaagggagagcgattctcgccgctcccacaccagcttcacccgctgaaaaagagcatcgttgagccagatatcgttagccagttcagccagctcggcggaaaactgctcatcgagtgcctgaatggtcgggttagtctccgcgcctgccatcgcaaaaaagacgttggttacccgcgccagcagctgaccgctctgctccagggcctccagggtattggcaaaatcagccggctgcgggttattaacgatagcggcaatttctttacgctggcgacgaacgccttcgtcgaaggcgggtcggtaatggctgacgtcaaccagatcgaaacgcggcgcctgataaggcagcaggctaacgctgaaaaaaggattgttctccgacatcttcatctcctgaaaacgattatcctgtaa

SEQ ID NO: 196624 - DNA, 732 bp, Klebsiella oxytoca
gtgcccggctttcggtttctgatagttacagacgttgtagataaccggatgctgcgcacgcagggtggattgttcgacaaatacgcccatccacgccccgccgcttttgctatcccgcgagaaatagtcgccataaaaaagtgcgataccctcgccgctagcgtcgatgatttcccagacccgcacgtcagggtgataaaccgggatatcgaatcgttccacaaagcgaatgccaaacagctgtgtcgctgcccagaatacgccatcacgcagaacgcgctcgagagcaaaatagggcttaagctgtgcttcatcgatagcaaatttcgcccggcgcacctgttctgcgtaatagagccagtcccacgctgccgcgcggaagtcgccgccttcctgatcgataacctgctgaatatccgccagctcctgttcggctcgcgcccgcgccgccggagcgattcgccgcataaaggcaaacgcctctgccggggcgcccgccatctgatcggccatcgaccagctggcaaagtcatctgcgcccagcagttgcgctttgcgcgcgcggattgccgtcaaccgcagcaccagctcgcgtgtgtcattcgcatcgcccttctgatttcgcgtccagccagctgcaaaaagattttctcgcgtttgccgatcatgcaacgaaagcagcgcaggctgctgggtggtattgagcagagaaagcagccagcgtccgcttaa

SEQ ID NO: 196625 - DNA, 804 bp, Klebsiella oxytoca
atgaaagattttattaccgaagcctggctcagagcgaaccatacgctcagcgaaggggcagaaattcatctgcccgccgacgctcgtctgacgccttcggcccgagaactgctggagagccgccgtctgcgcattaagtttctcgatgagcagggaagcctgtttgtcgatgacgacgcgcagcagccgcagccggtacacggtttaaccagcagcgacacacatccgcaggcctgctgcgaactgtgccgccagccggtcgaaaaaaaaccggacaccctgacccatctaacggcggacaaaatggtcgctaaaagcgatccgcgcctgggctttcgcgccgcgctcgacgccaccatcgccctggcggtatggctgcaaattgaactggcggagccatggcagccctggctggcggatatccgctcgcgtctgggcaatattatgcgcgccgacgctatggatgaaccgctggcggcgcagtccatcgtcggcctgaatgaggatgagctgcatcgcctttcccaccagccgctgcgctatctcggccacgatcatctggtgcctgaagccgctcacggccgcgatgccgccttgctcaatctgctgcgcacccgggttcgggagacggaaacgatcgccgcccaggtctttattacgcgcagctttgaggtcttacgtccggacattctgcaggcgctcaaccgcctctccagcaccgtctacgtgatgatgattttatgcgtggcaaaccatccgctaaccgtcagccagatccaacaacgcctgggaggggagcaatga

SEQ ID NO: 196626 - DNA, 627 bp, Klebsiella oxytoca
gtgacccttgccggtgcgcttgagcgcttcaagccagatttcgcaggcgtccgtcaggtgccagccggtgatcagatagttatcgccgggcgcttttttgtccccttcgaggcaaaaggaggtataggcgataatgatgccatcgaggatttcgcgcagcgtcatgattgccgggacattggcggaaacctggctacgcagcgggcgcagcacttcggtgaccagctcggggcggggatattcacgaccggcgtcgtaaatcagctggcgcagggattcgatttttccctctttcagtcgctgcagcatgctttcctgcaaggtgagccagttatttgtccgtcgcgcgccgggacgggccagcaggggcttgacctggctgaccggcaccccttttttgacccagtcgagaattttgagcgcctgctgaatatcgtcatcgctgtacagacgatggccgccatcggtacgctgtggcttaaggaggccgtagcgacgctgccaggcgcgaagcgtggtcgcgttaatgccgcaaagctgcgcaaattcaccgatggagtaggtcataaggtacacctgataatcaacaatactctcaataatatactacgaatagcggcgggttga

SEQ ID NO: 196627 - DNA, 909 bp, Klebsiella oxytoca
atgggtatcgatttatcggttatttggtttgttatcattgtcttcgccaccctgatgtatatcgtaatggatggctttgacctgggcattggcattttatttaccactacccgggacacggcggaccgcgacgtgatggtaaacagcgtcgccccggtctgggacggcaatgaaacctggctggtgcttggcggcgcggggctgtttggcgcatttcctctggcctacgcggtcattatcgatgcgctggcgatcccgctcaccctgatgttgatcggtcttatttttcgcggcgttgcctttgaatttcgctttaatgcgacgccatcgcatcgtccattctgggatcgcgcttttatggtcggttcccttctggccaccttcacccagggcatggtggtcggagcggtgatcaacggtttcccggtcaacggccgcagcttcagcggtgggatgtttgactggtttacgccgtttaccctgttctgcggtctggggctatgcgttgcctacgcgctgctgggcgccagctggctggtgatgaaaagcgaaaatgcgctccaccgcaggtttagcctgcctgacctcttcttcctgctgccggtaccgctgctggtggcggcgatcggcgcctggctctggcgaacgcttcgcaacagcgccagccacctgctgccttttactctcacgctggggctgatcttcctcggctttagcgggctggggatcagtatctggccgcatattattccgccggacattaccctctggcaggccgccgcgccgccgcaaagccagggctttatgctggttggcgcgctgcttattctgccggttatcctcggctacaccttctggagctactacgtttttcgcggcaaagttcaacacggcgaggggtatcactga

SEQ ID NO: 196628 - DNA, 771 bp, Klebsiella oxytoca
atgaacagtttctattcctctcaggccggcggcaacgtgcgctggctggacctgcccggccgcggtgaaccgattatctttatccacggcctgggctgcgcctcaacctatgactatcctcgcgtggccgccgatcctgcgctggccggacggcgaacgattctggtcgatttacccggatacggctacagcgacaagccgccatctttcggctatcgcattggcgatcaggccggagtgatagttgagcttctggattgcttagggctaacgcgctgctacttgtatggtcacagcatgggcggcagcgtggcgattgaagccgcagaacggctcgccgaacgggtgctggggctgctggtggccgaacccaatctctatcccgggggcgggatgtacagcaggcgcatcgcggaacaaaccgaagagcgctttattgcccggggctatgccgagatgctcagtgccgaaacctcgccctgggccggttgcctgcaaaacagcgctccgtgggcggtgtggcgcggagcgtccagcctggtgaagggcgctaatccgtcctggtttacccgctttatccatttatcctgtcctaaggccctgatttacggagagcattcgttaccggctcaagaagcgacggatactgtcgcgacggggatcccgctgttagcgatcccgcaggccgggcattcaatggcgtgggaaaacccatcggcgctggcccgcacgctggacaatttttatgccagcattgaggcagaaatctga

SEQ ID NO: 196629 - DNA, 231 bp, Klebsiella oxytoca
atgaagcgactcaaaacagaatttaatgcgctggtgaatcgtggggttgaccggcatctccgtctggccgtcaccggtcttagccgcagcggcaagaccgcgtttatcaccgcactggtcaatcagctactgaatatccacgccggggcacggctgccgctgcttagcgcggccagagaagaacgcctgctgggcgctgagagatcccctcataatttccccaaagcgtaa

SEQ ID NO: 196630 - DNA, 1362 bp, Klebsiella oxytoca
atgtcttttgatttaatcattaaaaacggcaccgtcattctggaaaacgaatcccgggtggtcgatatcgcggttgctgacggcaaaattgccgctatcggtgaaaacctgggggacgcgaagcagatcatggatgccacggggctgatcgtttcgccggggatggtcgatgcgcatacgcacatctctgagccgggtcgtacccactgggaaggatacgaaacgggtacccgcgcggcggcaaaagggggcatcactacgatgatcgaaatgccgctgaaccagctgccggccaccgtcgatcgagagaccattgagctgaaattcgacgccgcgaaaggcaagttgaccatcgatgccgcgcagcttggcggactggtctcctataaccttgaccggctgcacgagctggatgaagtgggcgtggtggggttcaaatgcttcgtcgcgacctgcggcgatcgcgggattgacaatgacttccgcgacgttaacgactggcagttcttcaaaggcgtacaaaagctggccgagatgaagcagacggtactggtgcactgcgaaaacgcgctgatctgcgatgagctgggcgaagaggcgaaaagagaagggcgcgtgaccgcccatgattacgtcgcctcccgtccggtattcaccgaagttgaggcgatccgccgcgttctgtatctggcgaaggtcgccggttgccgcctgcacgtgtgccacgtcagcagcccggaaggggtcgccgaagtgacgcgcgcccgtcaggaaggtcaggatgtcacctgcgaatcctgcccgcactactttgtactggataccgaacagtttgaaaagattggcaccctggcgaaatgctctccgccgatccgcgacgcggaaaatcagaaagggctgtgggaaaagctattcaacggtgagatcgactgcctggtgtccgaccactctccgtgcccgccggaaatgaaggcgggcaatatcatgcaggcctggggcgggattgccggtctgcaaaactgtatggacgtcatgttcgatgaagcggtgcagaagcgcggtatgcctttgccgcagtttgctcgcctgatggcgaccaacgccgcggatattttcggcctgaagcataagggtcgcatcgcgccgggcaaagacgctgacctggtgtttattcagccgaacagcagctacgttctgcaggcggaagaccttgaatatcgccataaagtcagcccttacgtcggccgtacgattggcgcgcggatcgccagaaccctcctgcgcggcgatgtgatctatgacatcgagcagggcttcccgcacgcgccgaaggggaaatttatccttaagcatcagcagtaa

SEQ ID NO: 196631 - DNA, 1257 bp, Klebsiella oxytoca
atggatactatcaataaaacgggtatcgactattggaagaaaatagtcgtggtcatgagtctgggctgggtggcaatatggatttatcgtaccgtattaacacctatttatccggaaattcaggcgtccttaggtaacgtcagtaatgctgaaatcggcgcgattgccagcttctattttctggcctattgcggaatgcagatcccctgcggcattctggtcgataagctgggacaaaaaattatgctgatgtgcggtttctcgctgtttattattggtacgttgagtattgctaatgcgggaaacctgacgctgatttatatcggctcgctgctggccggcgctggctgcgcgtcgttttttagctccgcctattcgctctcctcggccaatgtgccgcaggaacgccgggcgctggcgaacgccatcatcaacagcggctccgccatcggcatggggattggcctgattggctcaagcattctggtcaaaagcatgcatatggcgtggcaaaatgtcttgtttatcgtcgccgcgatcctggtggtgatgctctgcgtgtttaccctggtgattcgccgcaagctaaaagaacccgccgtagcggagaataagcctggcgcagcggctgccgctccggttgctgaagagaaatcggcgccgctgttttcgccgctgctgtgcagcgtctactttctctatttctgcacctgctacggctactacctgatcgtcacctggctgccttcttatcttcagaccgaacgcggctttgacggcggcgccattggttttgcttccgcgctggtggcggtggtcggggtgccgggcgcgctgttcttcagccatctctcggataagttccgcgacagtaaagtcaaagtgattctcgggctggagattgtcgctgcggcgatgctgatgtttaccgttctctcgccgaataccaccatgctgatgattagcctggtgctgtacggactgctgggcaaaatggccgtagacccgattcttatctcgttcgtttccgagcaggcgtcagcgaaaacattaggccgcgcctttagcttgtttaatttctttggcatgagttcggcggtggtcgcaccgacgctcaccggttttatttccgacctgaccggttcaaaagaaattagttttgtgatgtctgccgggttggttattaccggaacgatactgtttgcgctaattaccttgcgtaagaacaaaatacagtcaaagacaatcccagtataa

SEQ ID NO: 196632 - DNA, 540 bp, Klebsiella oxytoca
gtgaaatggtgccgcgcaaatcccgttgatgtagtcctgatggatatgaacatgccgggaatcggcggccttgaggctacgcgaaaaattgcccgttccgttgctgatgccaaagtgattatgctgaccgtgcatacggaaaatccgctgccggcgaaagtcatgcaggccggcgccgctggctacctcagtaaaggcgctgcgccgcaagaggtagtcaatgcgattcgctgcgtggcttcgggtcagcgttatatcgcatccgatatcgctcagcagatggcgctcagccagattgaaccggaaaaggccgaatcgccgtttgccagtttgtctgagcgagaattgcagattatgctaatgattactaaaggtcagaaggtcaacgagatctcagagcagttaaatctgagtcccaagaccgtgaacagctaccgctatcgcatgttcagtaaattgaacattcacggcgatgtggagctgacgcacctggcaattcgccatggcctttgcaatgcggagtcgttagcaagtcagtga

SEQ ID NO: 196633 - DNA, 258 bp, Klebsiella oxytoca
atgagccaccatggcgaccagctcttcggcgtaggggtcgcctgcgcgatagcgggtaccgccgtaggccgcgaagcggtcaaacagcagttttcccggaccgctttcaaactcgtcgccgacggtgatcttgttggtcaccgaacgcccgttgatgaccgtcgaaaagtcatccaccccgtagcgccgctgaaaccacggggtattccagctgaacttccagtcgatggtgaagtgcttaccgcgcagctccgctaa

SEQ ID NO: 196634 - DNA, 519 bp, Klebsiella oxytoca
atggttacgctttggggaaattatgaggggatctctcagggcgtggcgtttgctaataaggtcaataacatcacttttgaagagtggaataaaacaatcgccattaaccttaccggactgttcaacaccgtcaaggcgttctacgacgacttcaccactaatcatggatctatcgtttatatttcatccggctctgcgctttccggcaccggcggcggtgtgagttacccggccagtaaagctggcggtgagggattgattcgcggcctggcaaaagaattagggccgaagggggtcaacgttaatgctatcgctccacgtctgattgataccggtgaaatgatgcgtgtcaattatcctacccaggccgatcttgatgctgttctggaaaaaattccggtacgccgccttggcaccattgacgatgtggctaacctggcaatctttttggctgataaagacaattcgtacatccaggggcaaaccattctgatggatggtggtcgtaccatcgcttaa

SEQ ID NO: 196635 - DNA, 1449 bp, Klebsiella oxytoca
atgagcaaaaaaggattaaccaccggctccggcgcgccggttgtcgataataacaatgtcatcaccgcaggtcctcgcggcccgatgctgctgcaggatgtctggtttctggaaaaactggcccacttcgaccgggaggttatcccggaacgccgaatgcacgcaaaaggctccggcgcttacggtaaattaacggtcactcacgatatcagccgctacacgcgcgcaaaaatgttcgccgaggtcggtaaaaccaccgatctgttcctgcgcttttccaccgttgccggagaacgcggcgccgcagacgccgagcgcgacatccgcggcttcgctatcaagttttataccgaagagggcaactgggatctggtaggcaataatacccctgttttttatcttcgcgacccgctgaaattcccggacctgaaccacgtagtgaagcgcgatccgcgcaccaacctgcgcaaccctacctggaagtgggattttttctccctgctgcccgaaatgctgcatcagttgactatcgacttcagcgaccgcggcatcccgcgctcttatcgccatatgcacggcttcggcagccacgcgttcagctttataaatgccgacaatcaacgtttttgggtgaaattccactttaaatcccagcaggggatcgccaacctgatggatgatgaagcaaaacgtctggtggccgaggaccgcgagagttcgcagcgcgatctctatgagtcgattgaaagaggcgattttccgcgctggaccttttacgtgcagatcatgccggaagcagaagccagccgggtcccttaccatcctttcgatctgaccaaagtatggccgcatagtgattatccgctgatagaagtgggggtacttgagctcaactgcaacccggacaactatttcgccgaggttgagcaggttgcgatgaatccggctaacgtggtgcctggcgtcagcttctctccggatcgcatgctgcagggtcgtttattctcctacggcgacacccagcgctaccgcctgggcgttaatcatcatcagattccggtcaatgcgccgcgctgcccgttccataactaccatcgcgatggcgcgatgcgcgtcgacggcaatagcggcaacggcgtcacctatgagccaaacagcttcggcctctatcaggagcagccggactttagcgaaccgcctttaaatcttgaaggcgcggcggctcactggaatcatcgggaagataacgactattttagccaaccgcgcgcgctgttcgggctattaagcgaagacgagcatcagcgtatgttccatcgaatcgccagcgatatgcgggatatccctgaatttatccagcagcgacaaattggcctgtttagtcaagtccatcccgactacggcgcgggcgtggccgcggcgctgaaagtcttacagaaaaccctgtaa

SEQ ID NO: 196636 - DNA, 321 bp, Klebsiella oxytoca
atgggttggggccatcatcagctgccgctggttattcctctgctgttttatcacggtagaatcagtccctacccgcactcaacgcgctggctggacggtttttctctaccagaggtggccgagcggctctatagccagaactttccgctaatagacgtgactgagatcccagatgaccagctgatacagcaccggcgggtcgctatgctggaactgttgcaaaagcatattcggcagcggcataggatggacatctcagagcaactggtcagaatatccccccgggatacactacccgtcggcagtttaaaacgttgctga

SEQ ID NO: 196637 - DNA, 633 bp, Klebsiella oxytoca
atgaaaattaaaggactacgatggtggattatcggcctggtggcgctgggcacagccattaactatctggcgcgcagctcattaagtgttgccgcctcaaccttatttactgaactgcatattactgaacagcaatattcgtgggtcattatgtcctttcaaatggcttataccgttgcccagtctttctgcggctatattctggattccatcggtttacggattggcttttttatcttcgcactggcatggtccttcgccaatatggcccatgctctggcgtttaactggcagtcgctggcctgcttccgcggcctgcttggcctgagcgaagccgccgcgatccctgcaggcattaaaaccgcatcggaatggttcccgtcaaaagagcggggcgtggcaggtggtctgtttaatatcggaacgtccgtcggtgccatgctggcaccgccgatcgtcgtctgggcgattatttcctggcactggcagttcgcttttattattagcggggggctggggattatatttgcttttatgtggttatttttatatcgctcgccggaaaaacatcaatgggtctcagatgaagaaaaagagtatattttctcaggacaggagaaagctctgcactga

SEQ ID NO: 196638 - DNA, 1239 bp, Klebsiella oxytoca; identical to SEQ ID NO: 173310

SEQ ID NO: 196639 - DNA, 231 bp, Klebsiella oxytoca
atgcagaatagccagaacgaacttatgaccaccgccgtcgccgccagcagtcccgtcaacataccggcgccggtcccgaccataaacaccgttttgcgtccgcgccttctggccagcgcgccaaacggcaaaatacaggccgccatgcccagcacaaaaatggtaatcggcagcgtggccagggttggagagggcgcgatggcgttgccaacaatcgccccggtagcgtag

SEQ ID NO: 196640 - DNA, 1254 bp, Klebsiella oxytoca
atgtctcttcgtcggggcgggatagtgagcaaaatgctcgcgctgatgctgctgaccgcctggctgagaccctgtgcggcgcaaagcaatgagctggtgatggcgacgacattttctcccagcgccaccgtgtggattatcgatcgctggcagacggagccggggtcagtgatgatcaggacgctcaaccgcaccagcgcctcgctggaacagctgcttgatacggcaaatgccgaaaatgtcgatctgatcctgacctcgtcgccgatgctgctgcagcatcttcaggagcatcaaaaactggcgccgttcagcggtgctccggcagtcagccaacatctggtgccggaatctatccgctccacctccgtggccgtggcgatttccgggttcggtttgctgattaatcgctcggcgctgatgacacggcatctgcctgcgccagcggactgggatgacctgaccgatccccgctatcagggggcgctgctgatgagcagtccgtcgcgttcggataccaaccatctgatggtggagtcgctgctgcaacaaaagggctggattaagggatgggaaacgctgttgacgagtgccggaaacctcgtgaccatttcatcccgcagctttggggtggcggataagattaaaagcggcctgggcgtggccggtccggtgattgataactacgccaatctgctgctgaacgatccgcacctggcttttacctatttcccgcagtcggcggtttcgccgacctatgtcgcggtgcttaaaaacagtcagcacgccagcgaggcgcggcggtttattcgctatctgttaagcccggagggccaggcgatcctcgccgatgctaataccgggaaatacccggtaacgccgctggcggcaggcaatccgcgggcggcgcagcaggcggtgctgatgaatcaaccgccattgaactatcggctgatcctcaaacgccagcgtctggttcaacggatgttcgatacggcgatcagctttcgtcttgcccagctaaaagatgcctggcgagcgctgcatagcgcggaggcccgtctcaagcgtccgctgcccgagatacgcgcgttgctgacccgtgtgccggtcgatccggcgagcagcgaggatgaagcctggctggctcagttcgacaataagagcttcgcggaacagcagatgatggagtggcagctctggtttctcaacaatcagcggcaggcgattaataaactggaagaactgaaatga

SEQ ID NO: 196641 - DNA, 303 bp, Klebsiella oxytoca
gtgcagattgagcttatacgcggcgcgggtggcaatatagtccttatcattacccatcagcgactgcagacccttgacctgcgcgacttccgtgacgttcagggcttcgcggccgggataggtgctcatccgggaagaggcgaaaacgccggtcttgtgggggacggcaccgggggcatagccggcatgctccagcgcatgccagaccgcctgcaaaaacagccgctgctgcggatcgatagattcggcttcttgccgcgagtagccaaacagggcggcgtcgaagcagtcggcgttgtctaa

SEQ ID NO: 196642 - DNA, 447 bp, Klebsiella oxytoca
atgccgggtgccgttgttggccgccagatccagctcaaactggcgggccagcggcatcagcgcctcttcttgcgcgaacaccgccaccatcgcgccgtttgcgcacagctgcatcagcgccccgcggcggcaaaccagcggcataacctgttcaatcgtatagtgtccgcagaccacggcggcggcaaattcgcccaccgagtgaccgatggcgtaatccggctgcaatccctcggcgcgccaatgcgccgccatggcgatttcaaaggcaacgatggccggctgcgcccaggtcatctcctccagctgcgccgagtcgggattaaacatcgcgtcgcgcagggagggcgtgagcatttcacgacaggcggaaaaacagcgttccagcgtgtcggcaaacaccttcgaatgctggcacatggcgtggcccatggtccgccagtgtga

SEQ ID NO: 196643 - DNA, 414 bp, Klebsiella oxytoca
ttggttgaaatagcggccaaagctgaactcctgatagaggacctccacgccgtcggaggcgccctgtgggaagatgatcgccaccggctcttcctcgccgctcatcatttcatacagccgctcgccggcgcgggcgatggtctcgggaatagcctgaaaaccttcacaatagccagcaagctccgccagcagagcttgcctctgctcatgttcaatcgggcgggcgcggaaataacgcccgtcagcgtagcggtagtcgccgtcggccacgcagttattcagcaggcgttgaagcagctgctggtagcgcggcagcagacggcctcggcgcataatggtcatggcgtcgacgccgctggcaatggcatcgtccgcacagcgttgtaccagccgatcgacatagatggcgtgtag

SEQ ID NO: 196644 - DNA, 765 bp, Klebsiella oxytoca
atgggcgctttgacccggcgcgccgagggcggcggctgcggaggagtaaagaataagatagcgtgcgttgtggtcgctcaggctttgccgcagctggtctgccgcctgcgctttcaccgcgaaaaccgcggccagctggcgatcgtccagatcctgcagcggcccatcagccaatacgcctgcggcgtggatcgccccggcaatgccgccatcgcccgccagcttatcgagaaccctggtcagctgtcgggcgttgccaacatcacaacggcagacgcggatttgcacgcccttgatgccgcccggccaggaggcatccacgcgcggcgccagcagggcaatacgttgcgcccctttttccttgagccagttaacggcaaggcggcccaatccgccaaacgcgccggtcaccagatgccagcgggtatcgccagcgaagacatttgccggaagatcggcggcgcgccctggattcggcgccagggaggggagccagagggcgttgccccttgcggcgagccagcgctgagaaagggagacggcgctcaatccctgacgcagcgtttcccatggcgtgttttcggccagatcgatggcggcaatcaagcgttccggctgttcattggccgcgacgcgaagcaaagcccacagagcgtgatgagacgcggcgagcgcctcattctcctcaacctgccacgcgcggcgagtgatcgcaatcaatcctccggcgccggtggtcagggcctccttcacttgtttcgctaa

SEQ ID NO: 196645 - DNA, 495 bp, Klebsiella oxytoca
atgatccagccagacctgtggcgtttgcgtgaacacatagcagggttcaccgaacaggcgactcatcgcccgatcgatagccatgccttccagcgtcattcccagcatgctggtaaacaccaccggcatcagcggttgatgctgcgatccgcgcaggcgccccagctcgcggatcacctcgacgccgttcatttcgctgtgcgccatgttctgccacaggcgctgctgggttcgttgcatctgctcttgcagcgtcgccggcgcggtgaagttaaaatcgaccagcgtgacggaggtaaaatcaccaatcaactggttaatttgcggatgaaccggctggcgattaaagaaagtcaggttcagggtaaattcagcggtgcggctccagcgctcgagggtggcggcaaacagcgtgagcagcgcggcagaaggggtgagcccttgctgctgccagcgctgcttaacggcctgccacgcaggcttgccgatcgttga

SEQ ID NO: 196646 - DNA, 453 bp, Klebsiella oxytoca
atgatgatggtgttcggactttttgtatttgaactcaggacactgccctatcagcaattgcagttgtcccgtaactggcggcacgttaaaaatgatcgtgtgggccgtagtgcaaaatggcagtacgttggcgcaggtgagaaccagctgacgctgggtgggttgctttatcctgaaatcactggtggcaacctgtctttgggtgccgtctcgacaatggcttacaccgggcttgcctggccgctaattgatggcgttggctccatctacggaatgtatgtcatcacgggcttgcaggaaacgcatcaggagttcgatcgctacggcaaagcgaaaagaattgagttcgcactctcactgcaaagggttgatgaggatatcagggagcggctgcaaaatatctctgttagtgaactgattgcaacgcttaaagaaggggctaaaactgggtaa

SEQ ID NO: 196647 - DNA, 489 bp, Klebsiella oxytoca
ttgtcagcgtggataccgcccgacagcgtgctcatcaggctggtcagcaccatcgacgcgcccggcagcaccaccgccaacccaccgacgcccgccatcactagcatcgccggaagcgccagccagcccagttccgccccgctattctctcccggcttgccggtgacgctggtgacctctttatcgccagtcagccgtttttgcagccaccaggccagcagcgccaccgcgatcagcagcagcgaaagcagcgatgcgccgggcagatcgacgggccagtcggcaagctttttctcaatgcctacggttagcatgaccagccctgcccgcgacccgagggccgccggaacgccgtattcctcaatcgccagggtaaacgccaacagcatccccgccgccagcgccggcgagagcatcggcagcgtgatgtgccagaacgcccgccaggcgctggcgccgtgcacccgggcgacaatcgccaaccgctga

SEQ ID NO: 196648 - DNA, 651 bp, Klebsiella oxytoca
atgtatggcggcgtcagaaaggggatcagaaagagcagatcccacagtcgcggcagcggaatagtaaacaatccgcgcacgacgcccagcggtagaccgatgaccacgctcatcagcgccacgccgcaggccacccacagggtaccgccgagcatcgtaggcagctgcgggtcggcaatcagcgttgacacgccgctaaacgcgccgctcagcgagccggcgctaaaccggggaaaaatcgcctggaggacgataaagagcagcggcaacgccaccagcaccagcagtgccgccagcgtgcccgctgaaataagtctctgtttcacgatatattcctggatacgatcttacccggctcgcgctgcgcttagccgggctacagggtcacatccgtctacggtccggcagaccatatgcgcgccagcgccgcctccggtgaatgtgcccgaaccaaatttcgcagcttggggaaaagtcggtttactgggcgaaaagcgtattaaagcgggaaagcaccgcactacgttcgctagtgccttcgccggcggtcggcagaattttcagctcgttgagcagcgggcgcttcgccggaatatcgctgcgggcgggcataagccaggcgtcggcgaccagcgcctggccttccggtga

SEQ ID NO: 196649 - DNA, 600 bp, Klebsiella oxytoca
atgcggacacgctttagtctacggttatctccctttacttcatttcctttctcacaggccagaaaacataactggcctgaatattctctctgggaccacggtcccacctgcatcgtcggtcaggttatctgcctgggaccacggtctcacctgcgtcatcggtcaggttatctgcctgggaccacggtcccacctgcgtcgtcggtcaggttatctgtctgggaccacggtcccacctgcgtcatctgtcaggtaatctgtctgggaccacggtcccacctgcgtcatcggtcaggttatctgactgggaccacgggcccacctgcgtcgtcggtcaggttatctgcctgggaccacggtcccacctgcgtcatcggtcagcttatctgtctgggaccacggtctcacctgcgtcatcggtcagcttatctgtctgggaccacggtcccacctgcgtcgtcggtcaggttatctgtctgggaccacggtcccacctgcgtcatcggtcaggtaatctgtctgggaccacggtcccacctgcgtcatctgtcaggtaatctgtctgggaccacggtcccacctgcgtcatctgtcaggtaa

SEQ ID NO: 196650 - DNA, 1212 bp, Klebsiella oxytoca
gtgctgggcgtcaagcgcgtcccgcagcgggattttggcattccgcgttttacctatgacgaagggctggcccagctctatggacaacctccggtctggccgacgcccacccgcggcgtcagcgaaatccgcctcgctctgcgctatcgctctaacgattcgctgctgcgccattttaaagagacttcgacgctctacctggagattgtcgattatcccggcgagtggctactggatctgccgatgctggcccaggattacctgacctggtcacgacagatgaccggactgctgcaggggcagagggcggcgtggtcggcgcgctggcggcagctttgcgaagggctggatccgcttgcgcccgccgatgaaacccgtctggcggagatcgccgcggcgtggaccgattatctgcacagctgtaagcgcgaagggatgcattttattcagcccgggcgctttgtgctgcccggcgaaatggctggcgcgccggcgctgcagttcttcccctggccggacgttgatgccgccggtgaggctaagctggcgcaggcggacaaaccgaccaatgccggaatgctgcgcgagcgttttaaatactactgcgagaaagtggtgaaaggcttctacaaagatcattttctccgcttcgaccggcagattgtgctggtggactgcctgcagccgcttaacagcgggcctcaggcgtttaacgacatgcgtctcgcgctgacgcagctgatgcaaagcttccactatggccagcgcacgctgtttcgtcgtctgttctcaccggttatcgataagctgctgttcgccgcgaccaaagccgatcacgtcaccgtcgatcagcacagcaatatggtatcgctgctgcagcagctgattcaggatgcctggcagaacgcggcgtttgaaggcatcagcatggattgcctgggtctggcgtcgattcaggcgacgcagagcgggcttattgaggtgaacggggagaagatccctgcgctgcgggggcatcggctaagcgacggacagccgctgaccgtctatcccggggaagtgcccgcgcgcctgccgggtcaggccttctgggagcagcagggctttcagtttgaaaacttccgcccgcaagtgatggatgttgataaaccgctgccgcatattcgcctcgacgcggcgctggaatttttgatcggagataaattgcgatga

SEQ ID NO: 196651 - DNA, 231 bp, Klebsiella oxytoca; identical to SEQ ID NO: 20732

SEQ ID NO: 196652 - DNA, 507 bp, Klebsiella oxytoca
gtgaagctgctctcctcgctgactcacaataagagccacccctgctttaccattgttgtaaaccgcaaagctcttgttattggcgtccccgtggtaagacccagcagcctcctttcggagaccaaacaacacaccacagacggcgttcaactctcccttggtaagctgcactgttatttttttctcccagtttggggacgaacgtggcttcgagatcggagcaacctcgatgctgactgtcgggtagttcgccttcgtcatggtgtactgggcgttcaggcctgtccgcttgactggatcctgttgcccatcagagtagaacttgatgctttcaccaaaatcgttttcttcgctcatttggttactcccttcaagatcttagccgcctggctggacagcccctcgaagatggcgctactgatgtgctctgggaaaccggctggcagctcagccgctactgtggcaaccacctcctctgtcttggtagccatgtcgaacataagttga

SEQ ID NO: 196653 - DNA, 207 bp, Klebsiella oxytoca
atgagcaaggatttaaatgttggaattgtcgcggattggcttgtgacttatgcgggctcagagaaagtaataaaagagtttatagaattatatcctaacgctagcttatattcagtagttgattatttatcagaaagcgatcgacaattatttaatggtaaaagggcaattacgacatgtgagtctaatattgccattagcaattga

SEQ ID NO: 196654 - DNA, 987 bp, Klebsiella oxytoca
atgcgtagaatattaatggatatgagatgggaagggactggtggaatagggacttttgcaaaggaaatcaatagaattaatcgttatgagacgcctggtttttctggcaagccttattcaccttttgatcctataaaaacagcgcttaggttaataaagaaaaaaaacagtgttgttttcttcccaggatttttaccacctcttttttcattagaaccatacgtatttactatacatgatttaaaccatttagatcgccaagataactcaagtttttttaaaaaagctttttataatttcatcattaagcgcggttgttcaaaatcgaaattcatttttactgtttcagaattctctaaatcaagaatagtacagtggtcagggcaagatccatcaaaaataatcaacgttggtaacggtgttgctgaatgctttacaccggaaggtgagaagaaaaatttcgggtttaaatacttgctgtgcgtgagtaatcggaaaacacataaaaatgaatataatactattttagcgttcaagaagtccgggttatataatgaatataaactggtgtttactggatctccaaatgaaactatttcagattttatagaacatcatggcttgacggaatccgtccatttcactgggtatttaaaggatgatgaactaccgcttttatacagaggagcagcagctttagtatttgtttctttttatgaagggtttggattaccagtgatagaagccatggcaagtggtatcccagtggtaacgtcaaggacaacttctttgggtgaggtggcaggtgatgctgcgttattggttgacccagaaaatataaatgaaattgcggatgctataaatcagattattttagataataattgtcggcagcaacttgtaaataaaggattaatgcaggcaagaaagtttacgtgggaagaagttgcacgaaaagttgataatcatctccgacgtattaaatga

SEQ ID NO: 196655 - DNA, 600 bp, Klebsiella oxytoca; identical to SEQ ID NO: 187340

SEQ ID NO: 196656 - DNA, 996 bp, Klebsiella oxytoca
gtgactccgattctgacagcgattccgactctgacagcgactcggactccgacagcgactccgattctgacagtgactccgattctgacagtgactcggactctgacagcgactcggattcggacagcgattcggattcggacagtgattccgactccgacagcgactcggactcggacagcgattcggatagcgacagtgactcggattctgacagtgactcggatagcgacagcgactcggatagcgacagcgattccgattctgacagcgactcggactctgacagtgattcggactctgacagcgactcggattcggacagcgattcggatagcgacagcgattccgactctgacagtgactcggattccgacagcgattcggattcggacagtgattccgactccgacagcgactcggactcggacagcgattcggatagcgacagcgactcggattcggacagtgattctgactctgacagtgactcggattccgacagcgattctgactctgacagcgattccgattctgacagcgattccgattctgacagcgactcggattcggacagcgattccgactccgacagcgattcggactctgacagcgactcggactctgacagcgattcggactccgacagcgactcggactccgacagcgattcggacagcgattccgacagcgattccgactccgacagcgactcggattcggacagcgactcggattcggacagtgattcagactccgacagcgactcggactctgacagtgactccgactccgacagcgactcggatagcgacagtgattctgattccgacagtgactcggactctgacagtgactcggactctgacagcgattccgacagcgactcggactccgacagcgattctgatactgaagcacccactgcagcacagaacatcacggttaatgacaatgttggttccatcactggtgcgcttcattccggtgatgtga

SEQ ID NO: 196657 - DNA, 318 bp, Klebsiella oxytoca; identical to SEQ ID NO: 52346

SEQ ID NO: 196658 - DNA, 981 bp, Klebsiella oxytoca; identical to SEQ ID NO: 95379

SEQ ID NO: 196659 - DNA, 600 bp, Klebsiella oxytoca; identical to SEQ ID NO: 187340

SEQ ID NO: 196660 - DNA, 600 bp, Klebsiella oxytoca; identical to SEQ ID NO: 187340

SEQ ID NO: 196661 - DNA, 162 bp, Klebsiella oxytoca
atggctctgggcgaccgcggcctgtcgctgcgccagggcaccatcgtcgatgcaacgctgatcaatgcgcccagttcgaccaagaacaaggacggcaagcgcgacccggaaatgcaccagaccaagaagggaaaccagtattatttcggcagtgcgacctga

SEQ ID NO: 196662 - DNA, 348 bp, Klebsiella oxytoca
atggctatcttcatcatcagcaataaccagtatcttcgagatggcattatctgtgtcggacaatataacgcgatggaaatcaaaagctgtcagtgtgacgacccgcaactcgatcgtttaaactatgaagatattgttatcctgcatctgagtttagaaaacaaatgcaacgccagcaaactttcctcgttaaaccagcgatgcaaagtattactgattctgagttcgtcgcagcatgcactcatctgtgatgcagataccgtgataaatgctaaagcgccgccggaagttataatgaaagcgctccgctctgatgaatcccctaatgattttggtaaaaatcattaa

SEQ ID NO: 196663 - DNA, 321 bp, Klebsiella oxytoca; identical to SEQ ID NO: 103996

SEQ ID NO: 196664 - DNA, 258 bp, Klebsiella oxytoca
atggaacggattgaacatcacgtctgtttcggcggcagccaggaagtctggcgtcaccactctgcggtgaccggcacgccgatgactttttccgtgtttctgccgccgcaggcaaaaacagagaaatgtcctgtgctgtactggctttccgggctgacctgcaacgagcagaattttatcaccaaagccggggcacagcgttacgcagcggaacacggcctggtgattgtcgcgccggaggcactgttgcaaagttag

SEQ ID NO: 196665 - DNA, 294 bp, Klebsiella oxytoca
gtggcgcacgtcttcggtgaacgcactctggccacactggagcgtcttctgagcctgctgtcggcctttgaggtcgtggtatggatgacggatggctggccgctgtatgaatcccgcctgaagggaaagctgcacgttatcagcaagcgttacactcagcgcattgagcgacataacctgaatctgcgacaacatctggcaaggctgggacggaagtcactgtcgttctcaaaatcggtggagctgcatgacaaggtcatcgggcattatctgaacataaaacactatcagtaa

SEQ ID NO: 196666 - DNA, 159 bp, Klebsiella oxytoca
atgagcatgcaggtgcagcttcacgtcgtagcgttttttgatttcactcaccagctcaaaggcggccatcggggtgagaatgccggacatgtctttaatcgcgatggaatcgacgccggtttccagcagctgttcggtcaggtcaagccaggtctgtag

SEQ ID NO: 196667 - DNA, 1179 bp, Klebsiella oxytoca
atgtcgaagaacacgtctgaaatgaaactcaccccgcccgtctccggggctttttccgggctaaaagggatgaatctccaggtattcgtgatgatcgccgctatcgtggccattatgctgtttttcacctggactaccgaaggcgcttatttgagcgcgcgtaatacctctaacctgctgcgccagaccgccatcaccggcattctcgcggtcggcatggtgtttgtgattatttccgccgagatcgatctttccgtcggctcgatgatgggcctgctcggtggcacagcggcaatatttgacgtctggctcggctggccgctgccgctgacgattgtgatcacgctggcgcttggcctgctgctgggcgcatggaacggttggtgggtcgcctaccgtaaagtcccgtcgtttatcgtgacgctcgccggtatgctggcattccgcggtattctgataggtatcaccaacgggaccaccgtctctcccaccagcccggcgatgtcgcaaatcggccagagctatctgcctgatggtattggctttggtatcggcgtggcgggaatggcggcctttattatctggcaatggcgcggccgtatgcgacgtcaggccctgggacttgccacgcccgcttccgcttcgaccgtaggtcgccagacgattaccgccgttattgtgctgggcgctatctggctattaaacgactatcgcggcgtcccgacgccggtactgattctcgccgcgttgctgctggcgggtatgtttatggccacccgcaccgcgtttggccgccgcatctacgccatcggcggcaacctggaagccgcgcgtctatccggcattagcgtggaacgcaccaagctggcggtgttcgccattaatggcctgatggtggcgattgccgggttgattctcagttcgcgcctgggcgccggttctccttccgccggcaacatcgccgaattggacgccatcgccgcctgcgtgatcggcggaaccagcctcgccggcggcgtcggcagcgttgccggcgcggtcatgggcgcgtttatcatgtccgcgctggacaacggcatgagcatgatggatgtcgccaccttctggcagtacatcgttaaaggggtcattttattactcgcggtgtggatggattcagccaccaaacgccggagctga

SEQ ID NO: 196668 - DNA, 1542 bp, Klebsiella oxytoca
atgacattaatcacgaaggctacagcagaagcagcaaggcttttctttttgaagcatagtagctattgcaaattctcacttccaatttattttgactttgaacctttattgtcttctatacaaactgctttaagaacaaaacaaaatggtataaatgacattgggtacaaaaaagcttgtgattatgaaaatgttaactatacattgcaaacaaataaggatggtcagtattcatggagaccctttgaactaatccacccggctatttatgtacaccttgtagagaaaattactgaagaagaaaactggaaattattagtcgataggttcgataaattcaaaagaaatgagagaatcgtttgtgctagcatcccaagagagtcggaaaatgataaaatttcagattctgctaagacagtgacgggatggtggattaatgttgagcaagaatcaataaatcaatcacttaacttcaaatatttattcactacagatatagcgaatttttatccatcaatctatactcattctatcccttgggcaattcatacaaaagatatcgctaaaggcatcggtagaagtgataaaaaattactaggaaatcaaattgatcttgctttacgtcaaatgagctgggggcaaaccaatggaataccgcaaggctcagccctcatggactttatttctgaaatagtacttggttatgctgatgaaatattaggggataaacttgatactgaaaatatcactgactataaaataattagatttcgtgacgattatcgagtatttacaaatagtaaagaggactctgaagcaatagcaaggcatctaacggttattttacaagaacttggattacaactcaatgcttctaaaacctcactttctgaagatattattcttgactccatgaagcaagataagaaagatgccttgatgacattcggtagtaccattactgctactacaatccaaaaggcattgcttaaactaacaattttctccagaaaacataaaaactctgggcagcttgataaatatcttgcaaagttaaatatacgattagaacggatgtctgaattgaaagaggaagttcagccaatcgttagtatcatcacagacctgatgatcaataacccgaggacatttgcttcctgtgcattagttttaagtaacgtgcttaagtttttagaagacgatagtgagaagataaaaataattgaatcaataaaactaaaattcaatcatatcttgggtacagggattttagatatatggctacagagaatttcataccatataaaacaagatattgagtatgaagaagttctttgttctatagtatcaggactacacaataagccacatgagctggtctggaactccgaatggataacagatgaaaactttaaaactaatgtaatgaatacaaatttcattaataatgatgaacttagaaaatgtaaacctataatttcagatcgcgaggtcgtacttttcccctacggtgcagactttaatgatgaagaggatgagtaa

SEQ ID NO: 196669 - DNA, 543 bp, Klebsiella oxytoca
atggctaatattggttacatccgcgtgtcatccatccagcagaacacagaacgccagttggctggtcttgcacttgataaagtgtttgaagaaaaagcgagcggaaaaaacattgagcgcgaacagttcaaagccatgatggattatgtgcgtgagggcgacaccttgcatgttcacagcatcgatcgtctttgtcgtaaaacttctgatttgctggcaaccgttgaagaacttaccaaacgtggcgtaatcgtccagtttcacaaagagggtttcaaaactggcaaggaaagtgccttcggcaacttcatgctgactgttcttgccggggtagcccagatggaacgcgaatttatgcttgaacgccagcgagaaggctacgaagctgccaagcaagctggacgtattactgggagaggaaaaagctccacaatcgatcgcagagctgttaaaaacgatctagaaactggaatgtcggtgcgaaaggcagcggagaagcatggtattagtacgcagacagtgatgaaaataaaagtcgaatga

SEQ ID NO: 196670 - DNA, 225 bp, Klebsiella oxytoca
atgaaaagtaaaaccggtgattcttgggctgaattttttgctgaagtggaacgtgaaaccgataaagaaattgctgaagtgagtaggcaactggcattaagcgaagaggaagataaggcgcttcttgcttctctcgaagctgaaccgctgccggagttggatttggatttggatttggatttggatttggagctggatcttctggatattgatttcgattggtga

SEQ ID NO: 196671 - DNA, 1014 bp, Klebsiella oxytoca
atgccgggcaagtcaacgaaggtcgacggctggactgaaaaaacccttcgtggatttaaagattttgttcgaggcattgatcaagacaacttcattggcggacacgtgtcagctattaccctaacgacaggaaagcgcccatctcctgagttgtttaagaaaatgatcgccgccgtaaccaatgagctaaacaaaatgacgggcggaaaatgggtctactgtattgaaaaaaccaagaaccagaaggctccgcacgttcacttaattgccgtgttccctgattcatgcggtgatattgatgcaaagaaagtaattgcagcctggtttaaatgggcgatgaaatcgaatctcgttccgtcgattgaaaatcaagatgcacgggacgcatggtccccagagggctggatgcgctacatggcgaagcgtgatagcaagttgatcatacacggcacaaaggagctttccgtaaccaaaggctgtttgccgggcgtgcgtatgtggggtcatggtgacgggtggtcgctgtctcgtgaagatatcgatttaactgacgcagctcaccgcgtcataacgtccatggctgacactgctatcgacatccagttacgtgataaaggtttgcgggataaggttgtatcttcccggaaaaggcttgagagatacggtagcgcggctattgtcgccccacggtctttccgaccgtcggagatgggcgtttccattatcaaagagctggctgcaaatccgggtcttgtttttggggtaaacgggataggctttcgccctgaaagccaccgcgaatgcgaaattctacgcagaatgcttccattgcaaatcgccagggaaattactcaggaagagttcgagtctctgtatggcgaaatttccgaacattacgacgaggagatggaagacatgttggcagacatgcgggaggcagaaatggaggacaggcatcggtccggcgatattcatatctatgatgagcaagcgcatgatgccgagtggatgtga

SEQ ID NO: 196672 - DNA, 381 bp, Klebsiella oxytoca
atgcgtaatctgaccagaaccgaagtagccaagctgatccggaataagctgctgaacggcggcaggctgacaccaaagcaacttgaccggattttgcagaaatacggaaatcacgaacgtagccgagttctggagcttttgcgctgtaagtggggcatccccattaccacagactcgaaaggctgttacagcatcactgagagcgatttaagacggtttgccgatgaccccgatgatgttctatctggctggaaggaagacgcgaaaaagaatcgtgagtatcgccagctttatcggtttgttacggcgtttactggattgaccggaatcagcagtgagacaagacgagaggtgctggcagcagtgaaagccagaatttaa

SEQ ID NO: 196673 - DNA, 207 bp, Klebsiella oxytoca
atgaaagatcaatatctggttgcagaagatgcagccgctcatctcaatatcagccgcgcccgttttttcgactttcgcagatttatccccacttttcccaaacctatcaagactcgtttaaatggctctcgtcctcgccttgtctggacacctgatcagctagatgcctttgcattgtctttctgggggggttgtgcacatgcgtaa

SEQ ID NO: 196674 - DNA, 249 bp, Klebsiella oxytoca
atgaacagcattcacaagctgaacaaaaatcagtcatggaaagccaaagcagcattaatactaaatgacatggaagtaaaatcagcaaaattcgtcgacattgatttattttgtgtagcgatcagtttgccaaaatctacgatgcggcaagaagatggtgacatcataatccatgatgtttatttgaacgataagcacctcatggcaatttctaccggaaatactcatctcattacaagaatgagttag

SEQ ID NO: 196675 - DNA, 210 bp, Klebsiella oxytoca
atgaaaaactctcttatccggttgcatgaggtactcaatcgtactggctacagcaaagcatggatctacgctctgatgagcaaaggtgagttcccccagtcggtaaaaataggtactcgtgctatcgctttcattgaacgcgaaatcgatgattgggttgaacaacgcatagccgaatctcgtaatcacgggcagtgccaccacagttaa

SEQ ID NO: 196676 - DNA, 714 bp, Klebsiella oxytoca
ttgatctatttcgaaaaattgatcaatgagctgtcgactgtttacaaaacagacaaacgtgatgccagcgatatgcttttaagcaattatcggatgagtaaatctgacccgtcagacaagggaattttacgctgttataaatttacgtctaaagatggattcaaaactgacgaattttttgaagagcaatgtgtagaatttttaagccgtattgcagatggatatgaatatagtgaagaccctattccggggcatgaaggatactataacgttaggaaaggtagaaattttctatatccagatgatgaagatgtttggtatgggaactatgagttatttggctttcgtcgctcagaagtagtgaacttcttccctgcacttgaaatggttttttctgatatctctggtgaaattgatgatgccggggacactgtggatgacacgccagtgagcacagagattgttgcagaaacttggcacggtaaagagactgcatggaaattgattgcggggttagccattgcactgagtaaaacagataaagactatatatggggaacctctccaaatgtgtcgaaaatttgtgcacaggcagcaacctttgcttccgagtttggggaagatcatgtagatgtaatggaaattgataatttgagaaaattactcagttctgccttaaaacggcatactcccaaactaaaaccaaaatcgtga

SEQ ID NO: 196677 - DNA, 1335 bp, Klebsiella oxytoca
atggggcataatccggggcacttccggttcgatgtaaaatatgcccccaaaatgaacagaaacatccgcgacaaactctctgcacaaacctgtaaaacagccaaacccaaagagaaaagttacaaactctctgacggtggcggcttgtatcttgaagtatccccgacaggttctaaatactggcgtatgaagtatcgtcgtccttctgacagaaaagaagatcgcctcgcttttggagtataccccgatctgaatctggctggtgccagagcaaaacgagatgaagccaaaggtcttctcctccaaggtatcgatccgaaagctaagcagaaagaagaaaaagcaactgcgaatggaacctatacttttgaagctatcgcacgcagctgggcaaatcatcagatgtggagtacagatcatcagaaacgggtattaagcagtttagaacgatacatttttcctgccatcggcgcgttagatatccgcaaactggaaagcttcagcattacaccgctatttcagaaagtgcacgagatgggaaagcacgatactgcggatcgattgaaacagcgggtaaaagatgtggtgcgttacgctcgattgagtggtgctaaaactgagattatccctgatgacctcaatatccgtttaaagaagcgtgatacaaaacatcatgcagcattaaaaacaggtgacctagccctatttttccaaaagttagcagactttaacggaaacctgataacacgtctggctattgagttaaccatgttgacctttgttcgctcaagcgaacttcgctttgctcgctggcatgaatttaatctcgatgaagctcaatgggtaatccccaaaaaaagggaattaatcgagggcgtaaagttttccgatcgtggcactaaaaagggaaaagtcgaacacgttgttttcctcagtcgacaagcggtctctgtaatcgaacgtttaaagaaaatcaccggtaactatgatgtggtctttcccagcgaacgaaatcccaaaggcgtgatgagtgagaatactatcaataaatcacttcgtttgatgggatataacacgcaagaagaggctactgcgcatggctttcgtaccctcgcctgtagtgctctctatgaatctggtttatggcaacaagatgcgatagagcgacaaatgagccatagagaaaaaaatgatgtcaaggcgacttacagtcgcgatgcaacctataacgaagaacgggcaaccatgatgcaatggtgggctgattatcttgatgccaatcgcgaaacacatgtcacaccctatgaatttggaaaactaaatatccatggctaa

SEQ ID NO: 196678 - DNA, 234 bp, Klebsiella oxytoca
atgcttaactttttgctcccgttaaacttcgctaaaagcggctgcgtcctttcgcgtattagaccgttcacggtcttaaatttgctgaacgcagggataaaaaactcggtctttaaatataataaccccagcaactacaatctgttattttccaacgaacgcgttttttgccatgccagtcttattcgcatgccagcactcaaagccctcttcatcgttaacgtaaaaacctga

SEQ ID NO: 196679 - DNA, 894 bp, Klebsiella oxytoca
atgaaaattaaaaacaaagcagcaataacctattctctgataattgtattttttgctgtagtatactattggacttggttagcttatccagactcattcataaaaaataacgctctgaactctactcctattcataatgctataaatttagcattttcgtatcatggtgaaaatcatgaggattatgaggttatttcaaacgaggatttttccaaagagacattgaaagaaaaaaaagaatttgacagaataattagccaaaacattaagcttgaaagtatactatcccagcaagaatcaaaactaaaattaataaacgtaaatctgtcaaaagcatgggctaagaatacacaggcctatgtggacgaagcgtctctaaaaattcacaaggagctgaatgttaaagaaggcgagcttaaagctatattgtcacagaagaataaaattcaagaaagccagtttgatattatgttggctgataaaaacatcgaaatatcgaaaattaaactcaggatagcaactttagaacgcgatgctttagagtatgttttatcacatgctggtgacttcaatgatccaaagatcgtttctgaattaaataccaccaataaaataatagatgacgcgacatctaaattaattataaataataaaaaaataattaaaataaaaaataatgtgcaagatttgttgagtaaacgtcaaaaggaagatctaaatttttgggatttcgctttttacagcattggaatatcaacaacaactacatttggtgatttagtcgctaactcaagattaatcagaatgctagtttgcatacagctgttgttatctattttagtgctagccaacgtaactcaaagttttttgtcaaaaaataagaaatcactatga

SEQ ID NO: 196680 - DNA, 1062 bp, Klebsiella oxytoca
atgttgattgaagataatgtcgataatccatttttactggcctatccaccaagagaagaagatgaaatcaaagggctggatttgttattgtcaggtgattatgatggtattcaattaacattttttgactcgcatacaatgcgtgttatggatctgaaaataaaaatttcggaaaatttatcggataaatatttaaaaaatttttgtgctaattcctattttctcaattcaggatttagggaaggcaatgaagcaatggatgaattctgcaacaatgctttgactggtagcgagaaaatattcagtctgccactaagtgtaatcgataaaaaatcttaccttgcaagtgttcatgaaccaaacgataccgaattaacatatgaatttagcgccagcaaaaacggctctgagggatatgagcaggaagctcttataaatcacgctttgcggcaaattttctcacctgaagaagtgtttttttctcccgatgttattgagggtaataaaaaaagagaactagttgatattcttgttgtagaaaatgaccacgtattatctatacagtctaaagcatcatcattgattgaaatgggattaaaatctcatgagaagctttgtagcatgtataagaaaaaagcattacaaggtatcgatcaggttaaaggcgttatcccaattctaaataatgatgtggttattagtcatgatgggatggaacatttaataaagagaagaaggggtgtttatcatttggtgataatctcagatcttgttttagagaaagaagatgctgaaaaaatttataacgaaattagcaaccttaaagagtcaaaaggggcgagagttttagttatgagtcttgatggtcttgtaaattttataaaactatcaagattaaataaaagaatgttttgggaaatgctggagactaaatacaagttcagcataaaaaaccgtacaattttaattagagatatcgactctagccaagagaataatctaccattacttgccactgatcaatacctatcacttcttcgaggtaagggaaaattaaaataa

SEQ ID NO: 196681 - DNA, 171 bp, Klebsiella oxytoca
atgatggaggacagttcagcgccaggcaatatggtttttttaaaaaacgccgtggtgacgcggctatccccggcgcagcaaaaacatattacgtctcatcgcgtgagtctgatcgccttttttcattccccctcgcctgtgaccatgatcttgttcacatatctcatgtaa

SEQ ID NO: 196682 - DNA, 1149 bp, Klebsiella oxytoca
atggcaggtatcaggttatttctcctgacccttttaatccccgcttccgtaacgtttgcttccggcacgagtattaccggagcggcagggatagctgaagaaaatgattatacttttgaccctgctctgtttcgcggcggtcgtttcagtgaaaccgcgctgatgcggctgagcaaaccgggaaatattgcccccggcaacttcaaagtagatgtttacgtgaatggtggattcgtcagcagcgataatattaccttcagtgaaacagaaagcgggcaggtgcggccgtgcctgacgcccggtcagcttgcggcagccgggattgcgccccgcaacggtctgcctgccggcgcaaaagagaacaatacctgtctctccctcagctcgctgattgaaggcagcagcagccattttgacacatcccggctgcggctcgagctgagtataccgcaggctgacatgaatatccggccgcgcggctatgttgatcccggcgaactggaagccggcagttctctgggatttattaactacatcacaaactattatcacgtctcttactccggtaataacgcccgggacctggactccggctggctgtccatgaacggcggaataaatctggggatgtggcagttccgccagttatcaaatgtacagtggaatcgtgactcgggcgcaaactggaataccctccgccggtatctgcagcgcccgttgccggcattcaacagccagcttaccgccggtgaactgagcacgaccgggcgtctgttttcaggtctgagctataaggggataagcctggccaccgatgagagaatgttgccggattccatgcgagggtatgccccggccattcgcggagtggcaggcagtacgtcgaaggtgacggtctcccagaacgggcgacagatttaccagaccacggtcgctcccggcccgtttgatattaacgatctctatccgaccagctacagcggcgatctggatgttgaagtcactggggccgacggcagcgtaagccgattcagcgtgccgttctccgccgtaccggagtccatgcgtccggggatctcacgctatggactggctgtcgggcgtaccgttaacgccggcgataactctctgttcagcgacttcacctag

SEQ ID NO: 196683 - DNA, 261 bp, Klebsiella oxytoca
atgaaacacagttcacactactcgctggccgcgctgatcccgatggccatctggggagggatgctgccagcgcaggccgctgatggcacgactccagacgatacgaagaaatctgaaacgactgcggtaaatgacgatgaaaccatggtggtcaccgcggcggcgcaaacgctgcaagcccccggagtatccaccatcaccgccgaagaaatccgtaaacatccgcccgcgcgcgatgtctccgagctgattcgtacctag

SEQ ID NO: 196684 - DNA, 507 bp, Klebsiella oxytoca
atgaacaaaatgaacaaactatcagagtcacttattgaacaaaaaattctatcttggctgtcgataaccccctcagaacaaaaactggctgatatattacctattcaacaagataaaagtctggatgaaacgatgaaagaacgattaatcgcttcaaggcttggacaaggtgaattcaggaaaaaatgccttaaactgttccctgcctgtcctataactggtatttcttttcaacctctgttaagggctagccatattaagccttgggccgcgtgccagaatggtcatgagcgactggatccttataatggaataatattggcagctcatattgatgctctttttgaccaaggatggctgtcatttagtaataatgggcacatcttaattagcactgaacttgattttgaagtaaaaacacaattaaacttacctgaaaatatcccaccattctcggcacagcatcatcactatctaaaatggcatcgagaaaatattttaagatga

SEQ ID NO: 196685 - DNA, 168 bp, Klebsiella oxytoca
atgaatacatctgaaagtggattattagaagttgcttggtatctggctaagtatggaaaaaaaagcctcctgaagttctgggtgttgacacatggaaagcagcaatatcactattttatccaatatttggtgcaggcaagacgagaattgaattttataacagtctaa

SEQ ID NO: 196686 - DNA, 762 bp, Klebsiella oxytoca
atggatgaactcttagatgctgttgccgagctagtttgtctggtttctcctgaaaagatacaagcgatcgctggccgaattcgacggactgaagcctgcaaggctctgctggtactgccaggtgcagtaggaactcccaaggcaagtaacgctattgagagactagcaattgcatggcgaaacaccatggtcagttcagatgaactagcatctatgcttcttgctgcaagccatgtttactttaaagttagctctgagcaaagtactgaacttgtatggactggtccaacaacaccttttgtatctgttcgtcgtacagaacaagtgctgctacaaataatcaatgcggcaaaaaagtctttatttattaccagctttgttgcctatgatgtgtcgagtattgtgaatgcattgaatatagctataaagcgtggggttaccattacaatgttgctggaatcctcacaagaacatggtggtagtatcaatattgatataatcggtaagatgctggcgcttatacctggcgcacatatttacgcctggaataataaaaataatgaattttcagaaggtcgtgtacatgcgaaagtgattgttgcagatggtcgcacttgttttattacaagcgcaaacctaactgggtatgctatggagagaaacattgaagcaggagtacttattactggcggagggattccagaagcactcagtgagcatctgcactctcttataaatacaaatatcattagtctgatttga

SEQ ID NO: 196687 - DNA, 1860 bp, Klebsiella oxytoca
atgatcatcaataacaaaactccagtcggcgaagtacgccctagccagttgctatggacttatgggcctggcgcgctaatcgatctaccaagcctatcagtagtgacactaggtattgaccggtgggaacgagagcgctgccagccaattcaagaggcccggcttcttgctgctgtgcggaaggtattaggcccacaagtcgaaaatttgcgtatgccaccctttcaaaaaagcgagctcgttgacccttggtcagccgaggccaacataggtgtacctgttcggccttttccccgctggatgcgctgtgtaaagtgtggattgctatcgccctttgatgatggtctgcttgagatcaaagaggatcggttcagagccgagcgaactcgctttgttcacaaaggctgtacaggttctaaagggaatttaccagctaaggatgctgatgccgttcctgcacgttttctgctagcctgtcgtgacggtcacttagatgactttccctggcactactttgtccatggtggtaatagtacatgcaaagggacactgcgcttctttgagagtggtgcatccttacaaaccgaaaacctgtgggtacggtgtgatagctgtgaggcatcacgaagtatggcccatgccttcggtaaagcgggtaaagaaaatcttccagcttgtcgaggccgtcacccacatttggatcaattcgacattgactgcggtgaagaaccacgggcagtactgctcggagccacaaatagctggtttccgatcacactttctgcattggccataccccaatcaaagaatcctctcagtcagttgattcaagacggatggccgttctttgaagcaattacagctgaagtcatggttcccgtcgttgtgcagacactcaagctaactggcggtctccctggaatcgacaaatatagcgtgtcagacatctggtcagccatcgaaatgcatcgttctggtggcgatagcgaatttgtcggtgaagccgatatcaaaggtccagaatgggaagtgctgacagaggccaaccctcccacggattatccacacttcatgagtaagaagatcggaaccccagcacaattcataccgtacatcagtcgtgtattactacttgaacgactacgagaggttaatgctctgcttggctttactcgagtagaggcaccagaaggatccggagagataaatgaacgtcctcagatggctagcttggcacgcaataaacctgaatgggtgccagctaaccaggtgcatggggaaggtatcttcatccaattcgatgaaaaagctcttgtagcttgggaatcaatggatgccgtcaagcaagtagacaagatgcttcgtggtgggcataccggttggcgtaactctcgtaatctcgatccgaatgaagattacccaggtatccgatatgccatgctgcataccctatctcatttgttgatccgtgaactagccctggaatgtggatacaacgcagcaagtattcgcgaacgtatctatgctgatacatcaaacggcagtccacaggctggtatcttgatctacacagcagcagctgattctgatggcacactgggtggtcttgtagaccttggtaaaccagagaatcttggtcgcctgctggtacaagcattaaatcgttctaagatctgttcttctgacccactatgttctgaacataacccggagaaagatcggtcattacatgccgcagcctgccatgcatgtactctggtagcagaaacctcctgtgagcaaggcaatcgctatttggatcgatcgctattagtaccaacacttgagcgtattcacgctgcattttttaagggtttttaa

SEQ ID NO: 196688 - DNA, 3975 bp, Klebsiella oxytoca
atgataaataatcaaccaactagatcacctaatgcatggttcgctattgaccgtggccaaattaaagattccacgttagccctctatacgctgcaattaaaaggtgaacgttcgctgagtcaagctttctctaaagacgattgggtcgtgattctaaatacctcaggccatatcacgcgaatcggacgcattctgcgtattcgttccaatcttgaaaatactacgctgtttttagatcgcatgttgcacgtcaagccatctatttcggttggtatgacctcactcacactaccagcaaaaggaagttctggtcgtattcaatggaaagaattcattgaaatgctcccaaatgcactgaatacgaatattgctgaaataccaaagatcgaggatcaaacctacatccgcgaactgctgcaactggcggtgatggacgatttgcttggccctgctggtggccctaatgagctcatcgtcgatatgggtgtacgcgaccgctacctagttggcaagctagccccacgtgaagcagccgaaagagggcaggagtttcctgttgatgctgaagatattgaagatgaagagccagacctgatcgtcaaagcgaagactgcaaaggtgaactctccctcagtccttggcagcggcgaaaccgatacggcagaagagattgatgccgccagcaatcagtcattggtgcccagtagcctcggcatgactttctgcgtggatggcgacgtcgatcgggtcgagatcgaagcgcgttggggacggtatgagcgtgtgccaaatgatgaacatcaattctttaagtccaatgggcaaaaagctaaggtttggaaacgcattccttgtggcggcaagatcgtactgcccctgatcgagggctcaatttcacacaatgctccggatagtgcctccccggaagttagagtgcagggctctattcgagccaaaaatgacaatggggatcgactgattacactcttcctcgttaatgcgcaggaagaaccggatacaaaccgtgatacagcatgggtgtttcaaccagagctgatcgttcgagcagtgaaagatgctgccaagcctgccatctttaggcgcaggcctgtactagatgcagatggtatggatcctgagcgcgaagctcttgagatgatctaccgcgatcgtgtcgagttcgccgtgggtcatggagttgcagttcatgcagaaatagcggatgacgtcacactagccaccgaagtgcgtaccacagtgatgccacagtacgaggttcaggcaactgagactcctgggcttgagctatccgatcgtccagctatgcgagaaatggtcagcagtggtctgcttgatatgcaacgactagccactttggacattgacccattagttgatgccttgagtgtgttaactaaagactacgctacctggattgatgaacagcgcttgagtgtgagcagcaaggccaagggcttcgatacccaagcccaagcggccatagatcgttgtcaggagatccatacccgcctgcaagaaggtatcaatacacttaagtctaatgagaatgctctggcggccttccgtttcgccaaccaggcgatggccacgcaacgcatacgcagcttgtatgcacttgccatgcgccgaggcgaggacgttaccctagataagttcgatattcttaagaaccgcagctggcgtccattccagttagcttttctgttgctgtcgattccatcccttgcagatccgtgccacccagaccgagtcaaacctattgaggcttatgcggacctgctgtggtttcctaccgggggtggtaagactgaagcctatctgggtgtagccgccttcaccatggccattcgacgtatgcagggaaatttgggcggttacgatagctcgcgtggtttgactgtaatcatgcgctacaccctccgtttactgacactgcaacagttccagcgtgctacagcacttatttgtgcaatggaagtgctgcggcgagaggcactaaataagggtgataaattcctcggaacggagccattcactattggcctatgggtcggtaacaaagtgactccgggaacgactgaagatagccataatgctatcgaaaaaacacgtaatccgggtagttataatgcaggaacagcctcgcccgtccaactgaccagttgtccatggtgtggtaccgaaatcgctcctggacaggatgtcgaagttaaaaaggataaagctggcggccgaacgtttgtctattgtggtgataaaaaaggacgctgcgaattttccaagggaaagtccagcaagcagctacaccctggaataccagtactggtagtagatgaagaaatctaccatcgccctccgaccatgatgattgccacagtggataagttcgccatgatggcatggcgtggccaagtgcggactctttttggccgagttgaaaaagaatgtgagcggcacggtttactctggcctggggccaattgcaccggaaaccaccaagcattcaaaggacagccttccgctaaagtgaaggccatcccccctatcagaccgcctgatttaatcatccaggatgagttccacctgataagtgggccactgggtaccatggtaggcttgtatgaaactgccgtcgatgagctgtgtagctggacgctcaacggaaaaacggtcaaaccgaaaatcatcgcctcaacggcaacagtgcgcaaagccaaagagcaagtaaataatgtatttatgcgccaagtttcggtattcccgccacatggactagatgtggaagacaacttcttctcagttcaacgccacataaaggataaatttgggcgacgttatctgggagtctgctcacccggtagctcgcgcccagcaatgcttattcgtgtctataccgctttcttaactgcggcacaggaactatttgaccacttcggtgaacctgctgatccttatatgactatggtcggctacttcaactctctgcgtgaactaggtggaatgaagcgattggcagaagatgatgtgcagacacgttcctatcgcgtgcaaatgagcatggtggaacggcctgcattggcacaacgtagtgtcaacaacatccgcgaattgacttctcgtgtatccagccaggatatcccaaagtacctcgacaatcttgaggtcaagtttaaggccgagtttgataactctgcaggtaaatacgtaacgaaatggcaggagggtgatactcgcgctattgatgtagtgctggcgaccaatatgctgtcagtgggagtcgatgtgaatagactcggcctgatggcagtgaatggacaacctaagggaacggccgagtatattcaggctaccagtcgtgttggacgttcattccccggcctagtttgcaccgtacttacgtgggcccgaccgcgtgacctctctcattacgaaacattcgaacattaccacgccaccttctacaagcatgttgaggcacaatcggtaacgccattctctccacgtgcgatggatcgtggtttgacagggtcgttgctaagtcttatgcgtctgaagaataacgagttcagcccaaatgaaggtgcaggtaaattggatatgtcaaaccagagtgaactcgctcatgcaattgaagttttagcgactcgtgcaggcaatgtcgcggaagacaatgcacgtaagctgttagctgaaaatgaactgaaagagcgtgcagacgaatgggccaaagaagccagtaaaggcggccgaattctgggatatgaaaagagaggtcccgataaagacaagactgtggcgttgatcaaatcaccagggcttcaagcttgggacaactggactgtacctatgtcaatgcgagaagttgagtctggtgtacgtctgattatggacacaaaatttatcaaggacgatcacgattggaaacctcgtcctgcaacgaaagacgaggattga

SEQ ID NO: 196689 - DNA, 4089 bp, Klebsiella oxytoca
atgagtatggccagcatacacgatgattggctctcgctaatcgacatttcaggccccttccttgccgtaccagtactaaaagatgcattcccgcaagggctggaagagctagacgctgctaagcgtaaacgactgcgccaagcttacgatgagtggcgagaagcactggaacaagaagatcctcagttcaacaaattgcatttcgcgtggattgaagaagttctttcacgtggccttgagtttgatgaggacgggaaaggcgatgtactgaagggcacagattggtgcgccgccaacttgaagacttttctccctgatcatggcgtagctctgtcaccaactctagcaattgtcgacgagcaatgtgcgaacaagcctttgatgctcattcatacctatgcgcaagatatcgatcttgacgcaactttgaaaatagacggatgggccactacacccacggaacgtatggttcagctgtgccgctccagggagtgtcgccttggtttggtgaccaatggcgaacgctggatgctggtggatgcccctgtaggcgctgtcaccagcttcgccagctggtatgcacgaatctggaaccaggagcccataacactgcaggccttcgtgcacctgctcggtatccgccgtttcttcgtcgatgaatccgaacaactacccgcattgttcgacagttctctgaaatatcaggatgaagtaaccgatgcactgggagaacaagtacgtcgcgctgtagaagtattaatccagtcccttgataaagctgatcaggatcgcaaccgtgaactactttacaacgtaaaagaatccgaactctatgaagcggctctgacagtgatgatgcgcttagtgtttctgctctcggcagaggagcgcggcctgcttcttttgggcgatgagcgatacgaagccaactatgcgctttccaccttacgcatgcagttacgcaaggtacccgaagaaatcctagaacgacgctgggacgcttggtcgcgcctgctggcgatcttccgtgctgttttctgcggggtggaacatgagagtcttcgtctgcctgcactgggtagctcactgttcgatcctgatcattttccttttctggaaggacgggctaaaggttccagttggcggacagatacagccaagccactgccgattgataaccgcacagttctgttgttgctagaggctatccagcaattccagggccgcacactttcatatcgtgcactggacgccgaacaaattggttacgtatatgaaggtctactggaacgtactgtcaggcgcaccgatgaagtaacactagaactggctgctaccaagaaatcacagtacccgtgggttacactggccgagctagatgtagcgaacactgatggtgccggacaattagttaagttgttgcaagaacgctccggcagttctgccagccgggtgcgcacagacttggataaagctgccaatgacaccttatccgatcgcctcttgacaacttgtcaaggtgacatacaactacgcgaccggatcaagccttacgttcacctacttcgaaccgatccttggggctatccgctggtctatcccgccggggctttcattgtcaccaacggttctaaccgacgcgagactggcacccactacacaccaaaatcgctcaccgaaaccatcgttactgaaactctaacaccgatggtctatatcggagcagtggaaggtgctccacgtgaaacatggaaacttaaatcccccttcgaactgctcgatcttaagatctgcgaccctgctatgggctcaggtgcttttctggtacaagcctgccgttggttggcagatcgtctcgtcgaggcttggtcgctgaccgaagagtcaggaaaaacggtgagtgtggacggcgatgtactggagattcctgacgccaaagagatattgccacgcgataccgatgctcgcattgtcatcgcccgccgacttatcgccgaacgctgcctgtatggtgtcgacttgaatccactggcagttgagcttgcaaagctttctatctggctaataacgttagccaaggatcgaccatttgggtttcttgaccacaatttacgttgcggagacagtttgctaggcatccatcggatggatcaacttactcagctttcgatgagtcctgcaactcaaggacagctgcgtctgtttggtaaagatatcaagcaggccgtacacgaagccattgcgctgcgtcagcaattacgtgagacacctatccgcgatgtgcacgatgtagaatctatggcagagctgaatgccaatgcacgaagcagactttatgtgccggaatgtattgcagacgcgtttattggggaagtttttgcaacgggcggcaatgccgtagcattggaaacagctttagcatctcttgccatccaagccgagcaagctatggcaggtgataatgaacaattggtgttaatgcagcaaagggcaatctctgctttttctactgatttgcccaccggtaagctgtctcgtaaacctttccattggccattagagtttccggaagtattcacacatgaacgcggcggattcgacagtatcataggcaatccaccctttttaggtgggaagcgcatctctggggtattaggaaccgcttttcgcaactggctcgttgatcatatagctgaggggcgacgaggctcggcagatctggtcgcctatttcttcttgcgagcttggagtattttacgtaaagaaggcggttttgggctgcttgcggtcaataccatctcagaaggtgatactcgccaagtcggacttgagtctatggttagctctggggccatcattcatgcggcatacccaaatgaatcatggccaggcaaggcagcggtaatgaccagtcgtgtgcatgtccataaaggcgaatggaatggtgatcgcaaattacttggaagagctgttccctttatttcagcctttttgtctgctcgtgaagattggagcccaaagcgattgaaaaacaatgaaggtaaagcattcattggctcctacgtactcggtatgggcttcgtgcttacaccagatgaagcagagaaaatgctggatgccgatccaagaaatgccgacgtcattttcccctacattaatggtgatgatctcaattcagagcctgagcagcgaccaagtcgctgggcgatcaacttttgggattggccagaggagcgggcacgaagctacgaattaccttggcaatgtattgaaacacgagtaaaaccggaacgccagcgtcgcaatgaagatggtaaatatgttctccgcaacccccttcctgaacgttggtggcactacgctgacaaacgtcctgcattctaccacgccataggacgaggctaccatttcgaacggcacccagaagattggctgcgtgaagggccacaggaatcagcaataatagcgactacattaacctccaaacatcgtgctttctcaatgttgtcgaacaactttattttcgatcaaaccatcgtagttttttcaaatgtgagcacatacacccttctcaattcatcaattcaccttgtatgggcaagtgcaagaggcggcagtctagaaactcgacctagatatatccagacagattgtttcgaaacttttccgctacctaaatgcgttcaaaatggagacttacaattcaatatgttgaggacgcggatgaataatactcgcgccaacgcaatgcaagtgcatagagttggcctgaccaaacttttcaatcgatttcattcagaatccgaacatgcactccacttcgaagaactgcgggcgttgcaaagcgaagtagacacagctgttgcacgagcctatggctgggacgatcttgaactcaaacacgactttcacgaagtaccatacctaccggagaaggaccgagttcgcttcactatctcagaaagtgcacgtgtcgaagtactacagcggttgtcagaactgaatcgcctccgctatcaggaggaagttgctgctggcttgcatgacaagatgactaaatccaaggcattaaaaacaccaccaagataa

SEQ ID NO: 196690 - DNA, 3141 bp, Klebsiella oxytoca
atggaaatttctaatacacctgatatccgagtacaccgaactattccagaacccggtcagttggttgaggtccgtcggcgtcaatggattgttgtggaagttacttcatctcaattgttatctgcctcagctcaacagcacgcagtaactttgtcatctattgatgaagatggtttgggggaagaacttgaggttatttgggaaattgaggtaggtgcccagattattgagcgagctgggctgcccacaatcagtggccaagacgactccagcactcttaatgctttccttgacgcagtgcgctggggagctgccactaatgctaaccgaggcttcctgcaggccccatttcgcagtggcgttagtatagaagacttccaactcgatccgttggtgcgtgcaattgatatggcccgtgtcaatctcctcatagccgatgatgtcggtttaggtaagactattgaggctggattaatcattcaggaaatgctgcttcgacatcgagcccgtacagtcctgattatctgccctgcgtcgctacaggaaaagtggcggatggagatgcaggaaaagtttggactggaatttcaaatcgtcgacactcgctacatcaagcaattacgccgagaacgcgggatccatgccaacccgtggacatcgcattctcgactgatcacatccatggattgggccaaaagtggcgaaggcttgagagctatgcgcgatgtgttgcccttgtatagcagctacccacgcaagttcgatctattggtcattgacgaagcacataatatcgcaccggctgctggggcaaactacgcattagagagtcagagaacgcgcttcatccgttcaatcagtcctcacttccagcacaggttatttctgaccgctacgccacataatggctataccgaatccttcacctcactgctcgaacttctggatgaccaacgtttcgccagaaatatactcccggacgataagcagctcaatcaagtaatgattcgtcgcctcaagagcgatctcgtcgatgctgacggcaatctactttacgcccaacgtaagcttgaagccttaccgatcttatacactgccaaagaacgcgaaattcactcaaaactcaatgactactgcaagagccgagaactaggtgcagagaaaaccggtagcacattcgggactgctttcgtgaatcagctactaaaaaaacggctcttttcctcccctgcggccttcgcatcaacactcgaaaaacacatcgctagtctgacttatggaaacctgcgtagtgataatagtccgatggacgaccgcatcttgcgcaaagctattcttcgtgttgatgaagattacgctaacgaccaagaggtagagaacgcgcaatctgaggctgttgaagaagcttcatgtcgagctcagccgctcacgaccgaccagcaacaaatgctgagtgaactacgtaaatgggcacagatagccagaaaccaagtcgattccaaagctaaagccgtgctcagctggcttgataccaatctgaaaacaaacggtcattggaacgaacatcgggtaattctgttcactgaatatcgcactaccctccagtggatacatgagatcctagccagccatggatttggtggggagcgccttgcgatcctacatggtggtatagcgcaggacgaacgtgagaaagtaaaagcagccttccagaccgctcccaaagactctgccgttcgtattcttcttgctaccgatgcagcatctgaaggtatcgatctgcagaaccactgtaactgcttaatccatcttgagatcccctacaatcccaatgtcatggagcagcgcaatggtcgtattgaccgtcatggtcaacgccagaaagaggtattgatctggcatcctgtcgatggcgatgaaaatagccaagctagcattggaggccatagtggagacatcatccgagctctacgtaagctcgaatctatgcgatcagacatgggtagtgtcaatccggttatcgcaccacagatgtcgaagctgattgaaggatctatcagggattttgatactcgtattgcagaagctcggattgccaaaactaaacgattcgtaaacgccgatcgtgaactgaaagagcggatagcccggttacatgaccggctactatccactcaaaacgatttccatctaacgtcagaacatatcctcatggctgtaaatacgggactttctttggcaggccgaccacatttggagccgtttgctcttccggatgctccagctggttcaacattcaaaatgccagcattgtcaggatcctgggctcgttgcctggaggggctacgccatccctatactctgcaaactcgccctatcacctttgaccataccgtggcgagaggacgtgacgatgtcgtactcgttcatttgaatcatcgactggtacagatgtgcctacgtctgttacgagcagaagtatgggctcgcgatgacgtgaagaagttgcatcgtgttactgtacgttcggtgcccgacacactaattgatggccttgccgtagtagttagttcaaggctggttatcaccggaggcaattaccatcgcctccacgaagagttgacaacagctggaggttatcttggggataaatccttccgccgtgaagaaggggtcaataaagttcagctatggctagataatagtaaaccaatgacagcttctgactcactatttgatgatatccgtattcgttttgagcgtgcacaacacgctattttacagtcagtgaacgctaggtcaaaagaccggctcaaagatttgagtaatactcttcagctcagtaagaatcgagaattgacggacattagcacagtgcttgatgaacttgaaaaaaccatctgtatcgaattaaaaaaagatcaacaacctgagcaattttcactgttctcagaggatgaacgaacccagctcaaacgtgacaccgcagctctgaaagctcgccttttacgtattcctgaagagcgtgaacaggagatccaagccatcgaaactcgctacgctaaactcgacgatcgtacttttcccgttgctgttaccttcctcgtacctgagtctactgttcagaggggggaagcatga

SEQ ID NO: 196691 - DNA, 957 bp, Klebsiella oxytoca
atggatccggcctgcaaatttccttatgaatcaaacaacaatgccaaatttatagaacgggatataagcaaagtaacaacaaccgaattagatgcattgtttggcgatgctgacatcaaaattctcgctggctgcgcgccttgccaaccattttctacctatacacaacgttatgaatcggatggtaaggatggtaaatgggggctcctgtatgagtttgcacgcctagcagaaggtactcgcccagacgtgatcacgatggaaaatgttcctactgtggctaaacaccaagtgttccacgacttcgtcgaggcattgaagtgtattggctacagcgtatggtttagcattgttgattgcactcatttcggtgtcccacaaacacgtaagagaatggttttattggcatcactccatggcgagataaaaatgtcttctccaacatgtacaaaacccaaaacagtaagagaagctataggccatctgcgcgcattaaatgctggtgaagccgctccaggagataagctgcatgttacctccacattgtcagataagaatctggagcgtattaaggcctcaaaaccaggaggaacttggcgtgactggccagaacatcttgttgccgattgtcatcgaacagaaagtggcagaacttacgctagtgtttatggccgtatggaatgggacaaaccagcaccaaccatgacaacacagtgctatggtttcggaaatggtcgatttgggcatcctgaacagaaccgcgcaatctccctgagagaagcggcaattcttcagagttttccccgtaactatgcatttattccccatgatgggccagtaagtttaaggattctagggcgcctaatcgggaatgcagttcctgttgaacttggccgagcaattgcacgtagcattaattcacatcttgcaaatgtgaatatggtcactgtggaatga

SEQ ID NO: 196692 - DNA, 2022 bp, Klebsiella oxytoca
atgcaatatgaatcaaaattaatgtcactggctcaactcattgatgaaaaacgacttttcaatattcctatctatcaacgcctctatgtatggggtagtgaccagatcaaagtattacttgatgatctagtctccgcctgtaatgccgacaaggatgtattttacttgggtagtacgctggtgattgagcaaggaaggacagaatctgggcaccccttgttggatctgattgatggccagcaacgttttaccaccttgtggttgcttagcgtagtaatcgagcgactgctctcatcatcgaaaaacagtgagcgaagccaaaatcccctttcctgttttctctatgcccagttgggaaatagtcgtgagccgcggattcggtttgccattcgccctgaggtaagccgtttttttgcagccttacttgatggccgagctgcatctgatgagcaaaaggccgctgcgttgagttatgcgatgcaggtcatggagggttacttcacccatagaacggatgacacccaccggattgatcttgtcaaattgggtacgttcatccgtgatcgggttcaactggtattgaccctggtaccggccaacacggaccttaacaagttgtttgaggtcatcaacaatcgcggtgtgcagctgcagcaccatgaaattttgaaagctcgcttgctggcgttactgccagatagcgctgagcgcgaagcctatggccagatgtgggatgcctgctcatttatgggggcctatgtcgaaaagaacctacgtaccgttaaaggaataaagctgatcccgctttataatgtcgaggatgctaaacgagaccgggagatgctctctgatcccttggttatacgtgacgtactgctggaattaggtacacaacaagacctcagacaccactcattagacgatatcctcaatgatgagacactcctggcggagccatctaacaatgcttctgaaaataacgaggcctatgaagccgatgatgtacgcagtattatcggcttttccatgctcttacagcatgttttacgcctttttctgttacatcagcaacgcgatgatatcagcaaaatcctagacaaagagctgttacagaccttccagactcattggctggcggggttagcccagtgtgagaaatcagaacaagccaatcagatacgtcgctttatcgagttgttgtggcgttgccgctatctgtttgacaaacatatcatcaaatggattagcgatgatgctaatgaagaaagtcatggtattcgtcgcctccgagtgaatgaaaatcggaacggttaccaaagccttattcgcgctagccgtgatgccgatagcgggtttgctatgttacaaagcatgctctatcactcacagcaattgaccacccattactggctaactcccctgcttagttacctactaaaccatggcggtgaaggtgcccaccgatacctgcaatatctggacaatcacttgctttgcagtggcagtgaacagccactgatcgaacgaacccgtgcgtttgtgttaaatccatggtgcgatagctatccgatccgcgatatgcaggcagtgctgagagctgatgagggaaccggattttctcactactggttttacaagctggaatatattctttgggagcattaccgctttcaaaaagggagtgcctggcaggcattccgaatgacggccagaaattctgtggagcatgtttccccacagcagcctgagcattttgattccaaccgagtgagctctgaaatactggactgttttggtaatttagggctagtttcacgcagtatcaactcagagtacggcaacaaaccctatgttgaaaaacgggctcgtttcattgagcgtaaccagagcagggtggactcactcaagttggcacttatttatgaaaatgagcagtggaatgatgtgctagcattggctcatcagcaacaaatgcttgaggaatataacgcatatttttctgaggtggagctcgggaaatag

SEQ ID NO: 196693 - DNA, 1461 bp, Klebsiella oxytoca
atgacgattaagcagcccgtcgaggtctgcatgatggattttgccactttgtgcgacaatggagcaactttacagctcgaccactaccaacgaccctatgtttgggatagacacaaggtcaatcagttgctagaggatttggacgagttcaggcacagcggcaatgggcagaaagtctattatctaggtaccctattgctgcatcggaatgacgaaaaaaaagcccgctatgtgatcgatggccaacagcgcctcagtaccctagcagtgctgtatcatactttgcacaatgaattacccaaagggttagaatttcattaccgctctcccatctcagctcgtaatttgcgagtagcacgcaagctaatgagcgaacatcgtgaatcagctctagagccatccatcgttgagcaattgtgttttacggtgatcacagttgagcgcgaagatctcgcttttaccttttttgatactcagaattttcgcggagtaccacttaaagcgactgatttgctcaaagcttatcatctgcgggctgtgaacgggcccaacgtacggcatgtagagtcattgcagcaaatctgtgctcgacgttgggagcatgttcaaatggcaggccctaggcggcaggattgtgaacagcaagattttgcacccgagctgtttcagtactatttgtggcgtgcccgcaattggcggggtaataagaaaatggagcgtgaagatcacgatagtctgctggaagcctttcaacaacagagtgttggtggtggtgagattgatgagatcccgctctacccgggttatcacaatcaatttgccaattcccttaaattgcaaagtagcgatgactatcgcttggcattgaaccctttacaaattagtggaagtgcggcgaatttaccatttaccttgcgccagcccattcataagggcatctgttttttcctttacgctcaaaaatatgcctctttacttgatgcacttttataccaagagaatacctgccacgaattagaggcattccgagagttttatcggcgtgtggtacgtgctaatgcctattacttgcaggagctctttaacttggcccttctgatgtatgtcgaccgttttggttatcaacatctattagcctttgcagtgggtttggaactggtgttggggggattacggttggagaaaagttatatctttaaagaatcaccactcaagtacttacgtgacgctccttacaatctgcttgatgagatatgtggagcctatcgcccacaagaggtgatggcattcttgcgttctgaaatcgaacgtagtaagggatacgggaatgctgtctccatcgtcctctctaagggcgttcaggggcgttaccttaatgcgttgctggattatttcaatcttgatggtatccctgagggtgacagttgggtacttaaaggttggctagggatggaaaagtag

SEQ ID NO: 196694 - DNA, 690 bp, Klebsiella oxytoca
atgcctgctgttcctcgacaggtggaggaaattactgtgtttatattcgataatactaaccctatgaagctcgacccaagccaagcacctttcaacgtggcttatctacaaagaatcgctgaagtgctctgccacgcactgaaggagcatccacaaaccacagttatcagggtggatttgcacttaccggaagacggggatgtgggagacagtattaccagcgatgccgatttgagcccaggactgatgtcccgctttatcgactcactgaaagctcagatagtcgcttatcggcagagaagagccaaagaagggaaacgtagccatcgtacttcagtacgttacgtctgggtgctggagcaaccggaactgggcggcaagaagcattatcaccttgctctcctcgtcaacaccgacacgttcaatgctttgggaagctacgatgaactggggaaaggtctggcatccctgattcaaaacgcctggctgagcgcaatgaagaagcgagattggcctgagtatctgacattagtccacttcccggataatcctctggcttttctgcagttcaataaaccggatttcagaaagaaagtggatgcactgacttttcgtctgagctacatggcaaagcatcgaaccaaacgctacagcagtaccgaacgctcattcggctgtagccagggctga

SEQ ID NO: 196695 - DNA, 594 bp, Klebsiella oxytoca
atgaaagactacaagccacgctacgaggagctgtataaatattatcaaacctggctgacagattttacgaagctggcgatcagatcaggtatgtgtcaccagaatatatgtcaccatcataccctgacggttggtagccttaagtttccaggagaagaaaaggttattgccatcgtcccacaatgcctgcaccggattatttatggcagaaccgcagcatcgatgaccgtcaatgatgacctgaacgtcagtttattaactcaagagcatctgctggctcaccatcccatgctggaggggattttgttgtctgagtgtgtacgtttaaaacagcgtcctctggcaaataaactcatcagtttgtttcggcagttcagtggctctgagttacgtctgaagatggtctggttgtgctggtactatttgatgctgggaaatagtcttgatgactggaccgacaatctgaagcgcaactcctatgaggagctttgcaactggatcatcgggcggcaggaggagaatctgatgataactagcgtaattgatgaatacgttactttcgcgtatcgcacagttgtcgatccactgatttaa

SEQ ID NO: 196696 - DNA, 207 bp, Klebsiella oxytoca
atgaatacctctaccttgcttaccgaagatcaactcgttgacatggtatttatcacaacgcttcttcagatgacagacaagtgggtttataagctcatcaaagatggttcctttcccaaacctatcaaactagggcgaagctcccgatggctgaaaagtggagtggaagcctggctccaggaacgtgtcgaccagtcccgtaaatag

SEQ ID NO: 196697 - DNA, 885 bp, Klebsiella oxytoca
atggttaagctagtgggaaatgagaatagtaagatacggaatcttgaaaacaagcttattgcgaatggttatcgttttcaatccggtggaatagataaagactaccgggcctatcaggtgagggttttcaattatcttctttcattaaatattccagagcaaaaaattagtgatttccttgctgaagtagataatagctatacaagcggctttccatccgaaaatgaactggattggtatcgtaatgatccacgagcaagtttgtggttggtctgtgtattatatgaaaaattaaaatcagaaactcctgaatacaatagcggttttttatcccctgtgtcattacaacccagtcatgatgtaagaattgatgcaatacgtcgctgcatggatgaatggcctatactttatataacacagtctgactttatgaaggatcaaagtattgagtgggctggattgcttgatcaacatgatttatttaggggtgttagatccagtaaagttgatgtctgttcctggttaagggactacttaaaggggaatacatcaattggactgaaacgtatttgtggtaattctcccgaggaaataatgtcgtggtgctatgccagttactttatgtggagaaaaaacagcctgcactctccggattctgtcgagttgttcattaggaagtttaagagcgcctggtctacacagaaaaacaggaataaaaataaagaagagaaaaagcttgtgacaatgagtgtaaatatctctcagcaagctcatgatatgctgagggatatgtctatgaaagatacgatgtcaaataacgcaattatagagagtgccattctcaggttatatgatagtaaaaataataaaaagcattccaaataa

SEQ ID NO: 196698 - DNA, 876 bp, Klebsiella oxytoca
atgcaaaagttggacggccttaaggcctttgagcaacctctggcttcactgccacacccgtttcgcaaccttatccttgaacgtcttcgaagtctcactcaatacgagccggtaatcggcatcatgggtaaaaccggagcgggtaagtcgtcgctctgtaacgcactgttccagggagaggtaacacctgtgagcaatgttgaagcctgtacccgcgacgtgctgagcttccggatcagtagtagctctcacagcctgttattggtcgacttacccggagtgggggaaagtaaggaacgtgacgaggagtacaccacgttataccgtcggatcttgcccgaactggatttggtgttatgggtaatcaaagccgatgaccgggcactgtcagtggatgaacacttctatcgcaaggtgatgctggcgtatcagcatcgagtgctgttcgtggttaatcaggctgacaaggctgaaccgtgccatcagtggaatgccgccagcaatacaccgtctcatagccaacagtcgacaattgaggctaagcggagcgcggtgcaacagctcttcctgccgcaccatccagtctgtgttgtatcggcccgaacgggttgggggctggatgagatggttgagaagatgatgcgcagcctgcctgaccgggcgaccagcccactgacaacacaactgcatggcaggctctgcatcgagccggtaaaaaagcaggcacgtgaacgctttggtcatgccgtggatgaaatgattggcaatgtggagtcatcatcttttctgccagcgcctgtaagggctgtgattcgaaccgtgcgggaagccgtggtgtccgttgcccgtgctgtctgggactggattttcttctga

SEQ ID NO: 196699 - DNA, 231 bp, Klebsiella oxytoca
atgactgaactcaacgaattgcctgatgggccgtttacacgccagcaggcagaggcagttgcgtctcaatatttcaacgttgcgatagaggatgaccagggggcgcatttccgtctggttatccgtcatgggcattgcatggtctggcgggcctggaactttgagccggatgccggttactggctgaaccggtatatcactcgttatggcatccgcaaattcccttcataa

SEQ ID NO: 196700 - DNA, 366 bp, Klebsiella oxytoca
atgaataatcactcagaatccggtaccacgccggagaatcctacctgccagcagtggggactaaagagcacgatcacaccctgttttggcgctcgtctggtgcaggaagactgccggatacattttctcgctgaccgggccggattcaacggtgctttcagtgacaacgatacattgcgcctcgaccaagcctttccgttgatgctcaaacaactggagttgatgctgactagcggcgagctcaatccccgctatcagcactgcgtcacgctttaccacaacggactcacctgcgaagccgacacactcggttcctgtggctatgtctacattgctatctatcctgagcagactgagccgcagtaa

SEQ ID NO: 196701 - DNA, 390 bp, Klebsiella oxytoca
atgcaaaaaatatcatcacacccgatacgggcgaatcagccctgcctgtcacccattgaaatctggcagcgattgcttactcatctgttatcgcagcattatggcctgacgctgaatgacacaccgttcagtaatgactccaccatccaggagcatattgatgccggagtatcgctcagcgatgcggtgaactttcttgtcgaaaaatatgaactggaaagaattgaccgcgatggttgcactgtcatggaaaagtcaccgtttattaccagtatcgatattctacgtgcccgtaaggcctcaggcctaatgaaacgcagcagtcacaaaactgttacccgggtaacggcaggccatcatcagcagctaaaaatcactaagggtacttaa

SEQ ID NO: 196702 - DNA, 264 bp, Klebsiella oxytoca
atgccggccaccctggagaccataaagtcggaagagaagcagacctatcactcccctctgaagacgaactaccgtgagcacatccacagccctgagggagtaaacggtctggttgagcactccatgctgatggatatgctgaacaagatagatgccgacgggcataatgttgccggcgcagcggcggagttaacgactatgttctgctacatagctggcgtcagcaagtgctgcgagaaatcgagacgcacgcacagtatttga

SEQ ID NO: 196703 - DNA, 342 bp, Klebsiella oxytoca
atgtcgaaaatagttgctctgaacgcagatgaagaacaaggcaaaaagccttctattcgccagcgccggctgctaactagagctggcttgcataaagctaagcgaatgactcatctcgacgccttggctgaaaagctgggttatcagcttgtgcgcggaacatacgttgcttttcgccatacagttaccgttgagagcgtaaggaagcttcctcctgccgaggtaaactttgtgccgcgcgtgaaaaaaatgacatttaccgaagcatgtaacatttcccgggatctgtctgattcgcgtgaagagcgcctgatgagtgccagttttgatgggccagaataa

SEQ ID NO: 196704 - DNA, 516 bp, Klebsiella oxytoca
atgggccagaataaattttcaggcggagtatattctgagtcaaagtttaaaaccgaagaaatattaaaaggttttaaggactcgtttatatatcattggcgattcggacatcatgctgacttcgggaaagacactcttttccacaaaccaccttgtgtttaccctattcacttaagaaaagttcatgtgaatattgggctatataccaatgctcatggatttagcggtacagaggaatgctgggataactggtcaacaggtcgttatggccctggtggttatgaaaaacagattcctacatctgacgcctatctcatttatgctgtttgtgaaaaaagaaatgttggggttttagatttttggtttccaccagctcacaaggaagcggaattcgattcatcagttcagttcgttgttgagttggcagataaattttatgagtctatctcttcgaaacccatgagtagggatcagaatccttggcatcccgattatttagttaagaagcccgcatag

SEQ ID NO: 196705 - DNA, 501 bp, Klebsiella oxytoca
atgaacatggatagcactctcgtaggggcaatgataggtgcagtaatagcaataatttcagtttatattaccgcgaggcaaacactcaaaaatagctcaaagcttgaagaacaaaaaataataagacaaaagagagaagaggcatatctggcctgcgagcgatgcagaaattcaattgcatctcaagagttaactattttgaagtttgtagccaatgctaaacatgtacctggtaataagtttgaacctaacaacgtacaccctcataaccagcttaggatgttgatttttctgtacatccctgagctcaagcaagatatggaagagcttgataaacttgctttatcctttcaaagatactattcattctacgtacaagctgagatcttcctcaaatatacacctgaagagaaaaataaattcatagataatgcttcttcaattgcaaaaaaaatgtatgaaacaattgaagtaattaagcaaaaattaatcgtaaaatag

SEQ ID NO: 196706 - DNA, 180 bp, Klebsiella oxytoca
atgggtaataattcacttttgtttatgaaactattcgaggaaagtatagcgaagtcagttaagtgttgtatgaaagctgtggccggcgtggataatatcagcggcctaaaccataaggtgcagaacagagataagcttacgcggatacaacctctgcagagggtaaaattcgtaaattaa

SEQ ID NO: 196707 - DNA, 357 bp, Klebsiella oxytoca
atgaaaattaataatctcagtatgattgtttctatgataacaggaataatcactactattataacaatatatagcattaacaaaccggcatcacaccttacagcatacgttactgataatatattttatactccacctcaatataacgaaattatgagccttactcttgatgaagcggattataataatatttatgatcgcattgatagtgttgcacaaaatgccagatttgaagaaaaatcaaaatttgttaaggaaattattaattctattttaactccatttaaacctccatttcaaaatggtttagggaaggtgcgaataagcaggtcatttcttcccaagctgactcgctga

SEQ ID NO: 196708 - DNA, 1416 bp, Klebsiella oxytoca
atgttacttcctgtgattatggcgggtggcaccggtagccgcctgtggccgatgtcccgtgaactctatccaaaacagtttctccgactgtacgggcagaactccatgttgcaggaaaccatctcgcgcctctccggtctggatacccatgagcctatggttatctgcaatgaagagcaccgcttcctggtggctgaacagctgagacagctcggtaaactgtcgaaaaatatcatccttgagccggtgggccgcaacacggcaccggccatcgccctcgcggcgctgcaggccacgcagaatggcgatgacccgctgatgcttgtcctggcagcggaccacatcatcaataatcagcaggtcttccacgacgccattcgcgtcgcggagcagtatgcgcaggctgaccatctggtcaccttcggtatcgttccgaacacccccgaaaccggctacggctatatccagcgcggcaatgcgctgggggaaggggagcacacgccttatcaggtcacccgctttgtcgagaagccggacctggagcgtgcgcaggcctatctggcctccggagaatattactggaacagcggcatgttcatgttccgggcgaaaaagtatctctccgaactggcaaaattccgcccggatattctcgaagtctgcacggctgcggtccgcgccgccgacagcggcagcgactttatcagcatcccccatgaggtgttcagcacctgtcccgacgaatccgttgactatgcggtgatggaaaagaccgccgatgcggtggtggtggggctggacgcagactggagcgacgtcggctcatggtcagccctgtgggacgtcagcccgaaagatgagctgggcaacgtgctgaccggcgatgcctgggtgcacaacagccagaactgctacatcaacagcgacgaaaagctggtggcggctatcggcgttgaggacctggtgatcgtcagcaccaaggatgcggtgctggtgatgaataaaaaccgcgcccaggacgtgaaaaaggtcgtggagtacctgaaggctaaccagcgccgcgaatacaaacgacaccgcgaaatctaccgtccgtggggccgcagcgatgtggtggtccagacgccgcggttcaacgttaaccgtatcaccgtcaagccgggcggggcgttctccatgcagatgcaccaccaccgcgccgagcactgggtgatcctcgccgggacggggcagataacggtcaacggcaagcagttcctgctgactgaaaatcagtcgacctttattcccattggtgccgagcactgcctcgagaacccgggacgtatcccgctggaagtgctggagatccagtccggctcctatctgggcgaagacgacattatccgtattaaagaccagtatggtcgttgctaa

SEQ ID NO: 196709 - DNA, 786 bp, Klebsiella oxytoca
atgttttcagcgatctatcgctatcgtggttttatcattgacagcgttaaacgagacttccagtctcgttatcaaacgagttttttaggcgcggcgtggcttattttacagccgatcgccatgatttccgtctatacattaattttttcagagttaatgcgtgcgcgcctggctggcatggatggtccttttgcctacagtatctacctctgttccggggtgttaacctgggggttgtttacggagacgctcagcaatctggtcaacgtttttctgaccaatgccaatatcctcaagaaactgagctttccgcggatctgtttaccgatcatcgtcaccgcctcggcattcattaactttctgatcatttttggtctgtttgtactgtttctgatcgtcacgggcaatttcccgggaatgattttctttgaaatcattccggtactgatcgtccagatgctatttactcttggcctgggtattatcctcggggtgctgaacgtttttgtccgcgacgtcgggcagttcgtcaatatcctgctgcagttttggttctggtttacgcctattgtttacgtgtccaaaacgttgccggagtgggtatcaggtctgctggcgtataacccgatggcgaccattatcggttcataccagaacgtgatgctctatcatcagagccctaactggctggcgttgcttccggtcacggtggtgtccgtcattctgtttttatttgcctggcgtttatttaaaaaacatgccgctgatattgtggacgagatttaa

SEQ ID NO: 196710 - DNA, 1296 bp, Klebsiella oxytoca
atgagtatcaaagttcagcacgtcggcaaggcgtataaatattatccatccaaatggaaccgggtcattgagaaactactgccgggtgataagccgcggcacagcaagaaatgggtattgaaagatatcaatttcagcattgaacccggtgaagcagtcggcattgttggagtgaacggcgcaggtaaaagtacgttgctgaagctgctgaccggcaccactcagcccaccaaaggcagcattgaaattcaggggcgtgtcgccgcgctgctggaactgggaatgggattccatcccgactttaccggccggcagaacgtatatatgtccgggctgatgatgggcctcggtcgggaagagatcgagcgcttaatgccggagatcgaagccttcgccgatatcggcgactacattgaagaacccgtgcgcatctattccagcggcatgcaaatgcgcctggcgttcgctgtcgccacggcctcccggccggatattctgatcgtcgatgaagcgctctccgtgggtgactctcgttttcaggcgaaatgctatgctcgcatcgcggacttcaaaaagcagggtaccacgctgctgctggtttcccacagcgccggggatatcgtcaagcactgtgaccgcgccattttcctcaaaaatggtgacatttgtatggacggcaccgctcgtgacgtgaccaaccgttacctggatgagctgtttggcaaacctgataaagccagcgcggcgaaaagcgaaacggctacctcgtcagccagtggcgtaagccagatgtctcttgatgagattaaagatgtgtaccatacgcgcccaggctaccgtccggaagaatatcgctgggggcaggggggcgctaaaatcgtcgattatcatatccagagcgccggggttgattttcctccctcattgacgggcaatcagcagaccgattttatgatgaaagttgtgtttgaatacgattttgattgcgtggtgcctggcatcctgattaagaccctcgatggtttattcctctacggaaccaactctttcctcgcctctgaagggcgggagaatatttcggtttcccgcggcgatgtccgggtctttaaatttagccttccggttgatctaaacagtggcgattacctgctgtcatttggtatctctgccggcaacccgcagacggatatgacgcctctggacagacgttatgactccattattttacatgtgaccaagagcatggatttctggggtgtcatcgatcttaagtcgtcctttactagctaccaatga

SEQ ID NO: 196711 - DNA, 2127 bp, Klebsiella oxytoca
atgactaaaaacttaaacacgctggttagcgaattacctgagatttatcaaactatttttggccatcccgaatgggatggcgacgccgctcgtgattgtaatcaacgcctcgatttgattaccgaacagtacgataacttatcccatgcgctggggcgtccgcttaaagttctcgatctgggctgcgctcagggcttttttagcctgagtctggcaagcaaaggcgcgactatcgttggtatcgatttccagcaggaaaatattaatgtatgccgcgcgctggccgaagagaaccccgattttgccgccgagttccgggtaggcagaattgaagaggtgatcgccgcgctggaagagggcgagtttgatctggccattggcttaagcgtgtttcaccatattgttcaccttcatggtatcgatgaagttaaacgtctgctctcgcgcctggccgatgttacccaggcggtgatccttgagctggcggtgaaagaagaaccgctttactggggcgtttctcagccggacgatcctcgcgaactgattgagcagtgcgcgttttatcgcctgattggtgagtttgacacccatttatcccccgtaccgcgcccgatgtacctggtcagcaaccaccgggtgctgatcaatgattttaataacccgttccagcactggcagaatcagccctatgccggtgccggcctggcgcataagcgcagccgtcgctacttctttggcgaagattatgtatgcaagtttttctattatgacatgccccacggcatcctgacggccgaagagagccagcgtaataaacatgaactgcataatgaaataaagttcctggcgcaaccgccagcgggctttgacgcgccggcagtattggcccatggcgaaaacgcccagtctggctggctggtgatggaaaaactcccgggtcggttgctgagcgatatgctggcagccggggaggagatcgatcgtgaaaaaatccttggcagcttgctccgttccttagcggcgctggagaaacaaggtttttggcatgacgatgtacgcccgtggaacgtgatggtcgatgcccggcagcatgcccgcttaatcgacttcggctctattgtcaccacgccgcaggactgcagctggccgacaaaccttgtccagtcgttcttcgtgtttgttaatgagctgtttgctgaaaacaaaagctggactggtttctggcgttcggctcctgttcatccgtttaatctgcctcagccgtggtctaactggctgtatgcggtctggcaggagccggttgaaagctggaactttgccctgctgttggcgctgttcgacaagaaagcgaagctgccgtcagccgaacagcagcgtggggcgatggaacagtggatcatcgctcaggagacagtgctgctggaactccagtcccgggtacgtcatgaaagtgccggctcggaggcgttgcacggccaaatccacactctgcagcagcagatgactcagctgcaggccgcacaggatgcgttggccgagaaagctcaacagccagtggaagtcagccatgaactcacctggcttggtgagaatatggagcaactggcggcgctgttgcagtcggtaaaagctcactcacaggctgacattcagcccgagctgccccctgaaaccgctgagctactgcagcgactggaagccgctaaccgggagatccaccatttaagcaacgaaaaccaacagcttcgccaggaaattgaaaaaatccatcgcagccgttcctggagaatgaccaagggttatcgttatctgggcctgcagatccatttgctgagacagtatggtttcgtgcagcgttgtaaacattttattaagcgtgtcctgcggtttgttttctcatttatgagaaaacatccgcaggtaaaacatacggcggtaaatggtttacataagctaggcctttatcaaccagcctatcgtttgtatcgtcgtatgaatccactgccgcacagccagtatcaggctgatgcgcagattttatcgcagactgaactgcaagtgatgcatccggagcttttacctcctgaagtttatgaaatttatctcaaactaacaaaaaataaataa

SEQ ID NO: 196712 - DNA, 2523 bp, Klebsiella oxytoca
ttgcatattttgattgatgtccagggttaccagtcggaaagtaaattccgtggtatcggtcgcagtaccctggccatgagccgcgccattattgaaaatgccggtgagcatcgcgtcagtattctgatcaatggtatgtatcccattgaaaatataaatgatgtcaaaatggcctatcgggacctgctgacggatgaagatatgttcatcttttcagctgtcgcacctacggcctattgcaatatcgaaaaccacagtcgtagcaaggcagcccaggcggcccgcgatatcgcgattgcaaacattgcacctgatattgtttatgttattagtttcttcgaaggccatggggatagttataccgtgtctattccggcggataatgttttctggaggacggtgtgcgtatgccacgatctgatcccgctgttaaataaagagcgttacctcggcgacccgaatttccgcgagttttatatgaataagctggcggaatttgagcgagcggatgctatcttcgctatctcgcagtctgcggcgcaggaagtgatcgaatatactgacgttgccagcgatcgagtgctgaacatctcttcggcggtgggggaagagtttgcggtgattgattattccgccgagcgtattcagtctttaaaagacaaatacagcctgccggatgagtttatcctaacgctggcgatgatcgaaccgcggaaaaacatcgaagcgcttattcatgcttacagcatgctgcctaccgagctacagcagcgctatccgatggtgctggcgtataaggtgcacccggaagatttggaacgtattctgcgtctggcggaaagctatggcctctcccgcagccagcttatctttaccggcttcctcaccgacgacgatctgattgccctgtacaacctgtgcaaactgtttgtattcccgtcgctgcatgagggattcggtctgccgccgctggaagcgatgcgctgcggggcggcgacgttaggttcaaacattaccagcctgccggaagtcattggctgggaagatgccatgttcaatccgcatgatgtgcaggacattcgccgggtcatggaaaaggcgctgaccgatgaggcgttttatcgtgagcttaaagcgcatgccctcgctcagtcggccaaattctcatgggccaataccgcccatctggcgatcgatggtttcactcgcctgctgcagtcgtccaaagaggcgcatgccgggcaggcggaaagcgtgaccgcctcccgtatccagacgatgcaggaaatcgatgagctgagcgaagtcgaccgtcttggtctggcatgggcggttgcgcgcaatagctttaagcgccatacccgcaagctactggtggacatttcggttctggcgaaacatgacgcgaagaccgggatccagcgcgtctcacgcagtatcctcagcgaattactgaaatctggagtgccgggttacgaggtttccgccgtctactatacccctggcgagtgttatcgatacgcgaaccagtatctgtccaataatttcccgggcgaatttggtgctgacgaaccggtgctgttcagtaaagacgatgtgcttatcgccaccgatctgaccgcgcatctcttcccggaggtggtgacgcaaattgacaatatgcgcgccgccggagcgttcgcctgcttcgtggtgcatgatattttgccattacgccgcccggagtggagtatcgaaggcattcagcgtgaattcccgatctggctgtcctgcctcgcagagcatgccgacaggctgatctgcgtctctgccagcgttgccgaggatgtcaaagcgtggattgcggaaaatagccattgggtgaagccgaacccgctgctgaccgtcagcaacttccatctgggagctgatcttgacgccagtgtgccctctaccggcatgcctgataatgccgaggagctgttatcagctatggctgcagccccgtcatttatcatggtgggaaccatggagccgcgcaaaggccatgcccagacgctggccgccttcgaggaactgtggcgccagggcaaagaatacaacttgttcattgtcggcaaacagggctggaacgttgacagcctgtgcgaaaaattacgccatcatccgcagctgaacaaaaagctgttctggctgcagaatatcagcgatgagtttttggccgagctatacgctcgttcacgcacgctgatttttgcctcgcagggggagggctttggcctgccgttgattgaagcggcgcagaaaaagctgccggtcattatccgcgacattccggtgtttaaagagattgctcaggagcatgcctggtatttctccggtgaagcgccgtccgacattgcgaaggcggtagaagactggttagccctgtacgagcaaaacgcgcatcctcgttctgaaaatatcaactggttaacctggaagcagagcgcggaatttctcctgaaaaacctgccgattatcgcgccagccgcgaagcaataa

SEQ ID NO: 196713 - DNA, 210 bp, Klebsiella oxytoca
atgaaatccatcaaaactttcgttgcagttgccgcactctctatgatctctttcggtacttttgcgcagagcattagcgccagcgcttccacactggaccgcgcagaagccaaaattgccgctcaggccgcagagcaaggcgcgtcttacaaaatcaccagcgctcaattcaataaccgcgtgcatatgaccgctgagctgacgaaataa

SEQ ID NO: 196714 - DNA, 369 bp, Klebsiella oxytoca
atgtctgtcatctcttctgcgattttccctgaacatatccttactcagcttcagcagtctgctgacgcagctgtccggaaattgaaatctttcatttatctgcatcgcaacagcaactggtatgtcaacggctcgggcaattatgccgtccgtgctcatatctcttctgtcaaagaccagggcgttaacgtctttcttaccgttcgtacaggctgccaccgcgccgagtatgtttttcaccgcctgccggtttcctttcctgagggaataacaggtcgtcgaaacgcataccgccatgcctgccgtcaggcacagcatctggcacacctgcgctaccgttttctttccggagggcattctcatgactga

SEQ ID NO: 196715 - DNA, 2616 bp, Klebsiella oxytoca
atggttattaccattaatatacagatacacggataccgtaaaggtcatcaacttctggcatcttctatattgctttctaaagaagatcaggcaactgtggatcgtctctccgatgtagctggccccctacgtccaaaggaacaatttgaaccttacctaacggcttatccgctacctagcgggacctattatgtaattgcaagaacctggcaggatcatagtgttcctagagcaggttgtgttagaactaaaagtttactagttgatgccaatgtatgggctaatacacctccgcttagcgctattcttgagctgcttgattcttcagaattaccatccgaaatagaagcggttcttgtccagtgtaaggaaaaggaactagtaacggaaacacttccacccatttcgggttttaatgcatccgagttgcttgaggctctttttcttgaagagcctaagccagtagttatatttgatgcaccaaaacctgaacaaatcgcattacatttacttgtcgccctgtggccaaatatcagacaaaaattcaccttttcaacgtttgcgttatctcccagaaagataatggggcgtgatttagatcttgttttttcgccttctaacgcaaaagctcgcttctccgactggccaggacgtcgtgtagacgggcgtttactaccggcagcacggcatcgatggacaaaagtgatcgttcgtcgtgtttttgaggagtcaataccgagactattgtcaaaaaatgcgttcaaacttataaataacaatgaagctgaaaatgtttctgtactccgtatcgctcttctctgggatgaactctttgataagctggaacaaacaccaacagcatttttaggtctgcttgatatcgctaattctggaatggtaaacggtgaacatgctatggcattgttaacaccacgcttacttgatgttgttaattcggtcaaaaataatctacctgaaaaggatgcttgggaatttgcaggtgcgctgaccagaaaaactatggggcgtgacatggctgattgtataattgctgtcaataatctagctatgtatttatctgaaaaagatccagagggtgtaattaacctgataaagcaagttaattctgatgatgtcattaataatttagtgccagggatcgcatcagggcttggtaaaagccctagtacaatggtcaagaaagtacttttaagcgtacctgtaaatatatttgccaatttagttttattaggcgatgggcttgcagaaaaaattattagtgatgatgaattaatccatttcactggactcgtattatcagagatagataaatcactttcatttaaaattgggatgattttgcttccttttctgattgaagatcgtcatcttcctgtcgctcttcccatcataagtagtcttgatatatgtgagatttcagacgaacttgtttggttgaaaaataccaatgactttcagtctaaaaaaattagtatggcgctaattaaccgtgctcgagatattgagggaattcctgaggtccgtaatgtattaatttcaaaagacagttctccacgggcacaagcattgctggctcagacgattaaccctactgtagatgatgtgctttggctgcttggcgaaacaagtttatctgaaaaatcgtcatcaataattttagcaaatgtcatccgccgtgcgaatgaacaacaatttgttaagctattatccaatatcaagattagtgaaagcatagccgaacgtctgacgaaaaatgatctcgacatacttgaaagagctgcattacaagacatcgttcctataaatatatatgtcaggattgttcaggttgtgatttcagaagtcaataacgaccataagcttttgatcgcaaaatatgcattaggtagatgtctacgtaatcgttttgagaatgatgtagtgattttgtccatgctgctgaatgttattgggcatgatcttgacccaaaatggattgtttataacgcactagagagagagattaattctgaactagccagtcgaaatgtaattgtactggaacaatctcaaacattgattcgtcaaaaaatattatatgtggttaacgaaatagcgaatatgctgcgtatgaggcaagtcagctatttaaatgaggatgcaaataatgcttgtgccagacttatgtttgatgctcaagaggtttcctatccagcgttaattgatgcggcgatcaccctcatcccatcgttgcttaatgctcgatataaacctgtttcattgatgatatctgtattattcccaattatttataaagaattatcaagagccaatgatttttcggaacgttttaatattttctccttcttcgattgggatcgttgtaagactgctcgaaatgaacttgttgaggcttttatgtcttcatcatggaacccgggagatctagctctaacagcgtgtttgtgtcaggaagaatttaaaatacttaagcgagtggcgcaatcttacggaggggaaaaatatttatataaaattgagagtgaccttgaacgacttgatgctgataggcaaattcatgtgaaacgtattattgctgagtttcttcatgagtag

SEQ ID NO: 196716 - DNA, 843 bp, Klebsiella oxytoca
atgagccgatcaatagtattacttggtggtccagactcggggaagaccaattatatcgggcccctgtggcttgcattggataatggaaagggagcattacatgctgcagaacagcctcctgatattgcttttgtgctatctgtcgctgaccacatcttccagggaagtttcgcaccacgtactgaactaagcgacatacgacgtaactttgaagttgttgttgccgcaactaaagatggacctagatcaaaggtcattgtgcctgatatttctggagaactttggcgtaatgctgttattgagaacgaaatttcttcagactggatggatgaactaaaacaagcagacgcagcgttgctttttgtcagagtggattctgatcaagacgttcgaccattagattgggtgacagctaggaacatgcttgaaaggatggggaatgaggaagaccaagggctccctacacaggttatgttgtgcgagttaatccattttcttgaagactctttagctaggcgcgaagatggcggacgcccacgtctttcagttgttgttgctgcttgggatcgtgtcgatccagacaagttcgaacaagggcctatagcctatcttgaaagggaatatcctttagttgcgggaagaatagcagacctgaccgcactcgatgttaaagtttttggcttgagctctatcggtggcgatttaaaaaatgatcttgaataccgaaataaatttttggatgaaggtccaaatgatcaagggtggactgcagtatatgatggacagaaatggcagaaaatatttgatattacgataccaatagaatgggcagtggggctttaa

SEQ ID NO: 196717 - DNA, 1020 bp, Klebsiella oxytoca
atgagtggctcatgtaggcatgaaggctgtaccttcgatgaaacaggaatctgtactctcggaaatgtccctacatcttgttcaaaccgacttccactggaagatagtgaaggaacatcgcttgaggcttcggattataatgacttaaccgagcagatcggtgtcccagtcctatcagaaccaacccaatcccacacatttggttcaaaacagtctcttggactggatgatgtcaacgctttaatgagcaaaaggtatgtcaatgtcgtaggtattctcggagatccagaatcggggaaaacagcctgcttagcaagcctttatcttcttctatcgcatgccaaacttgatggttggtcctttgctgatagtcgaagcctaacggcttttgaagagattgcacgaggagcccgggaatggaataacggtcaggttccagagcagatgacggttcacacggagttgacagatgaacgcagtccgggttttttacatcttagactaaaaagattatccgatggacgtaaagtagattttgcccttcccgacatacctggtgagtggacacaagcccttatttccaattcacaatatgaacggcttgattttctaaagtcagcggaaactatctggattgttatcgatggccgtgctctcaaagatccagagaagcgccatggcacaattgctcgtttaggacaacttgctggacgactgcatacaatgttcggcggcaatattccccggctcttaatcgtagttacccatcgtgattcatacactgtagatgaaaacatctcctctcgtgtgcaacacgagttaaatcggcgtggagcgaatgccgagatagttgaggttgctccattctcagatcagttagatatggttcccgcagggtttggtattgcagaattgattaacattacagttaatactcctcctcggccgttgatattttggaaaacatatgagcaggggactagtaaacgtgaatatctgaactatcggagaagcatatga

SEQ ID NO: 196718 - DNA, 1026 bp, Klebsiella oxytoca
atggacaatttagctcgtcatatgcgaatcagcggtgttgctgttagtgataatgatgttgaatcacgaaaggctgcagttaaaagtttagcaaccctttggggtaaacagaataaagtagcgagtatagtctcccttgctgctgatatagctgtagcacttggtggtaacggagacccctcacaggagttgggtgagcaagtccaagccagcattcagaaaaaggctcctgctttcctctatgatgaacgacctcttgatgttggtgtttgttgtggtatggcgatgatttcgattctgagtggtgccgtaggtaataatggatggactataccagtcatttatgctgcctctttatggtcggctttatcttatcagccagcattaccagatgagcgtcgagaaattttgcgtctagagattttagagaaagctgcaaattattacgcggtatcagctgaaaaggcaagagagcgaattcatgtacctgatccagcggaagtagatataaccgttgaggacgatgttgttacgaataattttcctgaagcaatcaaatataccatagaagcattacgtcgcaacgctgtcttggatcgagaggaactcgattttttgtggtgggtacaattgggtcatagccgtttacttaaaaatcagctatcaaagattgacgaaccagtgcgaattgtaacgtcaggtattgaagctgccaagattcttcggcgtttaccttgtgaggtgcatcgtgagattgttcttcgtacattggagcagaatccagaacttgatctagaagaactactctctgtaattggcgatgaacgaacaacgctcagtgcagcattgacggcggaacatatacttgcccatccaactgttttccctctccttcatgcgttaactacaggtgagatagatcaaataaattcgtctataaaacgtccagtttctgaatggggggaaagagctctgctagaagcaacacttgcaaaaatgatgtcacaaggagctggaacaatatga

SEQ ID NO: 196719 - DNA, 1377 bp, Klebsiella oxytoca
atgccagcagtatttgttcatgtatcagatattcattttggtcaagaaaaaggtgatgaccgcgtccacatacatgatgatgtcaagcagcaactaatttctgatgcacgacatgtagtttcaaatttaggtaacggagtagctcatggaatcttggttacaggtgacattgctcattcggggacaaaggctgaatacgattctgcaggagaatggttggatgaacttgcgtccagcataggggcagaaatccattgtgttcaaatggtgccgggtaaccatgaccttgatcgttctaagctgtcgttatccggaaaagctattcttgaccatatccgtaaaggtggcccccaagaatacgaacgagttatgaacaacgtagtggatcgcgccgctctttttgctcgattcgaagactatggcaacttcagttttggctacaattgcccactcaatgatgagggagtatttgcctctgagatggaagtaaatttagctccaggccgctctattcgttttataaggctcaattcatcattactttgccatggtgaagaacgcgatgaagatccggaattgatgataggagcgcggcaattcactattccacgcgatgatggtgtggaaaatgtaattctggttcatcaccccttaagttggtacaaagatcaggagcaagtccgtcaatacatccgtagtcgtgctcgtgtattcatttctgggcatgagcatgatcccaaagtttctgtggatagtgttgaacaaggttgtgatattttaatgctcgcagctggcgccacagttccttatcattccgatgacgtctacacctttacttataacatcattgagtttgattgggatgaagaaatcgatgggctatcggtaaccatacatccaagagcctggaacccgaatcgtacttgttttgaaaatgatgataaacgcttaggtggaaaggaccccaattatcgtcttaactcaccgaattttcgtgttgctccacgcccacagttagctttgccctcttcaccaatacaatcaaaactaacagaagacgagaatacgactcctttatccactgggatagaaaaaacaccggcagagtcttcaagagagggcaaaaaatgtatgccttctgtatctgcttcagagagctatgaaattgccaggcttcgtttcttccgcgatctttttgaaggcgagcgtttacgaattcttgttgaacttggggctctctcagagaattttaatgaacggatgaatcaaggaattgagcgaaaattgttggatttactcgttcgagaaggaaaactggaaggaattgagaaaatgattgatcaattaattagtgaccgtaaggaagaggcgaaataa

SEQ ID NO: 196720 - DNA, 750 bp, Klebsiella oxytoca
ttgtctgataacaacgaattgtgttcatgtgatgctgaatgcacggatgtttttttctcaatggttaaagatcaggtgcagagcatgtattccctgcttcatcaggaaagaagacttatcagcgaagaggaaaaaagacgagtaaaacaatggttccgagatgccttgagtgatatgagggggtggagccgagaatctaaaaccagaattgttaatgggaaggtgaatgattgttacgagcagtctcaccttaaggtcggtgttttcggaaaggatattgattgttacctggatgctgccggaatccttttctggtgggggcaatatacctggaagagaggtgatctgggagaaggtattcgcgccatgctgcgagcagctcactgcctgggggcatggcagggagcccatcatcaactcgataagcaagaggagtgtcagtcactcagtgaagtgcggagcgaggctggaaaaaaaggggcaaagtctaaaagggcgttgtttgaaccagtcaaaaaagaatttctgtccctgattgaggagcatatgcccgccgaaggctggaaaagccgggcccaagcaataaagattgtcgcgcctgagttacgtgtattcatcgccggactgaaaataatgggtaaaccgagtgaaattgatctggaacgtttgattggtgactggtgtcggaacaagaagtcgccagaatttggcaaacaggttaatgaaatgttaaatagatccgggatctga

SEQ ID NO: 196721 - DNA, 426 bp, Klebsiella oxytoca
atgagcaatattaccatctatcacaacccggcctgtggcacctcacgtaacacgctggagatgatccgcaacagcggcaacgaaccgacaataatttattatctcgatactcccccgacccgtgatgagcttattaaacttatttcagatatggggattacagtgcgcgccttgctgcgtaaaaacgctgaaccttatgaacgcctgggtcttgatgaagagaaatttagtgatgagcagttgattgatttcatgcttcaagatccaatcctgattaatcggccggtagtcgttacgccgctcggtactcgtctttgccgcccttcggaaatagtgctggatattcttccggaaggtcagaaaggagcgtttaccaaagaggatggcgagaaggtcattgacgaaacgggaaagcgggttaggtaa

SEQ ID NO: 196722 - DNA, 993 bp, Klebsiella oxytoca
ttgcttggggctgctgttgctacactgtttgccaatgacggagccgcactgatcctgacgccgatcgtaattgcgatgctgctcgcactgggattcagtcagggcacgacactggcctttgtcatggccgcaggatttattgcagatacggccagcctgccgctcattgtttctaacctggtgaatatcgtctcggcggactttttcggtctgggctttacgcagtatgcctccgtgatgatccccgtagatgtggccgcgattacggccacgctggtcatgctgcatctcttcttccgcagggatattccggtgacgtatgacgtttcgctgctgaagacgcctgccagtgtgataaaggatccggcaacgttcagggcgggctggattgtcctgtttttgctgcttgtcggtttctttgttctggaacctcttgggatcccgataagtgcgatagccgctactggcgcagcagtactgttcatagtggcgaaaagaggtcacgccatcaacacaggaaaagtcctgcgcgatgcaccatggcagatagttattttttcactgggcatgtacctggtggtctatggcctgcgcaatgcagggctcacggagtctctgtctgacgtgctaaacctgctggcagaaaaggggttatgggcagcaacgttcggcaccggcttcctgaccgcgttcctgtcgtcggtaatgaataacatgccgacggtgctgattggtgcgctgtcgattgacggaagtacggcgacaggcgtcgtcaaagaggcaatgatttatgccaacgtgattggctgcgatttaggcccgaaaatcactccgattggcagtctggcaaccctgctgtggctacatgtgctggcgcagaaaaacatgaccatcacctggggatattacttccgcaccggcataatcatgaccctgcccgtgcttttcgtcactctggctgtgctggcgtggcggctctctgtcaccttgtag

SEQ ID NO: 196723 - DNA, 732 bp, Klebsiella oxytoca
atgcttcagccacgtttatcctcgcctatgaataaactccttttttatatcgtcatgagctggctgctgccgatccctgtagctcaggcgggcgtggtgatcggtgggacgcggtttatctatcatgcgcagatgccgaccctaagcgtgccggtgagcaacacctcttctgagagctggcttattgatagccacattcagtcggcgcgacgatggcccggcgcggctattgccgcagggaacagacccccctttatcattacgccgccgttgttccgtcttgcggcagagcaggagaatacgctgcgcgtgacctggaccggcgacgcgctcccctccgaccgggaaagcctgttcacattgagtattgccgccataccctccggtaagcctggcgaccatcatgttcagatggcctttcgttccgcgctgaagcttatctatcgtcctgctggcctggcaggcaatccccagcaggcgtaccgggggctgcgctggacgttgaccccggaggggctgtcggtacagaacccgggcccttattacgtcacgctcttctcgctcaaggccaacggccggcccattgataccgcaggtgtcgtcgcccctttttcgacgcgcaaaaccgactggtgccagcgggcgacccgctgcgaggtgcgctggcaaagcattaatgattatggccgcgtgctgccgccgatagcggcgaacgtactgctggcgcgctga

SEQ ID NO: 196724 - DNA, 2697 bp, Klebsiella oxytoca
atgccaacagtgccaactgtacagggccgccaggttgaaagccgcggcgtgcagaccggaggttttcaggccgtcgctcagccaaatatcagcgatgctctggtgaatgtgggtagtcaggcgttggatgtattcggacaggctaaacagcaagcggaccttgcactaacccaagatgcgactcaaaggctttatactgttgggagcggattgatggatgatcctaaggaaggtctgatgactctccaggggaaaaatgccattggtcaggctcctgggtatattcagaaatttgataacgagatgcaaactattgctggcacgctgcctgagtccacacgaaatgtgttcttaaagcatgctcaacagcagcgaatgcaatttgccactcaagcagagcggcatgaattaggacaacgtaggcagtatgagtccggtcagcaagacggttatttatccttgcaagctcagcaagctatatcaaatccacagttgttcaaccaatcagctttgaatgccagagcctcaattatggtttatggtcaagcgcatggacaaagccccgaagagatcgaatcaaactgggtccaatggcgtgagcaagcagcgaaccgggcgagcgaatcttggtatacaccaatgtatcagcaactacttgggccgaatgggagaatcgaggtttccgatacgccaagtgaatcgcagcttttctccgctatgatctggcaggagtccggcgggaatcagtacggtaaagacggctctccactggtctcaccaaaaggtgcagtgggtgtcgcgcagattatggaagacacagggccggaggctgcacgtctggctggtgtggagtgggatcgtgacaagtggcttaacgacccgcgctataacgcaaaacttggccaagcctacttcggcgcacagatgaagaagtacgataataacccagtactggcggtggcggcgtataacgctggccctggcgcagtggatggatggctcaaacagtttggcgatccgcgcactggtgctgtcagtaatgagcagttcgctgctgcgatcccttacgatgaaacccgaaactatgtagcgaaagtaaccggaggtgcgctagcgatccccgggccggccacaatggaaaatctcatcaatcagccattctggaatgcgatgagcccacagaacaaatccgccatgatgagcaaagttgcaggtatgtacgacatgcaggccgctgctggtcgtgtagcgctgcagagccagatgcttgatgacatggtaacgcttgaatctggaggttctgttaatccagtcacgccacagaaatgggctgcggtaatgcctttgcaggcttcgcccgctgagcgtatgcaactggagaaaacctatcagcaatatcaacaagccatgagtctgcagcccgtctaccagaccatcgtgaaaggtaattatcagcaaggtcttgcggccgttcagtctatacagccccagcaggctgagacgaattccaaatataagagtgcgctttatgcttctgccatgtcaaaacttcagcaggttcatgatgcccgcgagtctgatcccggaacctggttgcaacaacattccccggtagttcaatcagccttccaggagtaccagaataatcaggttaccggtgaatatctggcctcacgcattcaggcagaaaaagaccgacttgggatccgaagcaaaagtgtattaccagcgagtgtagttgagggaatatcggcaaaaattgataacagtaatatgaacttttctgacctgaaggggattattgctgggtttggccgttacggtgacgctgtcgtagcacaattgcagccaaaaaccaaagcggcagtaagggttgctacagcgataaacgaccctaacgctgctgacacgatgtttaccatccgcaatgtgaagactgaagatctgaagaagaacgctggagaacaagccaaaggtgtagacgcggcttggaactctctaatttctgcagcatcgccgacatttagcctgcagcgacaaggtggagcggaaacgcttgctgatatcaatgagcaaggtaagcgcctggcttattactacatggcatcgggggaagatgctcaggctgcaacagaaaaagcctataaaaaaatgatcggcgatcattatacggtcactgatacatggcgaatgcctaacaacttgggactgaaagagaataatgttaccgatggtctgagtaatatcgtcaatagccttaagatagatgatattggcagccggagtatgttttatatcccaacaatgacgccagagcagaatgccgcgaataaccttgcgcagatacagaatagcgctgaatgggtgacagacgaaaatgagcagggtgtttatctgacagttaacggcactcctattctggatcagcatggcgctcctatccatgtgagctttgctgatgccagtaaatctggaattgcaaaaccgagcacaaccggcgcagttcttaactggatgggcgaaaaacgcaaagttactcctccatcggagttctatacaccgaatgttaatgccactatgtccgatgctttcagggtgctccggggccaggatgcgacaagtccgctacctcaaaaagagactgacaacccgtcaaatacattgcgcgatgctctgaatacgagaggaggccaataa

SEQ ID NO: 196725 - DNA, 1671 bp, Klebsiella oxytoca
atgaatagagacaacgatgaatcttacatatcggaactaacagacagaatatttttgattcaaagtcagcttgaagcagggaaattatatatttccagccatttggaggcgggttttaaaaaaagcttcgaaaaaattaggcttcgtgaggatggaaaagtagatcctgctactgtggatggacgtatcagagcgatgggtgtagcagttcaacatttttttgaacgaagtgaaattaaacgaaaatataatataatagatttccaagaaacttatttcagaattctcttcgagaacttttcaagtttttatgatgatttaattaaaagcaaggctgaaccatatcaaatcgctcattttctttcagagcaagaagatttcgtaaatcatgttcaagacatttttcctgctttatacaatgacattaaagatttttgggcggcagtttatgagataggggaaattcatttacaagatggggaacagcttaaggccaattttgctggcgacctatttccatcctataatgaaaatgccgtgtcaagtacagggttgtatatagatacaataattttgccttgcccgatattaagagttggtggtctatatgccgtagctgagaagaaacagttttgttacttattaattaagcatgtgctaacatgtatgacatatcgtgagttagctttagaagagattgaaccagctattgctctcgttctaccagaaaaaaacaactttaacgatgaagatagggagtcactacgtcaacgttcattaccatttattcttgctcatgcacattatctctatgatcgcgaatttgagagcttggaagaattacaagaatttagctcttctttaagtgattttgataagttatttaaagagttgaagcgccctgatagattgctttttgatactgagtgggggccaggtgggcgcgcacagttagaaagacatatgtcaagccaggaaagaattaatactccagatctcgatggtactccggggatggaggtattgttctcttgtcttagtcgaatgcctcaagctctggcggcaagaattaaagctcaagaattaagaagtacgccatacataaatgctgaaacatcttggacatattttaagtggttaatggaatatgaagctttaggtttcaaatttgatgcggaggcagtgaaagaccttcatatggttaatgccttgacaaaaggtatgagtgacggtttttcttggctcggtaatatacctatgaaaaatatattggagattcgtcgtaatgggttgatgcctgaagttagaggtatattatctaatggtgtttctgaattgattaaatcatcaccaagtaattataatgctacatcacaaagggttgtcgataatgtcgatttagcgttaattcagcaccagcgttttttggaaaaagtaagaagagaaaaattaaaaatctatagcgtagaagtgattccttttatagtgaatggtgcatttggtatggcttccgcattgataaataaacctgagcttgctttgactagcgctgtcttaggtagtgtgggactacctaccttgaaggatatacgcagtagttttaaaagcaatcaagagaaaatgcttaactataaaaaaacagcaacaggcttaatgtttagtagaaagtga

SEQ ID NO: 196726 - DNA, 726 bp, Klebsiella oxytoca
atgattaccagtatccagggtaatagcctctctatggctggcctgttagcaaatgttagcactttgcgagtactacgccgccacgggaacctgtcgaaacctgtcactttgcgggtcattgaaggtggtgcgcaaaatgccgggtggaatttctggaatagcgattcctttaacaccttcagtaaaaatttttgcgagtccataaaaaatggcttgatgttctacgtcatccaggtctatggttattgtgcaccagcaaaatctggtgccgggattggcgtcccggagagtttacaggcgacctatgacgcgccatgcgtctttttttgtgtcgttaattcagtacacccttttttctgcgttgcgggtataatccgcgtcgctcacaaaataatggtgggctggatgggggcggagaaatccgcgccggtttcctgtaacgccggttacgccaaccctgttcagtccaccaccagcgaaattggcgtttccggtggtgggtttcagacccagttacaggaggctgccaccatggctactacccctacccaaaatccacaatttatctggatcatcgctgctatacgacgtgatagccaattcgtcactataaaaatcttccacgttaccgcagtatctgaacgcgaagcccgtcgcactttagtgcgtgatcacgtttgttttttcgctggccgcatccgtctgacggaggtggatcatgcgtaa

SEQ ID NO: 196727 - DNA, 219 bp, Klebsiella oxytoca
atggacacacaccaatcaacaacccacgccttaccacaaaccggttacattcgccgctatcgactggctgacgctctgggggttcacgttgccactgtagatcgctgggtgaaggctaaagtcatgccacaacccattaagctgggcgaaaaaataacagcttttgatgccgtggagattaataattggctggctaaccgccgcagggagaatatctaa

SEQ ID NO: 196728 - DNA, 174 bp, Klebsiella oxytoca; identical to SEQ ID NO: 107918

SEQ ID NO: 196729 - DNA, 993 bp, Klebsiella oxytoca
ttgctcggtgccgctgttgctgctttgttcgccaatgatggcgccgcgctgatcctgacgccgattgtgattgcgatgctgctcgcactggggttcagccagggcacgacactggcctttgtcatggctgcaggatttattgcagatacggccagcctgccactcattgtttctaacctggtgaatatcgtctcggcggacttcttcgatctgggctttacgcagtacgcctccgttatgatccccgtggatgcggcagcgattgcggccacgctgatcatgctgcatctcttcttccgcagggatattccggcaacgtatgacgtttcgctgctgaagacgcctgccagtgtgataaaggatgcggcaacgttcagggcgggctggattgtcctgttattgctgcttgtcggtttcttcgttctggagccgctggggatccctgtcagcgcgatagcagctgctggcgcagcagtactgtttatcgtggcgaaaagaggtcatggcatcaacacagggaaagtcctgcgcagtgcgccatggcagatcgtgattttttcgctgggcatgtacctggtggtctatggcctgcgcaatgccgggctcacggagtatctgtctggtgtactgaacctgctggcagaaaaggggttatgggcagcaacgttcggcaccggcttcctgaccgcgttcctgtcgtcggtgatgaacaatatgccgacggtgctgattggcgcgctgtcgattgacgggagtacggcgactggcgtcgtcaaagaggcaatgatttatgccaacgtgattggctgcgatttaggcccgaaaatcaccccgattggcagtctggcaaccctgctttggctgcatgtgcttgcccagaaaaatataacgatcacctggggttattacttccgcacgggcattatcatgactctgcccgtgctgtttgtcactctggccgcgctggcgttgcggctttccatcactttgtaa

SEQ ID NO: 196730 - DNA, 426 bp, Klebsiella oxytoca; identical to SEQ ID NO: 120236

SEQ ID NO: 196731 - DNA, 786 bp, Klebsiella oxytoca; identical to SEQ ID NO: 182623

SEQ ID NO: 196732 - DNA, 546 bp, Klebsiella oxytoca
gtgcgccttaaattccgcgcggacaattgcgccgtgggtcggtactacgctggctaccgcatcgtccaaatcgacgttattggccagcgtattggtgtccagcgccacccggttttcccggtattcggtggcgtagggcagaacggcgtaaccgcgccagtcggtttgtaccccggtctggttttctaccctcacattgtcggcgcccggggctttgatcagcacgaccgtgtcgttcatcggctggctcagggtgacgccgtcagcgtgggccagcacgccgccgctcaggccgtagtagagctgtttgataccgtcgctgcggctgtagccgacgttggcgttaccgtagccgccgcggtagttcagcgccgcgtatccggtgccgccgctgttgccatcgccgccgccggcgtagccggtctgtacgctgtagctcaggttgttgtcctccagcagcgtgccgtacaggccggcaaggctggtggtcctgccgttcagatcgttggacatgctgtagctggcgctggcgtgccgccacgctga

SEQ ID NO: 196733 - DNA, 693 bp, Klebsiella oxytoca
atgaaaatatctctctacgtccttattcccttttttactttagtctctaccctggttcagggacactgtctgtccgcaagtgtgttgcaagataatatggatgttactttggcagcgcagatttcatatgtaaataaagaaccgtcaatctggaaaattgatggtcgcaatccgtacgtggccgacaatgtttataatgatattgcgttaggcataaaaggtcagtgcgatctagtggataataatctcaatatggatttttcattttattctttaggttattatccgattcgcagtcccggagtctttgaaaaagataaaaatcgtgcaaggataatgatagatcgactgcgttttacctatgctttatctgatacaacacgcctggaaggagggaagctgagatcttcaaaaggggcctttttcttaagatcccccgctacattgctgacaaattattattccggttttaaaacaacccgaatatatgggccagcaatggaatcagcttatagcgaatcattttggggggccacgttatctaaagagtatcaggattataattttttacttacgctagctcccagattgagcagtatcgataagtactatgaatcatcaggtaactggtctgcagcacaacgctcaaatagcgaagagcgttacctattaacggctttgttgaataaataa

SEQ ID NO: 196734 - DNA, 417 bp, Klebsiella oxytoca
atgtccggttttcaacaaaccatgcaaatgctgaatgagggcatcgttcccactgcgatgctggttgccaacgatcagatggcgctgggcgcaatgcgcgccattaccgagtccgggttgcgcgttggtgcggatatctcggtagtgggatacgacgataccgaagacagctcgtgttatatcccgccgttaaccaccatcaaacaggattttcgcctgctggggcaaaccagcgtggaccgcttgctgaaactctctcagggccaggcggtgaagagcaatcagctgttgcccgtctcactggtgaaaagaaaaaccaccctggcgcccaatacgcaaaccacctctccccgcacgttggcagattccttaatgcagctggcacgacaagtttcccgacttgaaagcgggcagtga

SEQ ID NO: 196735 - DNA, 210 bp, Klebsiella oxytoca; identical to SEQ ID NO: 182617

SEQ ID NO: 196736 - DNA, 321 bp, Klebsiella oxytoca
atgctacaacctgttcagcttttcaaaatcctgtcggatgaaactcggctcgccatcgtcatgattctccgggagtcaggagaactgtgcgtttgtgatatctgcgcagccatttccgaatcacaacccaaagtctcgcgacatatggctatccttcgtgaggccgggctggttctggaccgtcgtgaaggcaaatggatccactatcgtctgtcaccccacataccggcatgggcagctgagacaatcacgacgtcctggcagtgtatgcgggaggatttgtgtaaatggctggataaatcagcctgcacctcctgctga

SEQ ID NO: 196737 - DNA, 129 bp, Klebsiella oxytoca; identical to SEQ ID NO: 189981

SEQ ID NO: 196738 - DNA, 447 bp, Klebsiella oxytoca; identical to SEQ ID NO: 194615

SEQ ID NO: 196739 - DNA, 2487 bp, Klebsiella oxytoca
atgaagcagaggtcaatctgcccgggaagattaagcacggctatcgcggttgcgctgtgctgctttccgccattttccagcggacaggaaaacccgggaacgatctatcagtttaacgatggttttatcgtcggcagtcgcgaaaaggtcgacctgtcgcgtttctcgaccagcgcgattagcgaaggcgtctactcccttgatgtgtataccaacggcgaatggaaagggcgctacgacctgaaaatcaccgccggtaaagacggcaaaatgggcgtctgctacaccaaagcgatgctgatgcaatatgggatctcgccggaaaagtttaacccgcagctcagcgaaaaagcgggattctgcggacgcctgcaggagtggcgcaacgaggccaacgtcaaagacacgctgattcagtcctccctgagactggatattgccgtaccgcaaatctacgaagatcagcgcctgaaaaactttgtcagcccggaattctgggataaaggcgttgcggcgctgaatttaggctggatggccaacgcctggaacagccatatctcctcggccaacggctccgataacagcagcgcgtatcttggcgttaacgcgggcctgtcgtgggacggctggctgctcaagcatatcggtaacctgaactggcagcagcagcaggggaaagcgcactggaatagcaaccagacctatctgcagcggccgattccgcagattaactcgatagtcagcggcgggcagatttttaccaacggcgaattctttgacaccatcggcctgcgcggggttaacctggcgaccgatgacaatatgttccccgacgggatgcgctcctacgcccctgaaattcgcggcgtggcgcaaagcaacgccctggtgacggtgcgccagggcagcaatattatctatcagaccacggtgccgccggggccgtttaccctgcaggatgtctatccttccggctacggtagcgaccttgaagtgtcggttaaagaggccgatggctcggtcgaggtattcagcgtgccttacgcctcggtggcgcagctgctgcgtccggggatgacccgctatgcgctctctgccggtaaagtcgacgatagttcgctgcgtaataaaccgatgctctaccagggaacctggcagcacggtatcaataacctgttcaccggctataccggcgtcaccggatttgatgactatcaggcgttcctgctggggaccgggatgaataccggcatcggcgcgctgtcattcgacgtcacccattcgcggctgaagagcgataccctcgacgagcacggccagagctatcgcgccacctttaaccgcatgtttaccgaaacccagaccagcatcgtgctggcggcgtatcgctactccaccaaaggctactacaacctgaacgacgctctgtacgccgtcgatcaggagaagaactacagcagcaactacaccgtatggcggcagaaaaacgggatgacgtttaccgtcaaccagaacctgccggacggctggggcggcttttacctgagcggtcgggtagcggattactggaaccgttcggggacggaaaagcagtatcagtttagttacaacaacatgtacggtcggctctcgtggtcggtcagcgcccagcgcgtctataccccggatagttccggccaccgccgcgacgatcgcgtttctctcaactttagctacccgctgtggttcggtgaaaaccgcaccgctaacctgacgtcgaatacctcgtttaataattcgcgtttcgccagttcgcagattggcgtcaacggttcgctggatagcgaaaacaacctcaactacggcgtgtcgacgaccacctccaccggcggccagcacgatgtggcgctgaacggcagctaccgtaccccgtggacgacgctgaacggcagctatagccagggtgaaggctatcgccagagcggcgtgggcgccagcgggacgctgatcgcgcatcagcacggcgtcgtattctcgccggaaagcggcaccaccatggcgctgatcgaagcgaaagacgccgcgggcgcgatgctgcctggttcgccggggacccgtatcgatagcaacggctacgccattctgccgtatctgcggccttaccggataaattccgttgaaattgacccgaaaggcagcaacgacgatgtcgccttcggcagtaccgtggcgcaggtggtgccatgggaaggcagcgtggtcaaggtctccttcgataccacgctgcagaacaacgttactctgcaggcgcgtcaggcaaacggtctgccgctaccgttcgccgccacgatttacaacccctccgggaaagagatcggcgtggtgggccagggcagcatgatgtttatcagcgacgccagcgcgccgaaggccacggttaagtggagcggcggacagtgctcggtggaattaagccaggaaaaaacaaaggaaacgctatgtcgctaa

SEQ ID NO: 196740 - DNA, 831 bp, Klebsiella oxytoca
atgttgatgtgtgatgcgaccggtctgtcgcaacgtcgtgcctgcaggcttacaggtttatccctgtcgacctgccgctatgaggctcaccgtccggctgctgatgcgcatttatcagggcgcatcactgagctggcactggagcgcaggcgttttggctaccgtcgtatttggcagttgctgcgccgtgaagggcttcatgttaatcataagcgcgtgtaccggctttatcacctcagtggcctgagcgtaaaacgcagaagacgtcgtaaagggctggcaacagaacgtctgccgctgctccgtccggcggcgcccaatctgacctggtcgatggatttcgtcatggacgcactttccaccggtcgcaggatcaagtgcctgacctgcgtggatgatttcacaaaggaatgcctgacggtcactgttgccttcgggatttcaggcgtgcaggtcacgcgtattctggacagcattgcgctgtttcgcggctatccggctatgataagaaccgatcagggcccggagtttacctgccgcgcactcgatcagtgggcttttgagcatggtgtggagctgcgacttatccagcccggcaagccaacgcagaacggatttattgagagttttaacggacgctttcgtgatgaatgcctgaatgagcactggttcagcgatattgttcacgccaggaagatcattaatgactggcgactggattataacgagtgtcgaccacattcatcactgaattacctgacgccggctgaatttgcagcgggctggcgaaacgggaaatatgaagaaaaaccaaccgacattactaactga

SEQ ID NO: 196741 - DNA, 762 bp, Klebsiella oxytoca
gtggccaaaatcgtcgcccccggggcgaccgatctgggaaataaaatttattccaccaacgtgcccgggatcggcctgcggttcagccgcggcggggcgacggtcaatattatctaccctgacacgttctccagctacgtcagccggaccacgaattactcgctggaaggctcccgctttacgctggaggtgattaaaaccgcgagcgtgaccggcagcggaaccctggcggcaggtaagtacacctcttacgactgggagaacggcaataacccgatcctcgaaacccgcctgagcgccaacgccatcaccgtggtatcgccctcatgtaccatcctgagcggcaaaaatatgaacgtcgatgtcggtaccatcaagcgcagcgatctcaacggcgtcggcaccaccgcgggcgggaaggattttaatattgagctgcagtgcagcggcgggttaagcgagtcgggatacgccaatatccagacctctttctccggcacgctggccaccggcaccacggtgagccgaggcgcgctgctgaacgaaaaatccggctcctcgttggcgaaaggaattggtatccaggttctgaaagagggcgtaccgctggaattcaacaagaaatacagcgtcggtacgctgcgcacgcaagaaacccgatacatcaccctgcctctgcatgcgcgtttctatcaatatgcgccgaccaccagtaccggtgaggtggagtcgcacatgatctttaacctgacgtacgattaa

SEQ ID NO: 196742 - DNA, 165 bp, Klebsiella oxytoca
gtgtataaagtgacgtttaaaaccggtgactattttaaaagccaaaatatgaatacgttcttcccggtgattccggttattttcaatgtcacaaagcaaaatcaaaaactgcatatcccgctgctgctcagtcagtacggatactctacctaccgcggcagctga

SEQ ID NO: 196743 - DNA, 711 bp, Klebsiella oxytoca
atgattatccggccagaacaacactggttccttcgcttgtttgactggcacggctccgtgctgtctaaaattgtttttcgcctgctgcttaacgtaatgatgtcgattatcgccatcattagctatcaatggtatgagcggctggggatccatcttaccgtcgcgccgtttagcctgctggggatcgccatcgctattttcctcggatttcgcaatagcgccggatataaccgctttgttgaagcgcgcaatttatgggggacggtgctgattgcccagagaacgctggtgcgccagctgaaaaatattctgccgacggaaagcgcagcccatcaacgcctggtgagctatctggtggcgtttagctggagtctgaagcatcagctgcgtaagacggatccgagcgctgatttagcacgtctgctgccgccgcacagcgtgaaggaaattctcgccagctcgatgccgaccaaccgtattctgctgctggcaggtgatgagctggggcgtctgcgcgcagaagggaagattggcgatatcaccttcaacctgatggacaataaacttgatgagctgggccacgcgctgggggctgcgagcggctggccagcaccccggtgccctttgcctatacgcttattttgcagcgcacggtgtatctgttctgcgcgctgctgccgtttgcgctggtcggcgatcttcactatatga

SEQ ID NO: 196744 - DNA, 195 bp, Klebsiella oxytoca
atggctttttgcgatagccgggactttgcatcagtacagctatggaccttcagcggcctgcacgccgcccgcaggctgtatgaatcctttagtttcacgctggataaagagtggcagggcgaacagtggggcaggacgatgaccgagcagcagtttagtcgaatcaaaccgcgaccggcgactcatgctaagtaa

SEQ ID NO: 196745 - DNA, 705 bp, Klebsiella oxytoca
atgtatccggtcatacacggcgccgccccggaaaaagagcgcagagtgacagaatttcccggaggcgatgctgcgcatctgtccgggctacgcgtcctcagcagcctgcggcccggtagcccgggcaggcgctttgcgccgcccacggaaaaagagcgcagagtgacagaatttcccggaggcgatgctgcgcatctgtccgggctacgcgtcctcagcagcctgcggcccggtagcccgggcaggcgctttgcgccgcccacggaaaaagagcgcagagtgacagaatttcccggaggcgatgctgcgcatctgtccgggctacgcgtcctcagcagcctgcggcccggtagcccgggcaggcgctttgcgccgcccacggaaaaagagcgcagagtgacagaatttcccggaggcgatgctgcgcatctgtccgggctacgcgtcctcagcagcctgcggcccggtagcccgggcaggggctttgcgccgcccccggaaaaagagcgcagagtgacaggatttcccggaggcgatgctgcgcatctgttcgggctacgcgtcctcagcagtctgcggcccggtagcccgggcaagggctttgcgccgccccccggaaaaagagcgcagagtgacaggatttcccggaggcgatgctgcgcatctattcgggctacgcgtcctcagcaatctgcggcccggtag

SEQ ID NO: 196746 - DNA, 1941 bp, Klebsiella oxytoca
atgaataactcacccgcgctcattatagacaagctcgaaattataggagctacaaaatcgtatgaggtttttttcaaggaaggtataaatataatatggggagatcttgattgtgggaaaagtagcatcttaggaattatagcctattgtctcggagcttcaaatctagattcttacagcgaactagaaacaaaggcacattctgcacgtgtaagcgtgactattaacggtgataagtacatatttgaaagatacctttttaaaccaggcgcctatattaaaggattcaagaataaaattaatcccgcaggaccatcagtgatcttatcccccgatttagatggagacgctcctgatgggtatatcgctttttatattatgggtctaatgggtctccctatagccaaaataaaaatatcaccaagtaaaacggactcaacacttaatagagttggctttaaggatgttctcaagttcctgtatttaaaacaaaaagaaatcgcgtcagatacaatgctgaatatgagtgaaaaatacagatatgtaaaaaataaagaaatattaaagtttctattgaatatacataatgagcttatttccgaaatagaggcagaacttgcagaaaatcaaaaagaattaaattcaaagagaaatgaacgccaggatatactaaaattcttacgtaatataggattcgaaaatatttccgagggcatccttgatagctattcaaatgaagatgaattgtcagatttagagagtaaaatagaagcggttaaaaatgactataatgcagcttctgggacaacagagttggtcgaaaaaagactaaaagaattgaatgatacaatcattacttgtagtgaagttatttcaaatttgaatgatgacctaacaaatttcattaaattaagaaatagttataatgaagaaaagagttcaattacgctatctttaaagctccatgaagattttcatgctccacttgatattgagatcaagtgcccgctttgcaaacacattcaacattccgatgaagtagatagcttaatatctatagaatatatgaacgctgaaaaatcctcattaaacaaaaaaatattgagcctcagtgattatatagaaaaaaccagactcaagctagaactaaatatcaggacctgccagcaagctagaaatgaaatacatgaattacaatattcatttgacgatagctatgcaaggcaagtttctgaattagtcgaaaccatatcaatccttgaaaaccataaagctgatttgattgctgagaataaaatcaagaaacgagacattataatacaagataagatagaaatcttagcttcacaggaaagtaatctgcaaaaaacaatagatgtattaaatgtaaggcttattgatgctaaagaaaaaaatgaaggtaaagatataatagtatcaaggttaagtaagatatttcaatggctaatggaaaatagccttttgcaaaatgtaagtaatgcacatgtaaatgataatctagattatattgtacgcgataaaattttaacagagttaacctccggaggggtaaggactataacatctcttagtacatatatgtcattcctgatcttttctattttatatgactcaaacataccttcatttctgatgatcgacaccccgggcaataacattggccgctatcgtacagtcaataccaacggtgatgaaatagcttcggatcaaaaaatatatgaacgagtatatgagcaattattcaaaatacaaaaattggcaaataagaaacaacgtatttttcaagtcctcatagttgataacgaccttgccgagtttgctgcaaataacccaaatgagttccatatagcaaaacgtttcagcaagcacgactcaaactatgattatggtttaattaacgactataagtcgaataaataa

SEQ ID NO: 196747 - DNA, 492 bp, Klebsiella oxytoca
atgaaaatttatcgcgatgttttatcagaaccgcacctaaatatgttacggttatgtcttattattagagagttacaatataatagattaaaacgcaaacaattaaccataaataaattatgttttttcaatgctattattgtgagtgatagtctaacatattcagtacttcgacattatgacgatgtatctgtagggatagatgatgaaaattatgaggaaggtttttcatatcataataaagaacacctccgtgaggcttttgagggagattacattcgtaatgcaatattaaagctatcaagttcagaacaagtaaatgtcgaaaatattaatcatgatctttatgttagcttaaataaggacatgattttttatgatggatatcatttgaccgataaatggttgaagaacatcaatctcatacgattttgcttaaaaaaaagcgaccgagaactgtttaatttgctaataggattgatttatgaataa

SEQ ID NO: 196748 - DNA, 1203 bp, Klebsiella oxytoca
atgaataagatagcagttgttctcatacatggcttaacgggcaacgatgaaacatgggtgcatagcaatggtaactctttaaaagacctacttaaggcaagtgataagaaaattgaagattattgtgatttttatgaatataattattatagtaagctaattgaatttatggatggaattgttgcaaaatatggtagcaatctgttaagtaaaattccatttttttccaaaaaattgggtgatagaaagaatagaaaaaataaaacaattgctcatctagcaagtggccttgaaacagagctacggatccgttttatcgatcacaatgaaattatcttgattggccacagcctaggggggcttgtcgccaaaaaactaatattaaaacgaattgaagatagaaacatagacaatattactggctatatttctatagccactcctcaccatgggtcgctcaaagcattactaaccaagttcagtaaaaataaacatgccaaagaacttgaacccttaaacgaacagactatgaatttagacgttgaatggatgaaaaatatccaacaccatcctgactcattatacttaatagcattagatgacgaagttgtatcaccgcattgcgccattcctgccggaattagcaagagcgtttgttacgaaataaatgatgaagatcatacatccatatgtaaaccagaagatattacaaaaacaagctttataataattaaaagatttattttaaataaactgaactctatgttagtccaagataaattattagaaagcaaagcttctcagctatcatcatatgaaaaagagatttttgttataaagttaatactagctgatgttgatgtaggtcttattgattcgtccaaggaatcattttttagagcagaggtagcatgcagactacacaggaaagaagcaaaaaaattagaagatatttatgataaaattaaatttttatatcagcaagagtattacagaagacgtaatggacaaataactagctctgaattagtctataaggttcataaagaaataaaagataacaacgactcagcactaaaaatagtcttaaaacacttttcttttcttgaaaaaatcggcatgttacaccaattagcaaacaagaaagagagtaaggtttactggggtgagaaagacatcccagaaagtcattatgaggcttag

SEQ ID NO: 196749 - DNA, 126 bp, Klebsiella oxytoca
atgaaaacatcaagattcactgaagagccaattgtctttgccttgacgcagtccgtactggggacgtccgtacgggacatcagttccgatgccacgttctatttctggcgcaacctcctgagttga

SEQ ID NO: 196750 - DNA, 480 bp, Klebsiella oxytoca
atgcgtattcatcaacagaataagtcccgtaaactatatcgcagcgtcaacacaacgacgctgcatcattctaataatccaggtgctgagtatcggtgggaacgcaatcgcaaaaaagtcggagatgagctactggtaaagcgcgagacaatgcatggtagacagaagcgtggccgagactacacaccattgttttattttctgatcaaacagattggcaaaccgtggaatgaaatattcagtgaagtatgtggacgtcttgataccaccgagccggtattctggttggtcgcgctacatgagcatcagcgaagggatttagtctgcattggcgaaagcagtttttacccgggtttgtttgttgatgagaatggagttctgcaacaggtaaacccttcgattacgagaaatgatgttaaggtgacttgccgttgctgcacacacacttatattggtgaacctgtaccttggatagattga

SEQ ID NO: 196751 - DNA, 924 bp, Klebsiella oxytoca
atgaaagaaaccatttataacatcttctacttttgtccagatggtgttcacatcacacattgcggaatcgttgctcatgaacttgatggtgacgataatcaaaaactggaatttttaagtaagcagttagacactgatttagcttcttgtaggtcatttcatgacattcacccttctgttctcgatgacgacaaaaaactgagtcttaccaggtacaacaccaacttgagagtgggtatcagttacgcaccatttgagttagctcttgaggctgtaaaagcccccattaaccccttaacgattgttacaccggttgttcagggtaaattacaatatcatgttaaacaccctgtaggcgaacaattaaggaatgagcatacgcctaactatcatattgagggagttcttgatataccggactaccttaataagtatttgacggggggagagtttcatctcaaaaaactgattaatgatgatcacatggagcctgttaagctactctttaatcaaaaaaattatatatcgagctttaagctgcttgtatcattaattgatactattgcttaccttgaatatggtgatgtgaaaagaaacttccagcaatggcttgataattattcagaaattagtgagttggatattacatctgatgaagtttatcagttgagaaactccctgttacatatgaccaatctcaactccagagatgtcttaaagaaaaaacatcgccgcctgagtattgcaatttgcaaaaaaggccatccgactcagtaccacgatgaaatcgtatatttcaacttcacagactttctattcatctttgatgaagctgttgataggtgggttgatagctacaaagatagcaaaaagcagttaactttaattgaaagatatgatgaagtattgagagataacttctaa

SEQ ID NO: 196752 - DNA, 972 bp, Klebsiella oxytoca
atggactttattaaggagtttcatgagaacctggatactgatttcgaagaacagctcttcattgcttgcctcagaaattattgttctcacggcaatccgttgaggtttagcaatttcgcttacgccatacgtgagcttataaaccacgtcctgtcacggatggctccagatgaaagggtgatggctgccccatggttcactcccaatagaaacaatgcgacagtaactcgtaaacagcaggctaaatacattgctcaaaaacatatacctgatggactcttagatgctgcagcacttcaggagctggataacggtattggctggttcaacaaaaattatcagtcattgaattactacactcatattactgcagagtcgcttgaaagccagccaaaggatttttttgaaaaagcaaaactgttgattgagctttgcaacaagatattttctaactttggtgatctggaacgaatactaactgattccattattgatgaggtcagcgaccatgtaaacgaggttacgagagataatactcctgatgaagttgatatactatcgtcacagacgattgtagaagcttgcattgttgaatcgatagaacctctcagtcttacagaagattatgtttatctcttggttaggggaacgctcgaaattacacgtcaatacggacggggtgatgattatttagctcaaggcgactcttatccctttaaattcgctgtgtctttacgcgctagcgattttgaagatattagacctcttgttagcaccgctattgttgatacaggttcatggtatgatgatggtaatggttcagcaatcgctgataaaatttacagtacacggcgatttcttgagatgattgcacaagttcacataaaaccggcaagattacgaagcctctttccagagctgagttatgtaatacctgatgatgaactagatgaaatggttcaggatctctga

SEQ ID NO: 196753 - DNA, 408 bp, Klebsiella oxytoca
atgaccaaagaagagttgattgcccgtctgaaagagctgggcatcatgctgaaccgtgagatcagtctgaccggatcaaaagaagaactggcgctacgtgttgctgaactggaagaggagcttggtgatgatgtcgacgatggtgacgatagcaatgtaactggtaccggaaatactgcatccggcgatgaggggaagcatagcgacgcgcagacctcagcatcccaggaaaaaaaatccgtatttggtgacctggtagcggtggaaacgcgtgcgacgttacacctcgaagcatttcacgctgtaaaaaatgaaaagttgagccttgttttgccgggaaccaccgttcgtgtcagcgccggggatgcagaagagctgattacacgggggctggctgtcgaactatag

SEQ ID NO: 196754 - DNA, 633 bp, Klebsiella oxytoca
atgcttgtcaattttgacccattaagagaactggagaatgaccggcgctctcacccatggggaaaaacttcttatgatgaaagagccggtttttactctaatttcattgaaaatccgcaactgatcactgaagtgcttgaagacttcaagccttacgaaagcaaacctgccgtccagacgttttattcatttctgaaatggataaatggtccagactcgagttttgaaacgaacgactgcgcattgagggatggtgttattatgaataccgatcctttatttaagttcactcataaaattgatggtcgggtggagttctttctaaggcaacatcagcacaactgcaataaaaatgttgccacatggttaatgaggatgtcatcgctgtatttgcaggtagaacggaccaatttcttcaattctattatcgatatccagctcgcacctacagatttcatcatgctgcctgctaaccagcgagatggatacagaatcaggctggttttcaatgcgtatggggatggagagctcgacacatgggaagcgctgaactgtacgtttgacagcatcttcaaagccaccaaaaggctgaaccaggctctcacggaagggaatagccctacattcccttaa

SEQ ID NO: 196755 - DNA, 1206 bp, Klebsiella oxytoca
atggcaaatatcagtgatgagctggcggccagtattcaaaagtgctttgagcgtacctacgtggatctggccaatcagcagcaatttttattcggctccggtaacgtgacggtaactaaaccggatggcacgaccgggactgtgaaatcgtgggcgcagttccaaagcgaatacgctacgcgacagacagctatcgactcatcaatcaccgcagccaataaaaaccaggcgaaggtgacggccgcaaatacttggacgcaggcgcaaacgtggaatgtcgcttcaacgttcaagagtaacctgactgtaagcggcaatctttcggtttccgggtcatttactgttaacggaaacctgaccggaaagcaattagctggcggacatattgagctaacggaggcgagcccttacatcgatttccattaccagaacaccacgacggactatacgcaccggattatcgccgaaaacggcgcgttgtctgtcacaccagggtggcgtgttcgtggtggcctggggatctacggcgtcgctacacaatatggggatctttacgggcaagccttcattgccaaattaaacactgaccctggaaacatagcaaatggcaccgtgttacaagcgccacgtttcacgtcaagatttaatacgcgcggtagtgatagcaacgttgatggcggacaggcggcgatgtggtttgaagagcaggtggggacaaaccataggctgatcctgtcggttgggggattctcccagccagttcagtattggcaatttctcgcagacgggaatatctacggcagccagcgcggcagtgtatcgttcctgggcacctctgacgcgcgcctgaaacacagcattgaaccgactaacggccatttatcagtcgatcgcattcgtcagcttgagctggtgacgttcgtctacaacgacgacgagcagaacaggacgcgtaggggaataatcgctcagcaggcgcagcaggtcgatcctcagtatgttaagcagattaatacatcgtatatgctaaacggcgagagagttgacgatgatcgcctgcaactcgataacaacgtgatcctgatggatacactggcggcggtaaaagtgctagttcagcaagttgaagctctggagaaaaaacttcaagttcaggaggaaggctcaagacatgatcgacgtagggggaagacgatctgtaaataa

SEQ ID NO: 196756 - DNA, 4434 bp, Klebsiella oxytoca
atgtcccttccgcaagacaccagtaatacaccagacatttcagatactcttaaaggtcaaaatgccgcccggcttatcattgataatgatcccgcagcagttcatatccatgatcccagaaccatcgagtttgcagatgccatgatcgacactgctgcaggcgaacttaaaaacgccgccggtatactcaaaaaaatggttaagggtgcggctgcaagcgcagaagatctagcggtggcaaccttccagggtatcatcgaaattattcagaacgcagatgatgtaagggcgactaaggtatggtttggactaagatcaactgaagcaggtaaacagctactgcttgtccacaatggcactccagtaacctgcctcaacgttcttgggatggttcttccttaccaaacttccaagaccaatagaatagaccaacgtggccgatttgggatcgggatgaaaactcttttgcgcattgccgactcaatttccgtacactctgcgccttaccatttttcatgtaatcaactagattttaaccgcttgccacctgaaccagctcttcctggtttttatgacccgggacaccatacgctgattgtcgcagatcttaattcagcctttgatgatgctgagctcattgaatggtttgattcatggcgccatgaaggattactgtttctaagttcggtaagccaattaaaatggtgtgaactggatggcagtataaaaagcgaacgctcgctggatttttcaagctggaaggatactggttatgagctgcaacacccgggaatcagaaagctgcaatatcgatacgctaaaagtaaagaagatgactggactgtctggcgagcatcggtagccgttcctgaacatttacacccagctcataaaacacgtagtgaagaaacagatatttcaatcgccatttcgtcacagccggttaactcaggaatcttcattggctttcgtaccgatattccctcaacgctccctttttcattagatgcacaattcgatcctagtacgtcacgtgagtccattatagaaaatgactggaatcgatggttaatagatcgaactgcagaagtcgttggaaatatagccgctgggatgctaattaccagccccaaaacggcatggaatctcattccactctctattgagggcgtagatccaggccgtagctcaattcttaacaagcgttttttagccgcgctaaaaacaaccagaacatggttatctcagcatgccctgatacaactacctttaggtaattatcctttttctgatctcagttacgaagaagacatactaactggttttctgaccgaagaggatgtcgaactcattcataaaggtttgcatgctttacatagaagtacccgggatagccaggatcgctggcgtagtgttatggatgaactcaatgtgtcaagacttgtcgatacaggtgaattacttgatgccatggaaaaccggatattcaattttaaacctgcggcatggtgggtcaatgcaggggcatgccttgttgagaatcatgaaaataccgaattatttgaacgtcccttcctgctttctcatcttaatgaaccagtttcctgcaaaccgaaagcgcaaacttcaatccctctggttttgaacagcccttctgatttttctttacactgggggctgatggaacgactgcattcagattatgctgataagagtactggcgaaccagtcattgcatggctggataaccacgccgcttttgtcagccaaaccgacacagctatcgaactgaatgcctttgcagagaaattcgaaaaaagcagcattgaaatatctgaagatgagctccgcttacttcgggacaaatttgattatctacgggacaccgaagcaaaggttatagggactaaaattggcactattctcaaactggatggatatgtctatgatggtgttcggatgctccgacaaaaagtgcgcctctcagaaagctatctgtgtaaaaccctagatggtgaaaactcaacgtggcctgatgccgccgggaaaacagatggtattcaatgggttggagccaaatatgaagccattttgaaaactaacatcaccaaaggagcaaaacgcaaacgcgaggatggaacacaatctcggggagccagaaagtttctattcctgcttggggttgaatcatcacctcgtatagagaaagtgaatgaaaacctctattggggaacagagctccgtaaaaaagaactcagggaacatggagctgagctggttgattacgactatgaatcaccagatcttgagcatgtcattcaaaatatcaaggaagccactaagcagcacgcgaaacagcgaagtcctgcgctggtccataccctttccaaaaactggcatcgcctgtatgcccatgtctcaatggtcccctcccttcacaaagcgattaagtacttttataaaaagggaaatgtcacagctgcgtggctgaatacactaagaagtgtcgattgggttgcggtcggtaaaggagaaactgttttttctaatattgctgtgttgaagaccccagagactcaaacgctttaccagaccttcatctgcggggtaaatgccaaggatattgatctcgattttttaaccgcattaggcatcattactgatgtcagaatcagtgacctactaactcaacttaaggccttacgtgacagcccgagaatggtagatcagactcaaacacagtcgatttaccgtgcaattgcaaaacgctgtccttcttccgagtcatatttttcatcgaaagtgggcgaactcactatccaggagctcaggagtcgctttctagagggaaaaggactcgtttatgtgccctcaaaaggatgggctaaaccaaacgaattacttagagggctagatattttccatggccagcgactttttgtgcctggaggctcgtcgtcaaattgccaaaacctttggcgtacactgaatatccccgaaccaggcattgatgactgtatccaatgctgtcgggaactgactcgtgaacagtatgattcaagaatagaatctcagcttatggatgtttatcgttacatggagaaattgctggagcatgcagagcgctaccataaagataagttacgggtactaccactgttctgctcgactggctgggtaactcaacgcccaattcactacgtggacaatccagagcttcggcagcaattaagtaagaggcttcctacccttcattgctggataccgccttgtgatatacaggatttccctagactggttaaagcacttagagtaaaagaactgaatcctgaacttcagattctcggtaataattcctacgctaaagagcgtggtgaccaggaaagattacgttttgggcatgctgttgaacacctgtcaaatgagcttgccagaagtacccctgaattacgtgaaaaactcgttataagctgggatactcttaggaatactcagctctatatttacgagcaccccatcacagtgcgtgcattgtcttcagagttccctgctggatttattgaagttgctcttaatgccgtgagtttgaaccaatccgaagtcttccatttttataatgacgcaatcggcaatcgtgattctggaggatggcttattgcttctctgtttcctgcaaaagaacgtcggcgaattgatggcgaatgggttcttgcttggcaaaaaagctgtcactcagcggcagaagcaatccgccttgcgagtgacgaggctcgtactgaagccatggaagatataatcaccaatattaacggttcggtaaaacacaaaattaacgttactccaccgaagagccgatcagttggagcgaagccaagaacactgaagccatcggtaggtgctatggtcggagcttcgctgcagaccaaggctgcaccctcaaaatctacagccacccgtggaggatcccgaggactgaaaaataccccgccagtgccccaacgaggtccaagttcatcagttcccgcaccggttgcctataccaacgcagatcttgagcagagagcttgggagctactttcccaagctctggacacaaccgacgatcagaggattattgatttcagacgcaatcatggtgtgggtgccgatgccgttattgactggaaacagtttatcgaaatgaaagccactggccgtggtccccagaaccagatagagatgtctaacaatgagtacttacgcgctaaggaacgtggaagcaactttattctggctcttgtgtcaggacttgaaacaggtcagtcggatgaaatcaggctcataattgatcctgttaattgtgccaacgtaatccctactaatggggtcagattaggtgggttacttgatgccccctccgttgttattgagtttgagagcagtaatgatgaatag

SEQ ID NO: 196757 - DNA, 693 bp, Klebsiella oxytoca
atggctattcggaaaagtatcccaaacgaaaccaaattgcggctgttttcggcgtccgcaggtcattgtcagaaaccagactgccttaagccgcttttcccagcagagataggcggtgataagcatattgctgaaatggcacatgtcattcctcatggtgatactgggccccgccacgaagagagacctgctgaggagtttgaagcagactcatttgaaaacctcatactgctatgtccaacttgccacaccattatcgataaagcgcctgagtccttttcaagaagcatgattttagagtggaagagcaaccatcttgcagccttagcgcacaagcaaggtaatattcgttatgaagatagaagacaagcgagagaggctgtcgtagcagctatggatgaaaataaggctatatggaaagagttcgctcctgttgaaggggcaaggtctgacttcaatcctgagtctgaaacggcccaaatatggtcgcaaaggatgaaaagtgtcattttacctaatcacttccgcattcaggcgatcataagcatgaatttatgccatctgacagccgaagagcgggaaacctttgcacaatacaaagaacatgttcgcgggctttctgagcgacatgtttgtggtgtttctggaagggccattcgttaccctcaagatatggatgggatatttgcatga

SEQ ID NO: 196758 - DNA, 645 bp, Klebsiella oxytoca
atgaactggcaagttaaatatgcacttgaaaatataaataaccactttaaaagaacaggttctgcagaacacgttgctgacgatgctatcagaatttctatccacgacagacctgacacattagttattatttccgcatcatatgagatcactcttgagatagctaagcagtatcatgaaaaattccctgatttggattttctatgtggttacaggaaagagtgtgtgtggacaggtgaggctatcaactacttaagtaacgcaaaagtaggatggggtaatgcaggtaccttatattctgccctttcagacaataatgttaatattgcttctcacaaagattattttttctcatatcggcttataactcaaatgggagttgtaaaaagtatagagagggaatttgatcgcgtattcaatattcatttagccaatggtcgcaagctgagggtgggaatgctacttgaatacgagcctacagctgatgccgtgcgatcattttgggaaaagtttggtccggttgatgtcatgtggaacattaatcctaacggagatcctactaataatgccgttgtagcagggcgtgaacttggttgcggaatcatgaaatggtcagaattcaaggaattaattcttcgtcgttga

SEQ ID NO: 196759 - DNA, 300 bp, Klebsiella oxytoca
atgtcggtaaacgatgtggcacgccaccttttaaaaacgtgcaattcattgaagttttttgaatgttttatgtttggttcgtcgcttttgggggttggcactgattacgatattttggttataggccctgcaggagaagcattaatccagctcaaagcagagctgaagattgcaggggctgaattgccgttggatattttatacatgcttccaaaagaggcggaagaaaccgattttattgtaaagcaaaaatgtgtatcccttagccatttagtgacactggattcactggttgtgtaa

SEQ ID NO: 196760 - DNA, 603 bp, Klebsiella oxytoca
atgaacacgtcaccgtggaacaaagaccgtatcatcggccaaaaaagaccacttcagatatctcatatctggggtatccgaatccgacttgaactggaaggtaaaacgcgcgatttagctctgttcaacatggccctggacagtaagcttcgaggctgtgatctggtcaaactcaaagtatctgatgttgcatatggtagctctgtttcaagcagagcaacggtgttgcaacagaaaaccggtagccctgtgcaatttgagataaccaaagggacaagagaagctgttgctgcattgatacagcttagcaatttgcacagtaaagactgcttgtttcggtctagggtcggaactaaccagcacatttcaacccggcaatacaaccgaatctttcatgggtgggtagaaaagcttggtctcgaagattcgctttacagcacacattccatgagaagaacaaaaccttacctgatctacaagaaaaccaagaatctccgggtgatccaacttctgttgggtcataagaaactggaaagcacagtccgttatctgggcattgaagtcgatgatgcgttagagatctctgaatcgattgaagtctaa

SEQ ID NO: 196761 - DNA, 1050 bp, Klebsiella oxytoca
atgcatgacgttctgacccatggcgactgccttgacgtactgcgcagtatgccgggcaactcggtggacagcatcgtgaccgacccgccctatggtattaaattcatgggtaaggcatgggactatgatgttccttcacaagccatctgggaagaatgtctgcgcttacttaaacccggtggtcatctgctgtccttcgcgggatcccgtactcaacacaggatggcagcgcgtattgaggatgcaggatttgaaatacgtgacatgatcgtatttctctacgagaccagcactgctgctcaggtcctcattgaaagtttatcgtcggatcagctcaaattgctggatgcggcattcggacatgacggaatgctgggatgggtatacggctcgggttttcctaaatctcataacgcgttgaaaccggctctggagcctattacccttgcccgtaagccattcaggggatccatggcatcgaacgttctcgtttatggtaccggcgttctgaatgtcagagaatgcaggatccctctggcagagggggaatccccctatgattatccaaatggaccgggaggttccgatcctaaccacatgtggcgaggcagaaataaaggtgacgggggtatcgccaggcaaggaaaccccgatggccgatggcctgccaatcttatccatgatggcagtgatgaagtacttgctatgttcccggatactcctcaacaggcagaaattagcagcgccagtcggtttttttattgtgcgaaagccagcaaaaaagatcgtggtgagcgtaacaatcatatgtgtgtaaagcccaccgaactgatgcgttacctctgccgcctggttacccctccaggcggcactgtacttgatccctttatggggagtggaagcaccggcaaagctgcggcgatggaaggtttctgtttcatcggtattgagcgggaagcggattatgtggaaattgctcgcgggcgtattgcggcagcacggagtaccgcagctcgttctggtgatgcaggaatacacattgacaattga

SEQ ID NO: 196762 - DNA, 804 bp, Klebsiella oxytoca
atgcttattcataacgttgctgaaagaaatgaaaccgcaaaaaagagaatgcgggcattgttgtattttctcaaagaagaaacattttctgatttccggaccttaaaaaaagttgtcggctataaagggaaacataaccatgcgatgtataacctgcttaataaagcggttgcgatgggcttcttgaataaacataaatacccggtattgaccggaaaaaaatcattgtgggggatcaccatgcagggactggcaatggtggttagcgctaatgacaaggttttccctgcctattttgagccgggcaaactcagacactggacgctggagcatcgcctgttaaaccagcgggtcaggatcgcactagaggaaaaaggcggtacgggctggcttaacggcgatcggggagagtttatagcgcgatatccgggtgtccgacaccgaccagacggcattattaccttaagcagcggcgccatcgttgcggtggaaacagagcgaacgatgaaaacacgtgcccgttacctcagcatcattaacagtcatctggccgccagcgacgccgggcgctggcactatgcgatgtatgtgatgccggatgataaaaccaaggagtcgctgatcaggctgtttgccagcatcaggacggtgatgagaaacattgtgcccgttccgtttgatgcgaaaaaccgcgagatgtttctgttccgcacaattgatgaactggaagagagtatcaatgataaacaggaagccccttcttcatcagctcatggcgatgacgggagggaataccatgcatga

SEQ ID NO: 196763 - DNA, 1737 bp, Klebsiella oxytoca
atgggaactcatctgatgcaaaggctgaatgccttttcggatgccttttctttttttctgctgtggctgcaacacaacccggtaatattatccatatttgccgggctgacgctgccattcatctttcatctgccacgtgaagaaagaaaaaacgcccccttctggttaaaatcggtggcgggtatatccaccttctttttcatatttggcaccctgtcaccgctgaccattcaggggctgagttttttctttaaagtactcgacaataacattctgctcagattatcactctggatactgactgtcggatttacccttgctggtctggcttttcatattactgcccgaaggcttctggtcggagaagtcgacagtctgaaacatcggatgattaaaaaaagcaagctggaaagaaatgtcagaacggatgttcgtgaagtcagagacatgttacctgacagcattgcatataatccgctggattatattgacctcaataacggtatctttatcggactggataaagataatcagccgcaatatatcacccccgaagaatttcagacccaacatgccgaccttatcggcaccacaggctccggtaaaggggtgagcgtctgtgttctgctttatcaggcaatacttgcaggtgaaggcgtgtttgtcgaagatcccaaaaatgatgagtgggcaccacatgttatgcgggaagcctgtcagaaagctggaaaaaaatttgttcttattaacctgaacgaccttaatttccagcttgatttactggctgatatttctcatgaacaactggaagaactgtttaatgccggtttcagcctgggtaaaaaaggcgaaggtgctgacttttatcgtattgccgatcgccgtgcagcgagaaacacggctgctatttatgaaaatggcatgacattacgtgatttattcaacactgactttgtgaaatctctcagtgaagatgtgcctgctttttatggcgagcttgaggaaatcgctttagtgaattccattaatgcccgcaacggattttccttaaagaccatttttgatgaaggcggatgctgctacatcatcggctcgatgcgtaaccagaaaatcatatcggctcagcgaatgattttaactcgcctgattcagatagccgaaacgcgtgatcggataaaaggcaaacctcgtcctgtcgctattttccttgatgaactcaagtatcacctgtcccgccctgcgcttgaaggacttggcgcagcgagggataaaggtgtgcatttcatcatggctcaccagtcggtaaaagatttatatgactgtccggcagatctggagggtgatgccgttgccggttcggtgattgagaattgcaagtttatgctggtttatcgccttcgcgatccggatactgccgactgggtcgccagaatgacaggctctatactggttgacgatgaaatgaggaaagttaaaacggatatttccctgacggagaaaatggaaacagacaggatgatccgccaggctgaacgatattatatagacagcaatatgttgcttaacctcccccaatttgttggttttgtttttacccagaatgacctagcgaaggcaaccaaactatcccacatacctgtgaaaaagaaatatatcgacctgttttcatttgagcataaaaacccttcgcacaccgaaaaagaaagccagaaccacaaaccctccattaacctgtga

SEQ ID NO: 196764 - DNA, 588 bp, Klebsiella oxytoca
atgattccattaattaattacaccatcttaactgatgcgttgcacgctctgaaagttggggatattcgtcactgcgagtccctcggattcactttcgacgaaatgaatgctcttaatcagttatcactcgatgaactgtttgctgtcagccgggcgacggctccctttgtttcggtcagtgtccgccatgatgtcctgcatcatttactggcgcaggcccgacaggaataccgacaacagcagcagattaaccgggctatccggctgggcggttctatcgcgttgctcaaccactactttggcttgacgtctaatgatgtctgccttcgccgacggctgcttggtgtcagcgtgccatatggacgtacacctgagccggatgaagagacagatgccgagatctggcggcaatggcagaagtgccgggtggaaagccttgaatcccccgacgcgctgatggccatgatgcaggttactgaactcctgctaccaagttccctgggactatcactcaccatggtatggagacgtatcacgctttgtgaaaaggaagttgccgctaacaggagggcaccacatgccggatga

SEQ ID NO: 196765 - DNA, 723 bp, Klebsiella oxytoca
atgattgcactcttacttctcttcttcgtcgctctcggtgccggagtactcagcggtgtcgtcggcactggctcgtcgttaatcatgctgcccgtcctcgtcgccacgtacgggccacggattgctgtgcctgttatggcgatcgcctcccttttcggcaacatcggacgggtgattgtctggtggcatgagattcgttggcgaccggtgtttgcctattcgttggcgggagttcctgcggctgttctcggggcgcacacgttacttacgatttctcctggcacagtggaggtattcctggcagctttcttccttgcgatgatcccgctgcgccgtctcatcagacgatcgaacctccacttgaatctctggcacatgagttttgccggggcgattgtcgggtttctgaccggattcgtgctgtccaccgggccgctcagcgtgccggtatttaccgggtacggaatgagtggaggcgtatttttgggatcagaggcggcaagcgcaatcctgctctacgctggcaagctagctacgttcggtatatcgggcgcactcgcgcagcctgtcctcacacatggacttgccatcggcatcgcattgttcgtcggttcgatgattgcgaaacgtctcgtccagaaactccagacgcatacgttcgagcttctcattgataccgttctcgtcgctggggcagtagggatgatccttgctctcaaatga

SEQ ID NO: 196766 - DNA, 330 bp, Klebsiella oxytoca
atgcaaaaccgtggcgttgaagatatcctgatcgattgcgtggacggactgaccggcttccctgaggcgattaacagcatttatccacagactgaagtgcaactgtgcgttattcatcagatacgcaactcgatcaaagacgtggcatcgaagtatcacaaagcgtttatggccgatctgaagccagtgtaccgggctgtgtcaaagaggccgcagagacggcacttgatcaactggagtcagcagtatccggtggtgctcctgtcgtggcgtcgtaaatgggaaaaactgtcagcgtacctgccttacccaagcatcatatccatctga

SEQ ID NO: 196767 - DNA, 531 bp, Klebsiella oxytoca
atgacggccttcgaggcagagcttgcccttgtgacccgcatgatgaatcgtcaggttaggcaacatttccgggagcaggcccgcctgctgaccagcgtcaatggcgtggcggaaatcactgccgccaccctgctggccgaaccgccggagctgggcaccctgcccagcagggaaatcagcgcgcttgtcggtgtcgcccccgtttacagggactcaggaaaaatgcggggaagacgaactatttttggcggaagggcgggcgtagggtgcacgctttacatggcggtgataaccgccattcagtttaacccggcaatcaggggcttttatgtcaggttagttgaagccggaaaggcgaaaaaggtggcgctggttgcctgcatgcttaaactcctgatcgtcctgaacgccatggtcaaaagggggcacactgtgaggatgatttcatgccactccgacaatttagtgactaatgaaactcagttcagctctgagactgatgtcattagagctttttttatgccatcataa

SEQ ID NO: 196768 - DNA, 219 bp, Klebsiella oxytoca
atgccgtttgcgttgttagcgttggctattagcgcttttgcgattggtacaacacagtttattactacaggattactgcaagatattgcaaatgatctccatgtgtctattccgcaagccggatatctgacctctggaagaggctgggcgtatattcattcgcaacgagcgttcgacgtctctattaggtcgaatggcaagcgcagaggaagtagctaa

SEQ ID NO: 196769 - DNA, 1269 bp, Klebsiella oxytoca
atgtcccttaccgatgcgaaaatccgcaccctcaaaccttctgataaaccctttaaagtctccgattctcacggtctgtatcttcttgtcaaaccgggcggctcacgtcactggtatctcaagtaccgtattaatggtaaagaatctcgcctcggtttaggtgcttatcctaatgtttctctgaccgacgcccggcaacagcgtgacgacatccgtaagctacttgcacagaagataaacccggcacaacagcgtctcactgaaaaggcagcccggtcaccggaaaaagccttcaaagccgtagctctgaactggcataaaagcaataaaacctggtcggaagatcacgccaatcgcgtgcttggccgtatgaacaaccacattttcccgataattggtcatctgacggtaacagaactgaaagttcagcacttcatcaatctgctgaaaggcgttgagaataaaggtttgctggaaatagcttctcgtacccgacaatacataagcagcattatgcggcacgccttacatcaggggttgattgaacacaacccggctgcagacttgaaaggcgtcaccgttccgcccatcaaacgtcactatcctgccctgcccctggaacgtctgccggaactgctgaaacgcattgacgactacaaacagggacgggagttaactcagttggcaatcatgctatctcttcatgtgtttatccgttccagtgaactgcgttttgcccgttggccggagattaatttcagaaacaggctctggactatccccgctacccgagaaacaattcccaatgttcgcaactctgggcgaggtgcaaaaatgcgtgcgcagcatattgtgccactttcccaacaggccatcgacattctcaaacagatcagagaaatctctggtgatcaggtactgatattccccagcattcgtgatccgtataaaccaatgagtgaaaatacgattaataaggctttacggctaatggattatgatactaaagaggatgtctgcggccacggattccgggcaatggcctgtagcgccctgattgagtccggcctgtggtcagaggatgccattgaaaggcagatgagtcatcaggagcgtaacagcgtgcgagcagcgtacatacataaagcggagcacctggaagcgcgtaaagcaatgatgcaatggtggtcagattatatagatgaatgcagggaaaaatatgttcccccctataattggagcagtcagaaaaataatcatgctgcctaa

SEQ ID NO: 196770 - DNA, 201 bp, Klebsiella oxytoca
atggatgcacatttaatcagagtggtacctaccatgcaagagaaaaagaaacctaatttcgatcgaagcaaaagcaccacaaagaacatccgttttgaagatgaacttttggaacagattgagaaaactgctggaaaggggaattttagtaagtgggtgaaagaggcttgtaagatgaggttagaacgtaaaagtaattaa

SEQ ID NO: 196771 - DNA, 621 bp, Klebsiella oxytoca
atggatattttgataaacacaatatttactctatcaggttttttattgggaattatatactcatggtggagtaattgtagagctgagaaaaaacataaattaaatgttattcgccacttatcaacgcagtttgagaaaagtgagttgattttaaatagtatacagagtgagttttatttttgggttgagatacttaagaatggtggtttgagtaaaggagtaaaaagtccggggcttcagggtatagataatataactgtatttaataacgactttataaaatctgaaagattatttaactcagaagaaaaaagaataatctcagactatatatcgattaacaatgtccttgctcatcattatttgaggttaaatgaatatattcatgatagtaactttgttaaagttatttttcaattacaggttttattagtacaatggtttggatatgttgaaacaatgcatgtgattagtaggaatatttcagctaaaactaaagattatagttttaaacctgctggagaaggaagtaaatattatgcgggattgtatggtataaaatataaagagattaataacattgttaatgatatctataatgggaaattaccacagtattaa

SEQ ID NO: 196772 - DNA, 642 bp, Klebsiella oxytoca
ttgaggcgggagggacacccgtggaatcacaaaaggatccaccgtgtttactgtctgctgaaactgaattttcgccgtaagggcaaacagcggttgccggtgcgtaatccctctccactggccacgccggaagcgctaaaccagagctggtctgtcgactttatgcatgatgccctggtctgtggccgtcgttttcgcacgttcaatgtcgttgatgactttaaccgtgaggcgttgtcgattgaaatcgatctgaatctgccagctctgcgcgtggtccgtgtcctcgacaggatcgcggcaaatcgcggctatccggtcatgttacgcatggataatggcccgaaatttatctcactggcactggctgaatgggcagagaaacatgcagtaaaactggagtttatccagccgggtaagccgacacagaacgcttttattgagcgcttgaaccgaacataccgtacagaaatactcgatttttatctgttcagaacgctgaacgaagtccgggaaatcacggagaaatggttatcagaatataactgtgaacgcccgcatgagtcactgaacaatatgacaccggaggaataccgacagcaccattatttggccgggatctcaaaaaatgcatggaactaa

SEQ ID NO: 196773 - DNA, 1509 bp, Klebsiella oxytoca
atgcttactaaagctgatgcttatgattttaatcacaaattatttatttgggcgctttcggttattcagccagcctcaccctatgaagtcatttcatatctttccattattctaaatgataatggagtactccctgcgaaagataaaatcaatgagtactttaaggctctagccagttcagaatacattaatcaggtttcgaagaaaaacaatctatattcaataagcctgaacgggaatgaacagttaagtccagaactgaagaagttgagagataaattaagaatatatcttcttgacaaaaccagagttgttagtaaagtaaaagtgctggcctcaactgagtcaaagaaaatgggcggtgcttcgccgtcttcacagttaaggtttgttttaaaagatgctccgcacccaagtgttccttgggcgctcggggccctacccaatcacccaaggaacacttgggtgcggatcgctgagcaaattaattttggttcgatgcttagtgaggccagcaacactgaaactcatgtaaaccaaacacaacatactattttccctctcaattatggttcatataactctatagattataatttaattggcaatactggtccgacaatcctagcgtcacttattggagtcagtccacacttgatagcaatcatgtcgatgaatccagacaaatactataggtcatttaaacttaataaaaaatcaggtgggcacagagagattcttgcacctagaaaattcatgaaagtaattcaatattggattactgattactttctttttcgccttaaaatacatgcttcctgctattcgtacagaaagggagtcagcataaaggataatgcaataaatcatttaaacaatgaattcattgctaatatagatgtcatcgacttttttggcaccataaacaaagatatggtacaaaaatgtcttatcaaaaataaaatagacataaagttagctacggccataactgagatagttacattcaagggttttttaccacaaggcgcacccagcagccctcaaatctccaatgctattctatttgattttgacaataaaatatccgaagcgtgctacgtaatcggatgtgtttacacgcgttatgctgatgatataaccattagcggctcaaacagaaataatgtaataaagatggtaaagtcggccatgcaatggttaaacgaatctggattttctgtcaatgataagaagacaagaatatcttcgaaaaatagcagacaaatagtgacagggatattagtcaatgacgtcattagaccgaccagaaagtacagaaaaagagttagagctgcatttgatcacgcacttaaagacaacgatcatagcaaagagactatttataaactcagtggccaccttaattatctaaagtcgtttcaacaatacggatatgaagtaaacaccattcaatatgaattaattttaaaatatctaaagcgaaagaacatattaattaaaatctaa

SEQ ID NO: 196774 - DNA, 645 bp, Klebsiella oxytoca
atgcctggcaataagggggagttaataaatattaggaataaaggcgatgggaatacatttaatataatccaaattaatggaggaaatgctcctgacatatctaagcaattgggttttttaggtttagatataattgacaacactaaaaagtctcttgttagcgagttttctagtgggaataacaatgttttactttgctaccccaataaagaagataaaatactcgagccaatcatagaaaaaataaaagccgggctttcgaatatcggcgcaaatatctttgagggaagtggtaaaacacaacttccagatgtacaaggttatccacacattgctgaaatagattttattaaaaatttgaaatgtgacagtataataatatttgttttagatgaactaacgctttctcaattaaccctattaagctattacaaaattgaatcaaacattcagcatgttgatataattgccatccctagtgatagcatttttaattacgataagtttttatcgaatggattaatacaatactgtgatgataacaattgcaaagtaattaagttatccactcttgatgatgcagaagttgaacgagtaatagcaagagtaaaaaacagaaaaatgatacaggcaaggagggcataa

SEQ ID NO: 196775 - DNA, 168 bp, Klebsiella oxytoca
atggattacatcattgaaaatatgcagtggattttttctgggatcggtgtatttgtgttcactattattttttattttttatttcagagagaacgtaaaaaaagcggcaaatctattaaaattaaaaacaagggttctaaaaacaatttcaatatagagcagaaataa

SEQ ID NO: 196776 - DNA, 378 bp, Klebsiella oxytoca
atgcgcagaccgcatgtcgtacctttatctacgcacgttattgaactctttaagcaactcaaacctatcaccggccattatccctatatttttatcggacggaacaaccgtagcaaaccaatctcgaaggaaagtgtgttacaagtgattgagttacttggctacaaagggtgtgctacaggtcacggatttcgtcatacaatgtcgacaatccttcatgaacaaggatttgatagtacatggattgagatgcagctagcgcacatagataagaatagaatccgcggcacttataatcatgcgttatatctcaaagacagaagaatgatgttagaatggtatgcaaataaaattttaacgatagtggaagagaattga

SEQ ID NO: 196777 - DNA, 897 bp, Klebsiella oxytoca
atgctctgtataactctgcgggtagtgcgcgcgttcgtattgttgttgttgctgctgcctgccagcgcagcattctccgcaaacaacccgattattattaaagatgcttctcaactccccgctggcgctatcccggcgtatgaacatatcctctcttttgattcccgggcgcgctttagcccgaacggcagcatggcgattgaggagaatattaaggtacttgccctggggaaggagattcggcgagggattttgcgcacgcttcccctcacgtggaaccgccaggatggcaaaatcttccgtgttgactatacgatcgaatcggtgtcgcgcgatggcatctctgagccatttagccttgatgaggcagcaaaaagcctgacggtacgtatcggcagcggcgaaaagatattaaaaccagggatctatcactatcggattcgctatcaaatcagcaaccatttcagccgatttccccagtgggatgaactgtactggaacgtgacgggcaatggctgggcctggccaattagcaaggccagctttagcctgacgctaccggatagcgccgcaaatctcaacgctgacgccaaagatgccaggctgcgctcaattgatgtttataccgggatcgctggcgcgaaagagcacaacgcaacgattctgcccgacggtagcgtgcgcactctgcgtccgctggcaaagggggcggggctgacggttgtttatacctggccgcgggagatacttgcccgcgctccggcgccggaggccgcttcgccgctggtgcatttacttttccccaacctgaaatcctgggtgatatggctgccgctgctgttcatgctcgtttattatctgctctggtggcggaaaaacgtcacccaggcgggttga

SEQ ID NO: 196778 - DNA, 891 bp, Klebsiella oxytoca
atgaaaaaactacctcttccagcgagaacttatagcgaaatgcttaataagtgctcggaaggtatgaagcagataaatgttagaaataacttcattgctcacttccccacttttttgcataaagaacagcaatatagggcattaagctcaacaggtcagttatttacctacgctaggacacaccctcttgcacctacaaccttggtagttggtaacctaacaaaggttaaattagaaaacctttatgaaaataatctccgagataaaaacaaacccgctagagaatattacgatgacatgctagtttcatcaggtgaaaaatgcccattttgtggtgatataggacagacaaaaaatatcgatcattttcttcctgttgcacattatcctgagttttcggtgatgcctattaatctagttccgtcgtgccgcgactgcaatatgggagagaaaggtcaagttttcgcagtggatgaggaacaccaggcgattcatccctatatcgacaaggatattttctttcgtgagcaatgggtatatgcaaatttcgtatccggaaccccgggagctatcagtttttatgttgaatgcccggcgacctggcggcaggaagacaaacacagagctattcatcatttcacgcttttaaatattgctaacagatatcgcttggaggcaggaaaacacttgagtgaagtgattactcaaagaaactctttcgcaaaagttataagacaatttagtccaatcgccacctctcagcagctacggtcggcatttattgaagcaaatctgaaacctattatagatttgaatgatttccccaattattggaaaagagttatgtatcagtgcctggcaaactcagcagagtttttcagggggatctag

SEQ ID NO: 196779 - DNA, 1578 bp, Klebsiella oxytoca
atgttagagtttagggttattgaaagaggtgggtatattcctgcagtggaaaaaaataaggccttcctacgggcagatggctggaatgattattcatttgttacaatgttttatcttactgtctttgatgagcatggtgaaaaatgcgatatcggaaatgttaaaattggttttgtcggtcaaaaagaagaagtaagtacttattcattaatagataaaaaattcagtcaactccctgaaatgtttttttccttaggtgaaagtattgactattatgttaatctcagcaagttaagcaatgattttaaaaataaccttcttaaagctatgcaggatttagtagtaaggccaaatcgattagtcgacattgaaaatgaaagtgtccttaacacctcattacttagaggggtcactctttcagaaattcatgggcagttcgcacgcgtgttaaatggtttgccggaattgtcagatttccacttttcatttaacagaaaaggtgcttccggattcagtgatttaactataccttttgaagtggcggttaattcaatgcccagcacgaacattcatgcttttatcgggcggaatgggtgtggcaaaacaacaattttgaatgggatgattggtgcaatcaccaatccagaaagtaatgagtattttttctctgaaaataatagatttatcgagtcacgaatcccaaaaggatattttcgatcgcttatttcagtttcgtttagcgcatttgatccttttactcctcctaaagaacaaccagaccctgcaaaaggtacacaatatttttatattggacttaagaatgctgccagtaatagtttaaaatcactagacgatcttcgtctggaattcgtttcagcatttattggttgcatgagagcagatagaaagagacaactctggcttgaagccattaaaaaactaagtagtgatgaaaacttttccaatatggaactcatcagtctcatttctaaatatgaagaattaagacgtaatgaatcacagattcaagtagacaataataaattcactaaattgctttatgataatattcagaagtatctgctacgaatgagctctgggcatgcaattgttttatttactatcacaagattagtagatgtcgttggtgaaaaatcattggttttattcgatgaaccagaggttcatttgcatccacctttgctctctgcttttttacgaacattaagcgacttactcgatgcacgcaatggtgtagcaataattgcaactcattccccagtagtactgcaagaggttccaaaatcctgcgtgtggaaagttctgcggtcaagagaagcaatgaatattatccgtccggatattgaaactttcggtgagaacttaggtgttttaactcgtgaggtgtttttacttgaagtgacaaattcaggataccaccatttattatcacagtccgttgattcagggctttcttatgaagcgattctaaaaaattataatgaacagataggattagaaggacgaactgttttaaaagcgatgataatgaatagggatgaaggtaaagtacaatga

SEQ ID NO: 196780 - DNA, 2673 bp, Klebsiella oxytoca
atggctgttaatcaggcgaaaatttttgaatatctcgagcaactgattgaaaaaaatgataaaaatgaatttatatacggctttttaactgcttttgagttccctaaatctaccctgagtcagattcggcaaggtactgcgcgtaatgttgcgaaagagccaggacacgttgcattaaaaaataaactctactaccaaccagtagcggataatgatgatcttgaatctgcttttgaccaacgtattgccgatgcagcggttgcaaaaaataagatccgctttgttctaataacaaattttgttcgttttttagcctgggacacactgacacaggaacgcctcgatattgagtttgaagagttgccacgtaactacggttttttcttaccgctggtagggttggaaaaggctattctcaatagtgaaaacccggccgatgtgaaagccgctgagaagatgggaaagctgtttgatcttatcaaggagcgtaatgatttaagcaaagcagaagatattcacgcgcttaatgttttcctcactcgtttgttgttttgcttttttgccgaagacacgggcatctttgaaaaaggtcagtttacttccgcagttaagagctacaccgccgaagatggcagtgatttagatcagtttctgacagacctgtttgccgtgatgaacagcaaaccgaatagcaaattacgcctgtcagttccgattcatttagccgcattcccttatgttaatggtggtttattcgccagtgatgagcctgttccagagttggggttgaagggcagacgtatcttacttgaatgcagtgcaatggactggagtgagattaaccctgacattttcggcagcatgttccaagctgtgattgatgtggagcagcgtagccgcttaggacagcattacacttcatacagcaatatcatgaaggttatacaaccattatttctggagccattgcgttcagagctggaaaaacaacgcacaaacacgaatggtctcaaacggttgcttctccgtctggggaaaatgaaagtttttgatcctgcgtgtggttcagggaacttcttgattgtcgcctataaagaactgcgtcttttggagatggatgttattcaagcacttttagaaagtgatccgcaatcgatctttatgagtagtatccatcttgatcagttctatggtattgaaattgatgattttgcctgtgagatagcacgtctatctctctggcttgcggagcatcagttaaataaacaatgggaagaacacattggttcagcaccaccagcattaccattgcgttcatcaggtaaaatttggagcggtaacagtctgcaaaaagactggcaggaagtatgtccaaaaaaggttgatgatgaagtttatgtgattggtaatcctccctttttagggacggttggtcgttcggagctacagcgttctgatatgcagaaagtgtttagcaacttcaaaacaataggtggtttggattttgttgcatgttggttctggaagggtgcgcaatatatccaaaatagccacgctgaactagctttagtggccactaattctctttgtcaaggggagcaagttgcaactctatggccaccgattttcgcgctagggttacatattcatattgcgtatcagacatttacttgggcgaacaatgcacgtgataaggccgcagtgcacgtagttgttattggtttatcaggaaaaagtaaaacgcgccaactttaccaattagtggatgctaattggcacagtaaactggtcggtaatataagcccttatctggttgaaggaagcaatatcgttgtggagccgaaatccaaaccaataataaaagatgttcctcaattattatttggaaataaacctactgacggtggtcatttgctgatgaatagtcacgaacgagataagcttcttgaagtggagccacaagctgcccgttggataaagaaggttctgggagctgatgaatttctaaatgcgaaagagcgttggtgcttatggctagcagacataacggatgctgagcttagagctatgccgcacgttttcaaccgggttcaaaaggtggctgaagcccgacggaaaagccctgataaaggagctcaaaaaatggctgagcgtcctcatcaattcagggatttaaacaatcctgatgattatatattgattccaagtgtttcatcggagagaagaacatatatacctataggtttttatgatgcaaatgtgatttcaactaatgcaaactacattattcctaatggtacattgtacgaattttccatcctcacctctttaatacacaacgactggatgcggttagtcgccgggcgtctaaaaagtgactaccgctactcagcgaaagtggtttacaactcgttcccatggcctgatgtaactgatgcgcagcgtaaatctcttatcgatctagccaaatcggtgttactaatacgtgagaattatccagaaagcactctggctgagttatatgatccgcttaaaatgccagctgatcttttagaagcccatcaggcactggataagttcgttgatcgtctctatcgtgacaaaccattcaaggacgccactgagcgtttaagctgcttgctacagcgttatgaatcattgactaaagtataa

SEQ ID NO: 196781 - DNA, 444 bp, Klebsiella oxytoca
gtggataacaacagggcgaataaaacaaatggcctctggcttcagggggcgggcgatttgtccgctgacttctatcactacgagcgtatcgggcagcatcacttcctcggtctgcatgtggccaatggtggcgctcagggctggtacgaattccgcaacgacggccatgcctacaccaacggagcctggaacagcagctccgatgcccgcatgaaaacaaatgttgagaaaatcgacaatgcgctgtacaaactcggcagcatcagcggttacacctacctcaaacagggcgtaccggaagccggggtgattgcccaggaaatcgagacagtactgcccctgtcggtcacgcagaccgagctgacgctcaatgaggcagcgtcctacccgatgcacgcagtatcaatatcaacggcgtggtggccctgctggttgaagcgctga

SEQ ID NO: 196782 - DNA, 786 bp, Klebsiella oxytoca
atgataaaaaaaactaccgttaataaacttgtaacctttaactccaaacttgatacgtctcaaaaaataataaggaatcttattgctgcagtcgtcatttgttttcttctaaatttccttgggttagacggtttgtggaaggggttctttatactgactttgatttactggagcttttcggtattccatagtctaattattatttataaaaaagcatatgaaacaacattgggtaaatggatcctaatattaggaggcacgctatgtgtgaatttcgccctatgtctttcaggtgtggtgatcaatgatataacttcagtttcaccaacaaacttccctcactctttgatatttattgcggcttcgatgattcctttgatcgtgcctctttgtatgatcttactgttcgcggttattttggtgtcagtacctatatggtgctggttttttgtgtatgacgataagcttaagaaatttttaatgccaggatatgaacctaatcagcagaggtttttgcataaaagcactttaataatccaagttatatctttaataatttatcgtgcttttatttttcaattttcacgactcataggtaatgattatatatcatatatcaataataaatctcaagggatgatttatacactcgagatgtttgataaaagtccatgtgccaacattaagaatgctaaggtttcatttttaggtgatggcaatgttctggttgcgtctaggaataatgataaatactccttcaaagtcatgaagtgtgagataaaatag

SEQ ID NO: 196783 - DNA, 516 bp, Klebsiella oxytoca
gtgagtctacttgaattgattgaatcaaagagggcacatatcgccagaaattcttcagaaaatggaatattaggggaacgcagcctacttgattcgcaagctttatggataaaaagacctaaagggaaagacatgaaaaatctgctagctgcgctgaagaaatttgaagatattgaaataaaggcatcaagctttgattttatttctatccctgaaaatgtaagtgttgactttagtgacgttagctccttggctggaatattaaaatcattaacatttattgaacttaaaacctgcaatcaaaaaagggtcaccactcctgacttcaggaatttcttctttgccattactgagaacgaaataatagcatcagaacttctcggcgataggcacatagttgtactacacaacaaaataacgggagataaactggtgacaacaataccagaaattataaatagggccaattctaagaactggcagctgtctgtaagccttggggcgcgagaagtttag

SEQ ID NO: 196784 - DNA, 243 bp, Klebsiella oxytoca
atggtaactagggaaagtatgaaaaaatggatcatcgagtgtcttcaggaacggggtggtagcgcttggccacgtgaagtctcaaagtatgtatgggacagctacgaggctgagcttagggattccggcgatatgttgtatacgtggcaatatgacattcgttgggccgctcaacaattgagaaacgaaggtactctaaaaccagtaaatagacgcagagatttgccatgggaactagcatag

SEQ ID NO: 196785 - DNA, 1368 bp, Klebsiella oxytoca
atggaaccaacattgtcattaaccgtgatgttctgtgctgcagtgggtgcttcagtatcagaatcgctgtcggaatcgctgtcagagtccgagtcactgtcagagtccgagtcactgtcggaatcagaatcactgtcgctatccgagtcgctgtcggagtctgaatcactgtccgaatccgagtcgctgtcggagtccgagtcgctgtcggagtccgaatcgctgtcagagtccgagtcgctgtcagagtccgaatcgctgtcggagtcggaatcgctgtccgaatccgagtcgctgtcagaatcggaatcgctgtcagaatcggaatcgctgtcagagtcagaatcgctgtcggaatccgagtcactgtcagagtcagaatcactgtccgaatccgagtcgctgtcagagtccgaatcactgtcagagtccgagtcgctgtcagaatcggaatcgctgtcgctatccgagtcactgtcagaatccgagtcactgtcagaatccgagtcgctgtcagagtccgagtcgctgtcagaatccgaatcgctgtcagaatccgaatcgctgtcagagtccgagtcgctgtcagaatccgaatcgctgtcagaatccgaatcgctgtcggagtcggaatcactgtcagagtccgagtcactgtcagaatcggagtcactgtcagaatcggagtcgctgtcggagtccgagtcgctgtcagagtcggaatcgctgtcagaatcggagtcactgtcggaatccgagtcgctgtcggagtcggaatcgctgtccgaatccgagtcgctgtccgaatccgaatcgctgtcggaatcggagtcgctgtcagaatcggagtccgagtcactgtcagagtcggaatcgctgtcgctatccgagtcactgtcagaatccgagtcgctgtcagagtccgagtcgctgtcagaatccgaatcgctgtcagaatccgaatcgctgtcggagtcggaatcactgtcagagtccgagtcactgtcagaatcggagtcactgtcagaatcggagtcgctgtcggagtccgagtcgctgtcagaatccgagtcgctgtcagaatccgagtcgctgtcagaatccgagtcgctgtcagagtccgagtcactgtcagaatccgaatcgctgtcggaatccgaatcgctgtcggagtccgcatcgctgtctgaatcggcatcgctgtcagagtccgagtcactgtcggaatctgaatcgctgtcgctatccgagtcgctgtcagcgtcagaatcgctgtccgcatccgaatcgccgtcagcatccgagtcactgtcggagtccgagtcactgtccgcatctgagtcagtttctgaaatcgaagagtggtga

SEQ ID NO: 196786 - DNA, 1236 bp, Klebsiella oxytoca
atgaatagcacgttaaaagaacttgagagaaattgcgcgccaatagattttattgacccattggctcgattggtcttagatgatttagctatgtgggcaaatgataatatatactcaaaacaatctgggtgtttaacttatgaattgcctcttgatggaaacatcaatgcagcgtgtacaagttatcatgactcacgctatcgaacccatattaaaataaacctggggatggttcaggaaatctacatccagtcatttacctatccaggttacattaaatatctagaaagtggaaattggcatttcaacgctcttgatgaaccctttagtgatgctgaatttttattcgaaggtggcatccctccaagagttaacgcgtctgacacggtcactcatatggtagagctatacaaaagcattcctaacaacagcaataccatgtggactgatgaagaattaatttgccgttttgccatgttcgaattaatgattgcgtggatattttttcatgaacttgcgcatcacgtacaagggcactacaagatcaaaggtgaaataaaagaatcggctacttattacgaattagattactcaagcaacattaataattccaatcctgaggtaactcccagcgtcatccaaaagaacattgaccagcatgcccgagagatacttgcagacctcgaaggtatgtatttaacactcagaatgatggtgaggaatgacacattaacaccacctaacacgtttttgcttttatatgtccaaacctcaatgtttaatgtattctataaattatctgagggaaagtatgcggagttagatagcgttaaagtttctcacccccaccctgtaattagaaacaaatttgtacacgccctgtatgtttctgtgatgaaatgggaattggataatgatatataccaagattatcgtcactctgttagccgaggtcttgaatattatactgtaaagtcatcattgttagctggaatgatatgggcaatgagacaacctgattacagtccagatgtaatgccccaatttcttaaatttagtgatgagaccgagcatgccacagattataactatctcagggaattgaccttaagcgctgaaaggcaatcatctatcatatcactcatgcatatcatcgatgatgacacagataatatttttaaattaacaaaattagacaagctattcactcattttttaaatgttaatgaagaataa

SEQ ID NO: 196787 - DNA, 510 bp, Klebsiella oxytoca
gtgaaagcatccgattggattcaacaaaacgtacgacactcagcacaacttgaacctaatacactcgaagcagtatccgacttcactcttatgtggtcgatttttgaggcttcagaagctcataatgagaatgttgtagagcagattggggttctttcaaagcgagtcgcaagggatatgccatcagatgcgatcgactcccagttatcatattggtctaaacgctatatacatgaaagcggtgaaccaacagagcatttcaattacctctattttagagaactttcacaaactgtgaaatcacttaacgtactaagaaatgaagaaacttcttttgaagataaaatcgaagtgtgcctcttaattgtctataggtatcgaaataatttatttcacggtatcaaagatatcacgttgctaaatgcacaggtagaaaatcttcggaacgcaatagaattattacaaataattatgccatatagcgggagataccttttcctcggggcctaa

SEQ ID NO: 196788 - DNA, 1407 bp, Klebsiella oxytoca
atgaagagaaacaaaaccaagaaaaaaaaacgaaattctaaaggtaaatattcttcaaaaaaatcactttattcaataaacaaaaaatactctaactatatgagtagtgattttaaaatttgccatccattattaaatgaaaatcaaattctttacatgatgtattgcactcatcaacaccttaaaagccttaatattgaattggagggtgttaaaaaaatcgcagtagatctagatcaactaatgactcttgattatcgttcattacctaatgttactgatagacaaaaaatggtgattgaaaaactgtttaattccgcaccaatatcaccagacgagctgatttttcaagcattaagaactgttatgtttactagttttcctttacctgaaaatgaagaagcgctcatcaaaatgtgctattacagacacattgagaacgatgtggctttaaatatagcgcatgaattgtcagaaaaattttctgaaccaatggtgttacagccatactggcctaggcttagtcaattacgcattatgatgcatatccccgaacatttcataagaaaaaccgaattagataatataattttctaccctgttaaacagagaggaatgaatgcaacttctttagtgtatgaaaatacgagatttatcagggtgaattatgcacttgaacctattctagacgactttaatactatactgattcattttcattccaccgaagcaatggctggtgcaaaacgctatcttagagcgttaacttgcctaattccccgagcgttgtatttttcaactgaaatatctcctttaaaatttccacctaatcctatatgttttgaagatagtccacaattaattcatgagcttacggcagagcagattgatttcattatgatgcatgaattatcgcatcatttatttaagcacccacaaagaaaacatgaagtattaaaaaatgatgatgctattgataaattgaaagagtttgaactagaagcagattatctacctgctaaaatgatgttgctgaaattctacgatgctgagaatcgctcaaaaaaaagaggggatgaaaaaattccttttgaagtaatcaagtctagagatttatccatcatctcagcattaatacttttcgaacatatgcatttcgtcgaagaggctaatgaaatattgaaggggaaactaaatggaatattaccagtaaactttaagctgggaacacatcctccatctaaagaacgaaaagaaaagtttctcgaggctttaggtgaccgttttcgtggctcatcaccgttaagtaggtatgcatcttctttttatgaaaatgctttgagaaaacttaatgacatgagttcaatggaaataatggaagttattaagccttgtttgtatgaatga

SEQ ID NO: 196789 - DNA, 816 bp, Klebsiella oxytoca
gtgctggaagaaatcccccgcgtgcgcgaggacctcggctttatcccgctggtcaccccgacctcgcagattgtcggcacccaggcggtgctgaacgtcctgaccggcgagcgctacaaaaccatcgcgaaggaaactgccgggattctgaagggcgaatacggccacactccggtgccggtgaatgcggcattgcaggcccgcgtgctcgacggcgcagaagccatcacctgccgcccggcggacctgctgaagccggagctggcgcagctggaagccgacgtgaaacgtcaggcgcaggagaagggcattacgctggcggagaacgccatcgatgacgtgctcaccgtggccctgttcccgcaaatcggcctgaagttcctggagaaccgccacaacccggcggcctttgagccggtgccgcaggctgaagaggtcaaaccggtggcaaaagccgaaaaacccgccgcctccggcgtctacaccgtggaagtggagggcaaagcctttgtggtgaaggtcagcgacggcggcgatatcagccagctgacggcggctgtaccggcggcctcttccgctccggctgcggccccggcaggcgcaggcaccccggtgaccgcgccgctggcgggcaatatctggaaagtgatggccaccgaaggccagacggtggcggaaggcgacgtgctgctgattctggaagccatgaagatggaaaccgaaatccgcgccgcacaggccgggaccgtgcgcggtatcgcggtgaaatccggggatgcggtggcggtgggcgacaccctgctgagcctggcgtaa

SEQ ID NO: 196790 - DNA, 216 bp, Klebsiella oxytoca
atgcaggggatcaacgtcgccgggtatcacgagcactttattaccgatgaccgcaaaggcggcggtcacctgctggattaccagctcgaccacggggtgctgaccttcggcgaaattcacaagctgatgatcgacctgcccgccgacagcgcgttcctgcaggctaatctgcatcccgataatctcgatgccgccatccgttccgtagaaagttaa

SEQ ID NO: 196791 - DNA, 864 bp, Klebsiella oxytoca
atgaacaaaattgcagtcgcaggcagcctccattacgacatcatgattgatgcgcatcatcggcctgagaaaggcgaaacggtaatggggaccgcctgtcgctataagtttggcggcaaagggggaaatcaggctatctctgcggccaaatctggcctggaagtctggtttgcaggcgctgtcggcgcagacgaacaggggcgtttcctggttgataccttacgccaggcgggcgttgacgccagcgccgttgcggtggtggcggacagcccttccgggatgagcgtggccatttccgacgaagaaggcgactacggcgcggtagtagtatccaacgctaaccagaaaatccccgctggcgtctttcagaacgcgcgcttctgggacaacgtcagcatgctggtgttacaaaatgaagtgcccgagacggttaatttgctggcggcgagcgcggcaaagcagcgcagtattccggtatgcattaacgctgcgccggcgcgccctctgagcgagtcgtttgcggcgcttatcgatattctgatcgtcaatgccattgaggcccgcgatatgtgcggcgtcaacgtcgaagatttggtctcggcgcagcaggccgcgacggcgttggcgcagcgctttactcaggtggtggtgaccgccggcgagcatggcgtcgcctggtgtgaggctggcgaagccgcgcaagccttgcccgctcaaaaggttaagctggtcagcacccatggggcaggtgactgctttgttggggcgttttgcgcatctttgacggtcagcaaatcattagcgcaagcggtggcgagcgccaatgctgccgcggcccggcacgtctcgcaatcggatatttaa

SEQ ID NO: 196792 - DNA, 390 bp, Klebsiella oxytoca
gtgtccaatgtaaagattagatcaaagttaacaagcgaaaatgaaaacaaacaaacggtcccggtcaaaatcttcaaaataactgacatcccagatgtgatggaggaaaaagattggacggtgtcagcacgttttatgcgaaaatggttcaatgacccattttacgaaatgacatccaaagagaagctaaataaagttgatatgaatactgtggacaaacgccatgtcattgaagatttggattttgattggttgttaacttcttcgttacgaattaaaccgatttacgataatttcgtgaggcaagttttgaatgttattgagtataatgactacttggggagaaaaaacaaatatcacagcagttgtctaatggcctttgttacataa

SEQ ID NO: 196793 - DNA, 210 bp, Klebsiella oxytoca
atgacacctattctaatgatggaaaatggaaaagctcagagccagatgctgctggggtcaatgaaggacttaatggttctaccctaccgcctcaggacgcggatattgaaacttcctcaggaaagccagataccgctcttatgggaaaagactggaattccactgagaacgtccagtctgatggttctgcaacatcaagctctgcgatga

SEQ ID NO: 196794 - DNA, 798 bp, Klebsiella oxytoca
atgagcacaatttatgtcccaaaactgggcgacattgttattcctggtagccaccccaaaaaagggcattttatgctgcccgacttgcctgtcactaccggactgaagggtatgcatgttcagggcggtaatgccgcgctgagcatcaggaatctggctgacagctccactccgctgaccatggtaggcacaccgacaatttccccgacctttggcgctgtgtgtaatttcagtaactgttttgatacaggcagggggtctaccaggaaccagacccatatcgtgatctgtaagccggtaaaaccgacggcggccaccgagcagcaacaggcgttcatgatggggaactacaattactcgggctcaccgatcgtctaccggggggatggccttgctttcatgttttcgtcgcagagtttgtatggtgcctttgttgaagacaacaatgccaccccgaccaacatgattaataacttcacgaccaattatgacgtgacgaaatgggcggcatttgtgtcactgattgatggcgataataacattgctagaatcggtgggcggcagggaggtgcgcttgcatggcaaggttcacgtacgctaaccaacaggactgcatacactggcagaaccatcaggatagggtcgcatcatgctggcgcagcgtatccggcaggagcggatattactatgggcatggagctgatttttgaagcagcgctaacccaggccgaagtagcatctgttatcgacagcatcagtacttacttgaattctgcctggggtataaacgatctttaa

SEQ ID NO: 196795 - DNA, 1968 bp, Klebsiella oxytoca
atggcagaagtaccgttaccaacacctaccgacaatccggcgccaagtacggatattcgggacgcagtttatgccggcgccatgctggataaggttgtcaccagtacagagcataaatatacagatcgcctcggcggtgaacattacaccgttgacggcatcaaggcagaaggggataaagtcgttgaggaaacgcggcagaacctgatccctctcagccggcagtatatgaccctggaggctgcgcaggctgatatcgcgaatataccggcaggctcagctacttatgtacgtagtactgatggaagctctcttgcagatgagtacatcaataatgcaggtacgttacagcctaccggcagaaagatgccgtcacaggagactatcaacgcggtttttgatttcatcagtaaatttattgtgagtggtgacgtcagtgataactattttccatttttcactgatggtgctgataatgttcctgtctggtgggatgatggtttcgcggtatccagaatttcattagctctctatcagatgatttatgatgaagttcattctcggctgggggatgcgcttaattctcagatagatgatgtatcaaacgctttctttcctctgtttattgattccaataataacgttccggtttggtgggatagtggattcgatgtatctattatttccgaaagttttaaaacaaaaatatggaactatattaactccattatttcaccagcccttaataaagcggtcccgcttgtatcggcgggatttgttccgggcatgactgatggtgctgataacgtactgttctggtttcaggatggagaatttgatgctaacggggtcggcccaaacatcagcgcgtcacttgcccgcgcataccagcgccgcatgtataccgcctattacaacatgccgctgcataccgacagtcgcacgctgtggcgctggaaagccaaaaaagcccaactcaaagccgggatggctacgcagcctaatttccttctcaccggtgacagctggacgcagaataatgaacttgcgaccgctattgcaggcgtactgagcgctgaatatggtgacgctggtttaggctggcgaactgtgaactatggagcctcgcgggatggttcaaatatctttcgctctgccggctgggatttatatgacgcctcgccgacgagcggcgccccgctttatggttgcggcattgacggacagtccatcaacaccacgactaacacggcctatttcaacgtgactaatgtccgctgtactgattgccgtatttattatcaggacctgaatggcacctttcagtacggctacgacgttggcggggtgacacagtggactactgttgtgtgtggaaatacaggcacgacgaaatctgtgttactgacaggcatgacggatgaggtcaggacgatttataccaagactgacgggaataccgggcgcgtggccattcatggattttacttctggcgctctggcgttgccggttgcgtgatgagcaaggccggtaatgccgggattctcgccgatcagtttttgctgttctccgacaaaatctcggaatacctcagtaccattcagcctgacgtgatcgctatcgtcattggtaacaacgactaccgcatttcaaccggaacccagacatttcgcactgcgctgcaaacctatatggccgcctgtcgcgctgtactgcctgacgtgggtttcatcctcatggctcccccgagaaccaacggcaccgcggtaacaccactcgttgctttccgtgacgttatgtacgacctctctcagacgctgaactgtgagtttttcagtatttatgacctgttcgacacttggacggaaatgaacgggctcggctgcttcattgataaccttcacccgagcaccgttggcggaaacatgatcgcttcatcccttaataacgcgctgattaaaggctaa

SEQ ID NO: 196796 - DNA, 222 bp, Klebsiella oxytoca
atgtttctcgctgatactgtgtatttttcacacacagcaagagaggtcatatgtcttacattcacagcagagaacatgctgatcatggcgatgtcatcagcgttcattgctctcatcaaattaacgtactggttctggatgataccaattactctaagtatcgttcggggcggcaatgcacatattacggagggttttacactagatttcccgctaatatag

SEQ ID NO: 196797 - DNA, 180 bp, Klebsiella oxytoca
atgaaagtagcaatcgaagttaatggcgaggttatctggtaccgcgacagcgataaacaggaggggatggcgtcggtaggttatttaagggacggcacacagcagaagatcattgccgcccttgaagaatccctatttcaggcaaaaggtcagctaaatttaccggatgatattgattga

SEQ ID NO: 196798 - DNA, 2805 bp, Klebsiella oxytoca
atgaccgagaaagtcggagatatctattacgaagtcgatatcgaaacggcaaagcttatagccggtagcaggaaggcttctgaagtgcttgatgcaatgggcaagaatgcaaatggagcaagttctggcatagataaacttgaccgttcaggacagaaagcagctggctcaatgggagtattaaagtcagctttatccggagtagccagtgcaataaccacggcaattattattgaatatggtaaagcatttttagaagttgctgacaatgttactcaattacaatcaagaattttaagactctcaacagacttaggtcaggcaaactccacgttctttgcattatcacaaatagcttccaatacaggagctagcctgcaagagacacaaaaactatgggagaaattaacttcatcgcttcagtctgcaggcgtaacgaataaccaaatattatttttaacggatacgttacagaaaataggaagggttggagggagttcctctgaggaaatggccaatgcattacgtcaattcggacagtcaattgatggcgggattgtaagggctgaagaattcaactcagtagttgaaaatatgcctgagctagcgaggcagatggccgctggtatggggctttctatagggcaattgcgacagtcaatgcttgaagggaaagtcactgcacaagacgcgctgaatgcaatagcaaaacagtccggttacgtaaatcaggagttcagcaaacttcctagaacaatggatcaggctgagaatagccttaccgtatcattatctttgctagtaggaaaaatgaatgaggcaaccggcgctagtaaaaccatggttgccatcattgattcaattagtgcggcgattgaccgcctaagtggaagggctgaaacagcctcacaaaaaattgctgaccttactgcaacggcagacatgtatagtcgaagagcaaggacttggtcatggcttgggttagatggctggtcagagcaaaacaaggctctatcggctttaagcatgaaggcagctacactgacaggagatcttgacgctgttggtaaggcctctgcaaatgcatctaattcaaaacttggtttcgggagtggcccgcaacccaacccgaaacaagacaacctcattaaaatatcagaacgccggcttgcgttggccaaacttgaaggcgaggctagagccagacttcaggcccaatatgatgcagctgatgctggggtgaccgatccgaagcgaatcaaagcgctacaggatgagtacgccgaaacctatcgggttacggaggcgaggaaggaaagcgacaaagccgggaagcagtcggcttcaacagctgaatctatcgcgcagaagcttgagcaacttcgacaggaatcggtgcttgcagctgattcgacagaggggctaacaagagagcagcaattactcagggctgagcaatcccttggcgcgcatgctacggatgagcaaaagcgtcaagccagagagtataaggcagccgccattgatgcggccgcagcggcaagaggtgtaaccgaagcgctcaaggccatgccggagcaggcggagaataaatcctatgccgaatccatgcagaaccttaaagcggcgctggatgccgggaagattgacctacaggagtacaacgccgctaccgagaaaatggcgctagagcaccagaacaacctcgccaaaataaacgcgcagaaaatgctaaaccccgtagccacggctcgcgccgaagtagacccggtgcagcaactggtgaacgagaataaccagaagctggccctgatgcagcagtaccagcagcaggaacaggcaatactccagcagagctaccagcagggaaaaataagttacgaccagttcatcgctgctaaatcagctacggatgctcagtatctggcgctgagaacggcgcaggagaaccagtacaaccagcagatgacagaggcccaatggcagctgctcagccagcagagcgtcggatataacgcactgacgagcgctgttgactcattcggtggtaatgcctcgaacatcctgaccgggctggctactaaaacaatgacgctggaggaggctggcgcatcactcggcaggactatgctcaacagcgtagtaaatagttttgcccaaatgggcgtcgaagcgctgaaaaattacatcctcggccaaactatcggcgcggcttctgttgcttcttctgctggaatggcggcaacgacggcttcggcatgggcgcctgctgctgcactggcatctctcgcaacgctaggaacaaacgccgcgccggcatccgcaggcatcacatcaactgtaggacttgcgagcggtcttgctctggcgggcggccgtaaaaatggtgggcctgtatctcccgggaatatttatcctgtcggtgaagacaaccttccggaattcatgcagaccagcaagggtctattcatgatacccggtgatgatggtcgagtattcagcaacaaggatgtgacaagcggctctccgagtatcaagaaggcctcaacaggcagtgaatatgtatcaagcttgaagggcggcggatcgcagagtgactccggtggcggcaagcagattcaggttaacgttcagttttacgaccagaccagtggcgggcagcattcatttcaggcgcaggcgatgcaggaaggtaatgtggtaactgtggatgcgttcttaaacgatcttgaccgtggcggcccgatgacctctggcatcaaagaccggttcgggctttctataaaagccaacggcacttactaa

SEQ ID NO: 196799 - DNA, 150 bp, Klebsiella oxytoca
atggtcgtgatggttgccatggagccgttcaaggttttatcaatgatggtatatttggctttcgaatcggtcgggatggaaattgtagtggctgaagcagcgccaaacgaaactgttaacatcaaaattaaagctaattttttcatgtaa

SEQ ID NO: 196800 - DNA, 459 bp, Klebsiella oxytoca
atgagccttgatggattctctcgagataaagtcgaatggttcaggtcgtgggtgctcaaaaagaactttttagaagtggtagatcttcattttcaactatctgaggctctaaaaaagcactaccgactgcgcgcagatcagaaacatttgtctattgcaattagcgcttgtgaatacatgatttgcatttctgatattgccatggatgcgttgatagctaaggcgctttatcaaatttatgaatatgagcaagtgataggcgattatccataccctaaaaccttttaccggcctggccaccatggttactatcaactcggcgtcttgcttcggaagtgtaagaatgttaatcgtgaagaacaattaaaccgaaagatgcatgaagaaggttggggaggtggggaaattgaattgtccaaactgactggaagtaggtttatgggttttaaaatagggtaa

SEQ ID NO: 196801 - DNA, 831 bp, Klebsiella oxytoca
atgggcactctactgttgtcggcaatactagtaagcgggtacatctttacagttacatcggtatcttcgagatacaaatttaagcgctctgatggatggggcgcttatttttatgtcgccacatgggggactggtttctgtattttgagttggcttatatgctccctgatgggattctttggactgattgaccttttagctgaattggttggtataaacaaagagaatgtcaaaaccctcatacctttgtctgccgatgcagttgctacgggtaaaagcctaaaaatagccatgtgggtagtcgggactgttgtcctcgctactagttgtggtttgttgaataaattttggcatgcttgcggcgatcatcgttttaaggcccttgcaaaagcagccagaaacaacccactagaaactttggctattgaggcatcagcaactctttcgccagtgatcttcacgcttaaatcaaaaaagttctacgtagggtgggtgatacgaccaccactcgaacatggaaaaattgagcatatggctttcataccgttacttagcgggtatagagataaggatacgctcaagattgtagtgacgactaactatgatgcgcactacgaaagcatagggctctttggtgacgttgttggcattgacggacctccaagggtgaaaagcgacctatcatttaacgattttagggttgtatgccccgcttctgaaatcgaaaacttatcctttttcgatttcgaaacatacaatcattttaaagcgcaagaagaaaaagaagagaagtcgtttcgtaggattcgtacgaaagtagcaaagcaataa

SEQ ID NO: 196802 - DNA, 210 bp, Klebsiella oxytoca
atgtttggtttctcattcaagcgcaaagcaacagctggagttgaaagttctgtagaccgcttaactaacattcttattgaaaatcaagacagactaaccatcgatcgtgatggggtcataagccttaacttggacaacgagaaagttcgcagggagatgaaaagacagtttcagcaccttgcaaaagtcgagcccgcaaaggccaggtga

SEQ ID NO: 196803 - DNA, 441 bp, Klebsiella oxytoca
atgggcgtaaaagttcgcggcgtgcgagaggcaaaagccaatcttaaccgcattatcgacaatattcaggggcgcaaggttgtccgcgctatacagtcggcgctgatactaggcagcagcagagcagcgtattacacaccgatcgactcatccactcttctgaatagtcagttccgggaaattaacgttaacggcacaagggttacaggaagggttggatactctgccaattacgctgcttatgtgcacgatatgcctggcaagttaaaaggccagccacgtgctcactttggtaaaaccagagaaggcaccgaatttggaggaggtacaggcaaaggtaattactgggatccccatggcgagcctcaattccttaagaagggattcgatgaagagcgtgatgcgattactgcggtaatcaaaaaggagctatctctgtga

SEQ ID NO: 196804 - DNA, 435 bp, Klebsiella oxytoca
atggctaaagacggaaagcatattatccacgccggcggcgtgttccctaatccgctgcttaaccgtgaaggcgcagctgcggcatcaacccctcctggaaccattggtttcttcagtgcaacggacaaattcacggcatcggttgatggcaatgaagctgcaattctgtacgtggccaacaaagactatctgcgctgcctttcagtggatgaccctattcctgctggcgaactggtggtaggcattcaacctctgccaggcatgttcttaaacgttcgtgcagcagccggtacctacaccaaggggcaagcgctctcgattgcaaacggccgagtcaaagtggctgctggggacgagtcagttcgctgctacgtcgaggaagacaaatcatacacaacggcagcgggcgatctgcttcgtgtcgtaattaagtaa

SEQ ID NO: 196805 - DNA, 1389 bp, Klebsiella oxytoca
atgaagcgcaaccgcgttaacgtgctgaccgtcgtcaactccgcttcaaacatcaccactgaaaccatcgacggcaagccacatatcgtggttcgcggcatcacgcctgtcgtggacgatatcgtgatgaaccggaagttgtacccggcagcagaaatcgaaaaggcctacaacacgcttgagcgtaacccgatgccgctgggacacccgaaggtggacggcaagcatgtgtcggcgcgcgatgtccgggcggtgaacgaatatcacgtcggcgcatggctgcagaacgtcagccacgaaggagggaaggtgacgggtgatatgtacgttaaccgccagtacgccgagtcaagcgagaagggcaagcgcctgattaatcgccttgatgagatgatcgccggtaccaactcagaacccatccacatctccacaggactgctgtattcccgcattgccgctaatggcgagtcgaagggcaagaagtacaacgagatcgccaccaacatgatgtttgaccatgtggcggtgctgctcgatgagcctggcgctggaacgccatctgagggcgtaggcattttcgtgaactccgaaggcgaagaggtagagattgaggttgctctgctctctgacgccgcagattgcacccgcgagggcctgctcaacaaaacgaggttcttctttaccaacgcctcgaatttctctttcgacgatatccagcgcgccatcagcgacaagcttcacgaaggccgtgctgatgataagtggctctggcccgaatcggtatggccggacaacttcatctaccgcgatgaagccaagtatttcaaacagaagtatctcatcgatgacgacggcaaagccgtgttcgtcggcgaacctgtagaagtcgtgcgcaaacccattgagtacgagattaaaaccaacggagagaacgatccgatgaaagaactgattatcaatgcgctccaagccgcgggtaagccgactgaaggcaagtccgatgccgaactgatggacgcttacaaccagatgaaggccgaagaagccaccgccaagaaaaaaggcgatgaagaaatcgatccggaaaccggaaagccaaagaaaaaagagcaggccaccaataacgaagagatgccagcgtgggcgcagaaactagccgatcgcgtggacgtcgttttcaacagtctgaacgctaacgccgacaaagagaaaggcgaaaagcgcgcggctgtgaagctggtgatgaacatgagcgatgaagaagtcgcagatctggacggtaaggcgctcgacgccatgtacgccaagtgccagacatctttcggcctgaatggtgcattccgccatcaggcaaccaacacccaatcagtcagcgaaatgccggagtaa

SEQ ID NO: 196806 - DNA, 351 bp, Klebsiella oxytoca
atgaaaatgcacaacgatcctcattcctggccggatctgcttgagttgctgcagaactggtggcgtggcgacacaccgctgggcgctgtgcttctctctgtaattatggccggactacgtattgcctatggtggcggcggctggaaaaagatgctgcttgagggatttctctgcggatgtctgacgctgacgtttgcatctgcgcttgaatactttgacttcccgaaaactctctcaatctctatcggcggtgcggtcgggtttataggcgtagatgctatccgggcatttgcaatgaaatatatcggcagccggtttggtattggaggcggtaatgcagataagcaataa

SEQ ID NO: 196807 - DNA, 552 bp, Klebsiella oxytoca
atgattcacactattcattttttatgtcccgtgagcgccagcacagtcagcattttgcaaggtcattgtttacaagctattgcgcaagaagccgaagcaattaatttacatatttccagctcaggaggagaaattacatcaggttttacagcttataattttataaaaacactgccaattccagtaaacacttataacataagcaatattgactctattgctaatgctattttcctcgccggcactcaccgttttgctaacagcggatcccgctttcttttgcatcctttccagtggagtttcggcggtatgcaaagcgttgatcacgaaagaatgcgtgaatgggttggaagtctagatcatgacttagcgcgacttgtcggtatttttgacaaagaaactgcaagtgccagtgagcgggttgactggagtgctcttattagagcttccactatacttggtcccgaaagagctatcgcccttggcctcgttgaacgtgtggaagaggcaactgtccgggaccccaaagccacctggtggataacctgctaa

SEQ ID NO: 196808 - DNA, 255 bp, Klebsiella oxytoca
atgaagatactcggggtatgtagttgcggtggccgtctagacgagtcacagtattgtaaggatgactttggcaatacgtttaagtcttgcccaaggtgttcaaatatttctggtcatcacgttttctataatatcgaagaatttggcgagagaaatatgggggatgggcgtattattgctcactcgtattgtccgtcgtgcagaaattatcaaggaccatcgttaatacctgcgtttgagtgtagtgatcagtaa

SEQ ID NO: 196809 - DNA, 138 bp, Klebsiella oxytoca
atgtcaaagattctcatggatgaagagttaaatgctctcatcgaaaaagcacaggcacactcagaagtgatgtctgaattaggttcaaaacaggaagctgatgagtttggtcagatactgagcgcattatgtaattga

SEQ ID NO: 196810 - DNA, 597 bp, Klebsiella oxytoca
atgaaaaagaacacaggtcgattatataacatctacaaagagaacaaagctgttctggatacatctgcacctgtcgtccttagtattattggtatgattaccggcttttacgtcaagaaaaagttaacagaattaaatctagacgaagctgtgtcatcggcaaccatggccgcactgatagcattacctgtagcagtttataataaattaaccgtcacatacgcggcaaaaatacaagaagataaagattttgaggagctcaatgacacaaatgaaaaactgaaactagaaagaaaaaaaacagccaaattttcaagagcactaagtaaattaaagcaagagaaaatcaagacttacaatgcccatgacaagttatcacgagacataaaaagttacttaaatggagataaaatagaaccagatgtaagggctgccatatgtaagatgctagacgatggtaatggtgatatattcgaattaaccatttcggttgatattgttataataaacgagatggatagccatgagattgaagaagatgaaagcgatactgtatatggaaaacaaacaaattcatcaggaatacctataaactag

SEQ ID NO: 196811 - DNA, 1683 bp, Klebsiella oxytoca
atgaacaatattgaagcccccaaaatatccttattcaatactgatgaatccatcaaagaaaccttatctaaagaatattcaaacatccaatcccataagttaaacggaagggtttttttcaaagatgaattcattggttaccggaaaaaccatgatacaaaatacgatatccccggggatcttcacgaatccgacataataataattgacacactcccccctaaagacagaatttacacctcaaaaactgttagattgcggtttgatagtttacctcatgacatagatataatgccagtggacattaaactgataaacgaccattttaattcaaaccaaaagaaaaggattgtaatagttttttgcgaacaattttcggaggaagagtacaaaatttactttccagaaaataaagaaaacgatcacttcatcagccatacattttatatcggcgaaaataatcgaccaatatttagagaaggttcgagatacaagacagctcaatcgcaaccagatccaattctcgattgcataatcaagcatgctgacaagctaacctataaagtagtattcaacaaagacttcatgaatccatcctccagaatatatttattaaatgaaagcgatgaagtcatatctttttcgacttatagcaacaactcctttttaatttttcttccaagcctagccgataaagaaaattttctattcgagctattgagtagggttctccctagcatttctgagtttcatgaattattccccaataacacatctttttcatggcttgatgaaccatcatatttatctgctgaagagttaaatattatccacaaaacaaaggaactagagctaaactatcttaaagaaaaagagtccttatcaacagaacttttatcaatcaaagatagacaagaaaacatttttttgaaaaacctattaaaagaaacagacgatcaattagtatatgctgttgagtggttcctgaagtatattggctttgagaatattgaaagacctgatgagaatatcaaacagggtgatgtttttgaagaagatctgcgtatcaacgatgaaaatgaaacttaccttatagaaataaaaggaatagggggcacctcaactgatgcacaatgttctcagatatcaaaaattgttaacagaaaaaggaaacaaaatactggcagaaaatatataggaatttatatagttaaccatcaaagattcaaagcaccgctgagcaggatactgcctccttttaatgagaaacagattgaagatgctgaaattgcatatagaggtatgacttatacatttgaactatttaacgtatatcatatgattgagcaaaaaatcctaagcaaagagcaagtcagaacggcatttttagaagatggtttattaaatttcagaaagccgctaatccctctaccaagaccacatattttccctaaaccagaggtttactcctttgatattggtgaaaattcaaatttagaaataaaaaaaggagattttattgttctcgttgatgacaattcgcactggcataaagttgctatagtagagttacaagtagataaaacaagtgttgaacgtgccaataaaggcaaagttggcataaaaacctctggtttctttgaaaaagctaaagattattatttgctacccaaccaaccctga

SEQ ID NO: 196812 - DNA, 675 bp, Klebsiella oxytoca
ttgctgaatgccggcgttcatgtctgcgttgataaaccgctggcggataagctcagcgatgcggagacgctggttgagctggccgcccgccgtcatctcacgctcatggtcgggtttaatcgccgttttgctccgctctatcgcgagttgaaggcgcagctcggaaacgcagcctcgctgcggatggacaaacaccgcagcgacagcgtcggccacgatctgcgcttcacgctgctggatgactatctgcacgtggtggatacggccttatggctggcgggcgataaggcgcgtttaagcggaggagcgctgcacaccacggctcaaggtgagatgctgtatgccgaacatcatttcacgtccgggatgatacagatcacaaccagtatgcaccgccgcgccggaagccagcgggagtgggttcaggcggtgaccgacggcggcttatatgaagtccgcgatatgcgagagtggcaggaggagcggggacgcggagtgatacagcgcccaattcccggctggcagaccacccttgagcagcgaggcttcaccggctgcgcgcggcattttatcgaatgcgtgcaaaatcagacggttcctgaaacgtccggggagcaggcgctgctggctcagcgggtggtggataaactctggcgcgaagcgatgagcgaataa

SEQ ID NO: 196813 - DNA, 228 bp, Klebsiella oxytoca
gtgaaacagcgcctgcgcttcgttaatccgggcgccggtattccagagcgtggccagaagtatcttacgatgaagatccggcacgtagtggtgcagagcgctgactgtcggcacctgggtagttcatcttgcactatggctatctgcgttgcctggctgcccgtggaagtgactgaagaagtgaaggcagcctccgccgcgctgtccgaacgcatcatgggtggatag

SEQ ID NO: 196814 - DNA, 1170 bp, Klebsiella oxytoca
ttgtgcaatcgtgcaggttgtacatatacacgatatgccgacgatataacaatatctaccaataaaaaagagtttcctcgcaaaattattaaatcccacaacgagaactccatagatttaaataaaaaatttcttaaggaaataatttcttcaggttttcaaataaaccttaataaattaagactttttgacaggaaatgccgtcaagaagttacggggttgacagttaataggtttgtaaatgtcgataataaatatgcaaaaaaagttcgcgcaatggcacacagtctgtttactaaagggggatacacattaacagacgaaaaaacacgcgaacaaagagcaggtaatattaatgagttaggtgggatgctcagctttattgattatgtcgacaaacacaataatagacttcctcatgccactaaaacctcgcttaacaaacgagaaaatgtatattctgatttcctttactattctgctttttgggcaaacccaaagccaactatcttgactgagggaaagacggacattacgtacttgcgagtagctctggattctttatcagcaaattaccctaacctgattggcaataaaaaaataggtaataaaatcgtacgagactatggagttaaattcttcaaaaacaccactaaaagcaagtattttttaaacttagatggtggagcatcacaccttaaagacttcattgttggctatgaaaaaaagacaaatgcgtttaaagcaatcgccgaacaaaaacctgtcattattgttttagataatgactcaggcagtggtggatctaatgggatcttccaaactttaatagggaaagcattccctaacattactttgtcgaaagatgaattaagaaaccaaaaatggacttgggttacaaagaatttatatttaatctttacccctctcaatggattaaatgatagttcgatggaggatcttttccacagttcggtgttacaaaccaagctggggggaaaagtatttaatcgaacgaatgcaaaatgcaaagataatgaatatggcaaagagttttttgctactggcgtggtgttaaagcagcgtaaagcaattaacttttcgaactttaactacatttttgaatcaatcaccgaaataattgatcacaatgcttcaaggaagccttaa

SEQ ID NO: 196815 - DNA, 234 bp, Klebsiella oxytoca
atgactacccgcctagataaattaaaatcatgtaattccaaacccgatttagcacggcttttaggaattgatcccgtatttatgacgcgcgtcatatacataagaaatacagataatctttattcacaattcactattaaaaaaagaatggtagtgataggcacatatcacccccagaccctgaactcaaagaaattcaaagtaaactttccgacttacttcaagattgcttaa

SEQ ID NO: 196816 - DNA, 708 bp, Klebsiella oxytoca
atgctgcgcgatatgaacgatgccgcagtgagcgtcaagctcaacaataaagcaggcttcacccttgaggcgcaaagaatggccgctgcagcgaatatttcgcctttgctctatgccgcatcaccacttgaagggaactttatccgctacgacagtaaacccgtcaaggccctgacctgccttatcacttcccgtaacatgccgggtactaataaaaattattcatgggaggaaacctactgcctggatgaaaccggtgcagcttacattggcacccagggttggccgtcgcgcgcaatattcgacaaaagctgtgaggtgggcacatctgactgcccggtctatctgagcctgaaaaatgatccacccactctgcgcaacgactccgcacagtatgtgccatacaacggcgctcaccgttctgaaacggtgcccaataaaactcagaataatgtaccagttgacgatattgtcgctgaacaggatggatatgcagttcacttttcccaaagcaacaactgttctgacagcagactcaccgttaaaaatatcagcacagggaaaactgctgcgattgcaggtgtcaacgggtgcacatttaatccgaaaaagaacgctgtagttatttatccggttaatgaatacgtgagcgtttacagcggtaccactaatacctctgaagaaatagcgactgccgatctcccttaa

SEQ ID NO: 196817 - DNA, 414 bp, Klebsiella oxytoca
ttgaacattcgcacagttctttttctctgctcatcgctgacagcgactgctgcaaaagccgttactcccgaacaacagtggggtgactggtatggctacatcaatgccatggagtttgaaattagcaccgacaatgccaccggagagcgcctgacgctgacctgctcagacaagcatatgaccttctcttacagcgttccagcaaaggactatcgggtctcagccaccggtataagcattaacgcaacctcatacattccaggcgaaacggcctttattgcgctcaaaaattccgatggtcaggagccgatagagatcacggtgaaagataaacctcttccgggaacctttaaaactacggggctgcacgaagcattgactgacctgagctggcaggactgtatcagccattaa

SEQ ID NO: 196818 - DNA, 624 bp, Klebsiella oxytoca
atgagcaacgatatgggttataatcagcattacattaatcgtattcatgaaacgctgcaaagttcattacgtgaatacccaaggacgtttatcctgaatattattcttaggtttcctgatgccaattacgaaagctataaggcagaccatacagtcataacacgctttattgaatccttaaaatcacagattaaattcacgcagaagagaaaggaaaaacagggaaagcgggtacatccctgcaaccttcgctatgtatgggcaagggagttcggtgaagaaaaagggaagaaacattatcatgtggcattgatgctaaataacgatgcctggtgtagtgctggtacctattatccggtgcagggacattacgttcactgtctgggattgatgattatggaagcatgggtcagaacattgaaccttcacgttcagcaggattatgaaaagaaatattatcccctgatagagtttgtccttgaaggtgattttaatttgaataccaagggggaacatttcgcctggcattacgatactattatgagaagactgtcatatcttgctaagcgatttagcaaagataattctgatggacagcggaattttggttgcagccagtcctga

SEQ ID NO: 196819 - DNA, 1530 bp, Klebsiella oxytoca
atgtcatatttaccccctgcacttccaatggttaattctgccagtcccttccccgttgatgcattgccattgataatgcaaaacaccatcaactaccttcaggatggtggaaaagtaccgactgtactggccgtgaacgctgttttagcggcagtatcattggcctgccattcgcatatcaatgtactcaatccttacacggacatagaggagcattgttcactcaacatcctgacgctcgctgattcagggacgggcaaatcgtccgtcagcaaacaggtaatgaagccctttgatgctttcagggctgagttggccgaatcacatcgggttaaccaggctgtttggcgcgaagattatgtcgtatggaaaaccagtttaaaggcgctggaaagtaagctgcgcgatgcagttaaaaaagaccagtgtacagacgaggcccaggcagccctgaaatctcacgcatcggttgaacccgtcagacctgtgctacccacgctggtctacaatgacacctcgcttgccgcgctcatcgctggcctgaatgagtatccgtgcgcaggtctgatttctgatgaagccagcaacttctttgacgctcgtcttaaagataatctggcgttcttcaataaagcctgggatggcgatatgtatgagcataatcgtcatcagcgtgccacccagagctttaaaccgacgctgacggtgtccttaatgttacagccttcgctttttttcgattacatgaaaaaggatggtgataaagcattagagagcggttttttatcccgcttcctcttttcaaatatcaccccgaacaccatgctgagttcctgtgtgatgagccaccattatcgtccggataccgcttaccgtgatgaaaatgctttaacctgctttcacgacctgattggaaaattactcgggcagcagctaaaacaaattaattctggtgaaggtaagaaaaaggttctcaagctttcacctgaagcagaagtccactgggagacgatgcgtgagaactggctgagatacacactcccaggtagtgcctggtcatatatcaaacccatggtactgaaagccagtacgaatgtgttgcgtatcgctgcgctgctgaattacttaaccaaccaggaggatgatattattactactgatgttatttcgcgagcatcagcgatagtgaactggtatctcaatcataccgcagcctggttttatcaattcacggatgagtataaattccagcaggacgtgcaaatactaacccagtggatccatcataaattcaggtccactaacggctttccgttcaaaaagaacgatgtcattaaatatggtccgaacaaatttcgccgcagcgaaaaactggaaccgttgctgaatgccatcatgactacaggtactttcgcatacatggttaaatcacctgaaaacccggcggtttatattacctggcgaatgaacaatggtcactacaggccatttgatgataaacagccgccttcgcctcagaaccctgcttag

SEQ ID NO: 196820 - DNA, 213 bp, Klebsiella oxytoca
atgaccatatcaacagtgaaagtactacgtttacccgcagttgtcagcaagctcgggatcgccagatcgaccatctatgactggctcaatgccaaatcgccacgtcatgacccagcattcccgaaaccctaccctctaggtaaacaatccgttggctggctcgaatccgaacttgacgattgggttttgcagcgcaaacacgcactgctctga

SEQ ID NO: 196821 - DNA, 699 bp, Klebsiella oxytoca
ttgaaaggaaatgatgttagtgccctttttaacgagttgaaagacgcttatgaaatcaagcttgatgaattaaaaaatgagagggaaatatcgacaaaaaaatatcaagaggatgttcaaagattttgcgcagagagagaaaatgaatatggtgggattgaatattttctggcagaaagtacacagttgctaaaaagtgaggctgcatctatctgggttgatgcagttttgcagggaaagtttgataagtatctgtacatatcgttatgttattaccatctggcctgtctcgtgtcaggcatagggcggattaccgatggcagtaagtatattcaagatgccatgtatttttatgggaaatggcagggaagccgagaaaataaggagtgggctaaagataaggaaaaaaaagaagaggaaaggtgtgaaaatgctaaaaaatccaaagaagaaaaatatctccctataaaatttgaaatcattcgacttttatattcccaaaagtctttggggaaatatgcctccgaatctaaagcaattgagggaattgaggttgaattagtagagtttcttgaaaatgaacctaaagaaatctcttctaatttagactctagcaatctgaagagaacaataaaaggctggctgaagaaagatatttatttagcgtttgcgtttagtgaagttgttcacaataaataa

SEQ ID NO: 196822 - DNA, 828 bp, Klebsiella oxytoca
atgacagcacttgtaactaaagttgttgaagtagatgatgatgtctgtggtctagtttggtctgttaatgatctcaatgaattgtccaaattgattgctgtcattgcgctcggtcaggcacagcacgcagcaagaatcatcgttgagcttgaactccaggggccagcattttcaaatggagagctttatgctggagccagaggacaaatgcgcataaaaggtgagaacgagaaacaacgtgaagtgtctcgctaccatcgagatggatttctctttgagtgcatttcttggattacagcgcggcaaacagcaacagatcgtacatttcttaaagatcctcacattagttcaactacgcaaggtctagatggcctttcgataacattgcatccagatgaacctgttgttgtaggtgtgacaattttcgaagataaatgcactgaaaatcccagaaataaattcagagacgaaatcatgcctaccttcaccgaacatcatgagaataagcgaagtcgtgatcttgtagctaatgctgttagccttattagggagggcggcataaatggcactgaggctacacgtgcggctgcgagagttttggacaaacagtatagaacttatcaagcagcgcttactgttggctctaacattgccacggtaaaaaaaaggaaaaatcttttcaagggatataacgaccttatgcatataactaggaatcaacgcatcggggcaacttttttgattgatggcgatttacgagattggtttcaagagctcgctaatcaagtaattactaggctaaatgaatttgaggcagaagatgtttga

SEQ ID NO: 196823 - DNA, 3228 bp, Klebsiella oxytoca
atgtttgatgcactaacctctcaacttctccgctcagcacccgacctgcccgaacttaatgcgagtcagataccgcagttgctgacgcggcattacgctgaacttgtatccgcgagacttaagggaaaagaacaaatcgggcccgaaacggagcattggtctctcgatcgtatcgctgatgcatatgaaatcatagcttctctcgaggaggatcccgctttacgccgagcctcagcattcgtggcaggtacagcccaacagattatttctaggcggtccagtgagtctggcaatagcgatgcgcctctcctcgaccgtgatagagtggatgcatctattgctgcagccgtgcttttccttgcggctgaacagtatgcagatgcaaatgaggctgcggctgcaatccctgctggtagaggtccagttgaaataaaagtccttgtggatcatattagagaccttgttcgcgggcgcttagactcgatcctcaagcgcgcaaatagttggcggttgctgaaggcaggtaaaggagcgattcaaaggcgggcacttcggcttcttgctgccactctttctgaaggcatcgaactgttagctgtagacatgatgtccgcggaaatacctgaagccgtaccgaaacgatttaagaacgcgcaagaagcatttcgctgcgttatcgaattatcatcccaaactaattacaatctaagagattcgctcgatggtgaattgctaacagtatattctggaccggcacatttagcttcgcttctgctttctgcggcagatgcgatcgaaaaatcggctctaaccaagctatccccaccagatggggctgataatgctatttggaaaaagtggctaggtatacgagctgttgacatgcctttcgtttggcagaatcatcgagaagctattaaagaagatttctatcaaacgggcacatcagctgtcctagtcctacccactggcgcagggaaaacaactgtcagtgcgcttaagattgccggaacactctcacgcggtaagaaagttattttcttggctcctactcatgctcttgtggaacagttaactgaagatcttcaggcgatcttcccacaggatgagtttggtctcgaagtatctagtgattttgattccttacttctagatgatgcccaattacaggacatagaggtgatgacgcctgagcggtgtctagccatgctgtcattttcagccacctcatttcagaaagttggtcttctcgtctttgacgaatgtcaccttttgagccctcagtcgggaaagatcggtcgagctctggatggaatgctatgcctgttggcgtttagcgctgcatcccctaatgcagatatgctgttcttgtcggcaatgcttaaaaatggtcctcaatttgctgaatggattgctgatctgactcatcgtccatgtaagtcagtcgacttactttggaagcccagtcgtcaggcaagaggtgttgttgtctatgaagagtgtgaaatcaatgaatccattaagcgtgccttgaagaaacagaagaatctaaatgaagaaaaaggcaaaaaagcaaagactttgcgtgcaggagcgaagcgtgaaattctgggcaagccctatgttgtctggggtttacaacataattggatatccacacccgattcatttgcgttcacctctatcgctaatgttcccctgcaacttgctggcggctttgacaatggaagagtttgggcgactcctaatgccaatggcatcgctgcaaatatagcagttagtgctaataacagcggcctcaaaacaatcgtttttgttaacacaaaagctgacgcgattggggttgcccgaaatattgctagtgagcttgggcaggtcgttgttttgaatgaaagtgagcgggctctttgggaggcgctggtacaagagttaggcgattcaaagcactctattttcggtgagacgaattttggtgcagttccacataattcaaccatgcttcggctagagcgttctctttctgagaaactttttcgacgtattgacggcgcacgcgtgattgttgctacgccgacccttgcacaggggctaaatcttcccgctcatttggctatacttgctggagataaacgagccggtgaaaatccaggtgaccgcgaagaacttgaggcccatgagttattaaatgcggcagcacgagcagggcgggcaggacatcttgctaatggtattgttatccttattcccgaacctataatcaaatttattcataaaaaaacattaaatgagccattaaagaaaaagcttgcatcagtgctgccggaggatgatcgctgcgttgccataacagatccgttgggcatagttcttgaccgggtaatggagggagagctaaaagatcgagaagtcacttatacaatcaaccgactcgcagctcttacagctgccggtgcagaagtgataccgccaaacaatttaatgtcacgatcgttgagtgctttccttgccatcaaacattctgaacaaaaagaatataacgaaaaggtcgaggaactttggcagcaaacgaggaaggcagtggaagacactcccgatgctaaagttgtattaatagcttcgcaaagtggcttacctcttgatttacttgggcggcttagggctcgtctgctggaagagaaaggttctttgtccaccacaattgaaggctggattgattggacgatcgattggcttaaagatgactcgagcgcgcgcgaatatctattacgagatgtatatcgctctgcgagcgcggccgtaggaaaatcagtcacatatcctgtaaattctgctgttctcagtgctcttactccaggtttaaaggcatggattaccggcaaaccacttaacgctatagaaataagccttggtggcgatccaaatggtaagtccgaaactgtgaaaatgtgcccgcgagcccgtgaacttatttcaactttcattccaagaggcctgtcttttatcatgggtgtggtagctagaatgactgaagagctagatttggcttcaagccaagaagatcttaatgaatccttcttgcaaagtctttcagccgcagtgaggcgcggttttgatatggttgagaaacttgagttttcctacgcaaacaagaatatcttgagccgtgtccaattgcataaaatttttaatgaacgtcagacgcactctgattttgatgatattatttga

SEQ ID NO: 196824 - DNA, 1233 bp, Klebsiella oxytoca
gtgagtaatgcacaggttgaaaaatatccagctaccgctgtatctacatggagcgggtacgtttaccaaggaaaagttgcgctctaccactgcctcaagctaataagtcaaggcgatgtagattttgagcttcaattggacagtagtgacgattttgctatttataaacacggtactttagttagcgctcatcaagtaaaggctaagattagtagttaccgtagcggctatgctgaagctttggaaaaatcatcagctatcgaatttgacagaaccgtggggatttctcgttattttcatgtttccgtcccgttaaacgatactagcgattatactggaacaaatggagaaaacgtccaattctacgtctatggtaagaataagtattgtggtttgggcgaaatcgaaaaattgacaaaagagcttatcacgcagatctgtatcagcaaatcagttactctaagtgagaatcttttacattataactactgcctcctttccgaaaaaattagttccaaagcagtagcaatacaccgcttagttcaagatgatcgtaaaaaagccaacaaagccgcttatgaaagcaggattgttgcgcagcttttattagatgacatattgatccggaatccttataacagcactgagtactatgctgttgatctgaaggctaggctacacagctaccttgaagatagacttgaccaagcattgcctagtatgagtgataaaacgtatgccagagctcggcgtctcttcgagcacattcggattacggagaccagtgaaatgaagacgctctgtcaattaatgaagccttctgagcgattttcaagccttcaaaaagcagacattaggcgttattccgggctgattgaagccatgaatattgagcccattctaaaactatttcctcactacttagatggtgaaaaaaagttttatcttcctactgcccttgacctgcctttgattgatgaccgagaaggttgtacgtctgatttggtgggagaaatggaaagcaacggggaacttcgtaaactgctattcgagtacaaccatctaattgcatgcaggtcttgtgagtcttttacgattaataccaaatacacagattcagatgatctaagcgatcaggaggttaaagatcgcattgatagtaatttcactaaatcattttgcctaagcataatgagtaaagaagacgcagaggctagactaaatgataaataa

SEQ ID NO: 196825 - DNA, 666 bp, Klebsiella oxytoca; identical to SEQ ID NO: 170780

SEQ ID NO: 196826 - DNA, 2337 bp, Klebsiella oxytoca
atgagttggaaaataatccgaattgaaatttcttgctttaaagcgtttaagcacatcgatctagatttaggcacttcttctctattgactctagatgggccaaatggatacggtaagactagtattttcgatgcggtcgagttgctgcttacaggccagataaagagaatagacaatcttttctcgacattaatgacaaaaagtaaaacaaattatgatgataatctgttctggaatattcgttcaggtaagaaagatctatcgataaaaatcgaattttcagacggcgaacgcaagttagtgttagctagacatacgcctcgtaagacgttcgaaactaaagcgaacaaccgtgctgataaatttaaacactttttactttatgaattgccagattttgactctaaagcctatatagaatccaataaacgtaatgacgagtttcttgatgaaatttttgggaggaattttagggagaatttctcatttttgaattatttagaacaaggtcaaaataagctgcttcatactcgtgtagatgagcgtaaagatgagctagggagcttatttaatattagtgatatcgccgctgaaattgaaagctgccgatctgtttcggcgaaaatcaccaagtatttaggcgatgagaaacgcaatgcagacttggattcccttaacaacgagtgcactaccttgcgtgcaatggttcaagcagatttaggaagagttgaatataaaaaagtatctactgctgagtatgaacccgcttgggataaggagaatgtctttcctacatatgctccagactttcacactcaattattggattcaatacgcaaactaagcgaccttcttgctcagaaagcagccattcgtatcagggctaataatgaaactatagaagctgatgttaatgcgcacatggagttacttaatagcttggctcgtatgggggcggatatcaacaagcttgaagagctggaagaatcgaaaaaggaactcgatcaacacaccacagctacagccatcattaaaatgggagcttcagtcattacggttgagcaggcacgtacgttgaaggggtggctgccgaatcggcttgagtggtttgaaacgaagattactgaacgtaatggtcttcaaaaagaaaatacaatcaatgatagcgctgcagccgaattatctcgcttaaagcaacaactaattgatgaacacgctaagctttacccggaagaccagctttgcccattatgcggtaacaactggcaaacccaccagttgatgctcaaagccattgaggaaagagcccagataattgctgataccttgagcactgatggtaaaaaattagtaagtttgattacatcgatgacctctgaactcgccatcattgaggcagacattgcggagcgtgaagcgatcttgaagcttaagttcgacgacacactgtataaaactttgacagcagctaaaccacgtttaggcgcaatccagcaactagctgaacggctcacagccgagggtattcaaatcacatacactttcagcaacgacaaaacagttgttgaagctaggctagaagagttatgcaatttgatgcgtgctaagaaaacagaagagatgtttgctttacccgaagactggcgccagaccatccatgcggtgttcaaggacatacaggacttctacatctgcgtaccacaagatttaaaagataaagagttatatatcaagataaaggctaatgaagcgcaaagtggaaggcttaaaaaatgcttggaagatcttcaaaaaattcaacgcgagaacgcagcagcagaaaaagccaaagataaggtcaacaagctgcgtgcgacattagtcaaagcggagcaaaaatatgctgatcagaccatttcggaaattgagcttattttccatatctacagtgggcgacttatccagaactaccagcgaggtcttggattgttcattgagagtcgagatggcaagcaactaaggttcctgacagcggaaaagtcagaccatgatgcagttatgtcgatgagtacaggtcaagtctcagcacttagccttgccttcttcctgtcgctcaataaagtttatgcagatgtaccgcttattctcattgacgacccctctcagtctctggatgaggtgaacatagcatcactgaccgacttgcttcgctgtgagctaaaacattgccagctcatcgtgtcgtcacatgaggaagatatttcagcatacatgcgataccgttttaatcgagcaggattggcaactaattctctcaacatgcaacaattagcaaaagaagcgcagtttcgttcataa

SEQ ID NO: 196827 - DNA, 564 bp, Klebsiella oxytoca
atgactgagagcaccgtacaggatgtaatgccgcctgacgtacaaaccaatgacactgcgcccacccaggcattcagctttggtgatcccattcctgtactggaacgccgcaagcttctggattacgtggcatacgtgcagatggataagtggtatgaaccgcccatgagctttgacgggctggcccgcacctatcgtgccgctgtgcatcacagctcaccgattgccgttaagcgtgacattctcagcagtacatatatcccgcaccgcctgcttagtcagcaggcttttacccgttttgttcagtatgacctggtatttggcaacgcctacctggaaaagcgtactaaccggctcggtggagtgctgtcactggagccgaccctggcgaaatacacgcggcgcggagttgtcctcgacgcctattggttcgtgcaatacggtatgaccagccagccctatgaatttacgccgggaagcattttcatctgctggagcctgacattaaccaggaaatttacgggctgctcggctatctttcggccatcccatcaacccagctga

SEQ ID NO: 196828 - DNA, 216 bp, Klebsiella oxytoca
atggcacgattatgcgggatacttacacgcgtgcctccacagatgatggggattatgtcgagtaatgttggggagtttagggatgtggaaaaggccagcggcgtttttgtacgtaacgaattgatgccactgcagaagcgactgcaggaactgaataaatggctagatgaagaagtgatctgtttcgaaaaatacaccttagatattgatttctaa

SEQ ID NO: 196829 - DNA, 168 bp, Klebsiella oxytoca
atgctgaacaatgaaccctcatttgcgtcgcttctcgttaagaaaagcccggcaatgcactgcgactacggctggattattgggaaggatggtaagcgctggcatccgtgccgctcgcaggatgcgcttttggccgaccagtccactacccaacagaggaaaccatag

SEQ ID NO: 196830 - DNA, 237 bp, Klebsiella oxytoca
atgccgcagtacgtcctgaaagccaccgccgagatcggccgtgtcgctgtcactgcggtttctggtgttcaactgaatgcggccacccgccggcaggttatcgaaagcgtcaactccgttactcggctgatgccacttaccgctattccactgcaggcgcgtttacaggctaaccctgcaatggcaagtgtcgtcgataccatgacgggtcttgactcttcgtttggtctgagctga

SEQ ID NO: 196831 - DNA, 591 bp, Klebsiella oxytoca
atgtcaacatcaaagtacccaaataagatcaaaataaatcccaatcagggtggcaaggctgcgattgagcgattggtcgaggcatatgggtttacaacacgacaagcccttgctgaccatctagatgtttcgaaaagcacgttggctaatcgctatatgagggatacctttcctgcagactggataatccaatgtgcattagaaacaggagtatctcttcggtggctatcgacatctgaaggaccgatgtgggtagatgcaaaaactcaaattatgagctttaccaaacaaaaactcagtggaggaaaaccccttgataatggatatttattattcgacttaacattattgccaaaagatcttgagggcatttcagctattgagacagctgacgcaacatatctggtaaaaaattattcaaatgaagtaaatgatggtttatggataatttctatcgatgggattttttctatccgtaaattagtaagattacctaacaatcgcgtaatgctagaatctacatcaagtaaaatagaatgtaacattaatgacattagtattattgccaaggtaatcatgacctgcaaataa

SEQ ID NO: 196832 - DNA, 1623 bp, Klebsiella oxytoca
atgattgttggtgtgctcttaagaaattttaaaaacttcagaaatcaacattatattccattaaccataaatggaagctcttcatggttgatcggtgaaaatggtgttggtaagagttccgcactacaagctattgataccgtgctaaacaaagccgatatcaataggcttgatattaataatgatgctcgcagtcaagggtttgacacaagggagccgttcattgttcctatttttcttatccgtaaagaaagagttaaaggtaatacttcaatatttaaaacattagaggttattagcgatataacatggcaggtcgaaagcgaggattttaactcttcgcaaagagttttagcagaaaaaatcattaatcacagaaccctccttgaatcccactatcgaactaatgattatttccttattcctattggaattataaaaaaatctgctggtgaagtgcctctgccatttatgtctatttttgaatccatagatgattataaaaatcaaatcgatgatttaatacctgactcagctgcagtcaactctacgcaaagaaaaaatttcttccaaaacactttatataaaatgctagattttgtaagagagacatataactatatttacttaccagcagaaataaccacatcagaatactcaaaaattgagagtgaactgttacaatctctactgggtgaaaatctccaacagaagatcagtaaaataataaagaaaaaggatatttcggaaataaatcaatatctaaacgaatttgttgagcagctatctcaaaaacttaatggcaaatatcatttcaaaaggccaacacagcggcaaaactcttttactcagcgccacatgattgcaaaaattatagaatcgtactttagcgacaaaattttaaattacatagatagtataaacagagatactcctgtacacaatctgagttctggtgaaaaaagaaaagctttactcgatttatccatggggtttttgaaaggaaatccgaaaaaaactcagcaatcaactgttctcgccgtggacgaaccagaactttccttacatgcaacatcttgcttcaagcagtttgagaaaataagagagataagcgaactgggtatacagacaatttgtacaacacactggtatggttttctccccgcagctatgagtggtagtgcaacttatatatcgccaaaccaatcatttattaagtgtataaatcttgaatactacagagaggaattatctgtacttgtaaaagagtctcgcggttcatatttagatactttagaagttaaaagcaatcatgatttagtacagtctataataacttcaataacctcatccaataattataactggatactatgtgagggtaaaactgataaaaaatatattgaagcccatcttgatttcgaagaaatagacgaaaaaaacataataattttaagtgttggtggttcatttgcactaaaagatatctattcatatttggttctagctctaaaagacagaaggccagccattaaagggaaagtgttctgtttattagatactgacttagcatatgataagttcgaatctatagatagcattccacaaattagaattaggtga

SEQ ID NO: 196833 - DNA, 456 bp, Klebsiella oxytoca
atgatggtcaaattctcatttaaagttccagttttcgacttctccttaacatttgccattatcgagacattaataactcaaagtgaatcctcaattgaaaaagggattgcagagtataaagaaaaaggcccagaagaatatgtaattgacatctctcctgaagagggactttatcagtcgattgatcaatatatgggtcttgatagttcattagttgatctagatgagatgttcttggagtattacccaagtgtatttagaaggtctgttttcttaactattttcgggatgtttgagcacgaaattgaaaaattctgtaataatttttcaagcagacaccaaaccccaataaacctttcagatcttaaaggcagcggatttgagagaagtcatcttttcatcaaaaaacttataggaatgagttcaacggctcactatcaaccatcagaaaaataa

SEQ ID NO: 196834 - DNA, 279 bp, Klebsiella oxytoca; identical to SEQ ID NO: 126505

SEQ ID NO: 196835 - DNA, 285 bp, Klebsiella oxytoca
atgaacagagaaactgacagacttgcagacgtactgattgaaatgagcgccaaagcgctggtgacatggatgacacattccgcattgcacgacataccgcgcgaagcattactggttcgcggcaacgattttgtgtacgccctacaggcaaattttgtgctgctacgtgatgttctgtcagaaacgctggaagatattgagcagcagagccattacctcgaagaaagactggaaaatatagagcatcggctgcaggcgcttcgagcagaggttaatctgtattag

SEQ ID NO: 196836 - DNA, 786 bp, Klebsiella oxytoca
atgatatctgataacaattcatgggttctggtcactggcgcttcggggggattcggtgaagagtttgcgcgccagtatgctgccaggggccactcattggttttggtggcccgacgtctggacaagcttgagacattagcggaatcactgcggcaggcatataacgtcagggtgatagtggagcagttggacctttctgatattgaggcaattgctcagttgcattcacgactacgcgatcagagtatttttgtcgacatccttataaataatgcaggccatggtttgcaaggcccgttccttgatgccccccttgacgcgctcatgaacatgatacaactggatatagccagtctgactgccatgacgcatatcttcgggcaggacatgcgccagcgaggtagcggcaaaattcttctggtcgcgagcttactggcttattatggcgtgcagaacatggcagtatacggggcggcaaaagcctatgttctgcggttgggcgatgcattacatcgcgaatttaaacgcgatggcgtgactgtcacttcactttgtcctggcatttctgacactggatttgctcagtctgcaaaacagaaaattacattcgcgctgaagcttctcatgatgaaaccggcgcccgtagtacgcacgggtataagggcactgcataaagggaaaataagtgttgttccgggttgggcgaacaagttagccgtcgttatgatctgggcgacgcctcgcgggatacaccaggcgatcatctctcgacttatgaataaatga

SEQ ID NO: 196837 - DNA, 663 bp, Klebsiella oxytoca
atgacaacaccgacatatataagggcacgctctgctgagcagaaggaggaacgccggaggcatctgcttaacaccgctaagctactgttgaacaacattgctgacgtgcatgacctggggataaatgagttagcgcggtctgcgcagatgaccaaatcaaatgtttatcgatatttcgagagcagtgaagccgtgttgctcaccgtgcttatagaagagttcacgatttggcataccgagctccgagcagctcttgatctggggaggaggcaccagggaaccatcgagtatattgcgcaggcattcactgcaacccttatcgctcatccgctgatgtgccggctcatcagtatttttccttcaattctcgagcgcaatgtcactgccgaacgcatgatggcatttaagcttgggttactaaacgtacgaaaggctatagcgctcgactttcacaactgtatgccctctgtcccagcaagcactttcgagaaatttattcatcaaaccctgccgttgcttatcgggctctggccgctaagtaatccgggcgcgatggctgcgaaagtgatggcgcagcccgaactggcagagctgcattatgattttcaacaggaactggaagaaggcgtgttgatgcttctacgaagcagactctgtgaataa

SEQ ID NO: 196838 - DNA, 3075 bp, Klebsiella oxytoca
gtgaaaagcaataattattctcgtggttcagaatggcgtaaatgggacttacatatccacactcctgcatcatttcattgggaaggacaaaaatttaactccacccctaacccagctgataatatacggcttatagatgaaatgattcaggcattgaatacagccgaacctgccgtatttgcgatcatggattactggacttttgatgggtggtttgccctaaagaaacgtttattagacccggacgcacctaaattaaataaaactgtcttccctggaattgaattacgattagtgtcaccgatggagagtcggctcaatgctcatgtgttgttttcagatgaaacaaatgatcaagtattaaaagattttcttgctggattgagagtcgcacttattgaacggccattatctgaatattcgttaaaatgtcttgcacgtcaagtaggtgaagatttactacgtgaaaaaggttttaaaaaatcggaagttatgagcgttgatgatacagcattgcttgctggttcaacaatcgctgaaataacatatgaaagttacaaacaagcgataaaaaatgttcctgataatatggccttgggatttatgccatttaatactaacgatggattagctgatgtaaaatggcaagaacattatgcctacgtccttgggttatttgaaacctcccctatttttgaaacgagaacaccagatttgtgggctgctttttctggagtcaaaactgatacaaataaaaaatggatttcagattttcagcatgccttaaagaatataccaaggcttgctgtttcaggaagtgatgcgcaccgatactatggcaaacaaggcagtaatgattgccgaggatatggcgactacccatcgggaaaagctacgtggataaaagcagatccaacatttgaaggtttgaagcaagcgatcaaagagccagcaaaacgttcgtatataggagcactcccacctaaacgtaaattagtcagcgaaaatagaagcctttttattgataaacttgaaatatcaaaaaaaaatgatgcagtgatacctgataaatggcttgatcaaacgtctattactttgaatcatgatcttgtggcaataataggtaacaaaggaagcggtaaaagcgctttagctgatattacggcgctactaggtaactcccaacaaagtcagcatttttcattccttaaaaataatagatttaggggtaaagttggtgagccagctaaaagttttgaagcaaaagtgacttggggtgatgagaaaatattaacaaaaaatttgaatgagaaccccgctttagagaaagtggaacttgtaaaatatatacctcaagggcactttgagtcattatgcaacgctcacgtgtctggagaatcagatgcctttgagaaagaactcaggtctgtaatcttctctcattctagtgatgccattcgcttaggtgcacttagtttcgaacaattaattgaagaacaagaaagtccgttacgcagtcgaatagaaagcttccgtagtgaactgcataaacttaatcgtcaaatcgaaactcttgaaaaccaaatgagtgaagaagcacaaaaggctcttgctgagcaattagttcaaaaagaaagacttctagaagagctcattaaaataaaaccagcagaaatagctgagccaaccaatagtttatcacctgagcaacaattagtttcagagaaacttttagctataacaactcagttagaaagaactattagtaataaagaatctaataccgaagagcaaacaaaaatagcagccaaaaaaaaggcatgcaaaaatataagagaaggaatcgaagtagttaagagatcgatcaaacaattcaattcagagtttgagtctgcaatagagttgctcaacttaaagcctcaacaattaatcagtcttgatatcaacgagaacagaatcgatgagattgaggacagtttgattgttcatgataactcaattaaagaaatcaatataaatttgaacagtgaagaagaatctcttttaaaacagaaatcaagtcttagtgaaaagttaaatgcaccacagcaggcttttcaagaatataaagaacaactaaaggtatgggaagataaaatcatatctttacaaggttctaaagatgaaccagatacgctcgaggggttgaaacaccgtaaaaatatattggatactttaccaaaccaacgacttcaacttatggaacaaagattatcattagctaatcaaatactcttaatactaaatgaacaaaaagctaaccgcgaagccctctttgaacccgtacaatcattaatacaaaataactcattgatacgtgacgaatataagttacagttcatggcagaactaagttgcacagccgatcaaatttataacaaattattttctatcattaagcaaacctctggagagtttagaggtgagtcggaaagtttatcagttattaaagaccttatagataaacatgatctaaacgatatagattctacacttagtttcatagatgaacttcatcgtaaactcgaagcttcttctaaaaataatgttggtatagcatccttattacggaaggatcgcacctccaatgaggtatatgacctaatttttggattagaatatattgatcctagatataccttaatgtttcaggatgcgcaaattgaacaactctcgcctgggcaacgtggtgcattattattaattttttatttgctggtggataaaggtaatactcccataatactcgaccaacccgaagaaaacttagacaacgaaaccattgtcagtttgcttgtacctgttttaacggaagcaaagcaaaaaaggcaaatcattatggttacgcataatccaaaccttgccgttgtttgcgatgcggagcaaataattcactgtgagtttgaccgaaaaaatgggcataacattacatatacctcaggagcaatagagtgtaatgtgattaataataaggttgtaaatgtccttgaaggcactatgcccgcatttgataaccgtcgtgcaaaatatatgtga

SEQ ID NO: 196839 - DNA, 846 bp, Klebsiella oxytoca
atgaggaaactaccgattccaactataatagcagttgatatattaagactatgttcctcaagtataagaaatgagacattgaaagtaaaccttcgtttaattgaaggtgacgtagacaatgctgaagtggaatataggaagcacgcaattgcagaagagttgtatttaattaaagcaaatgaaaatattggagagcattttactgggaaacagatggaacgtgtttataataatacatttgttaaaagtaataaaacacgtcttatatatgatcagctgaaaaaagcatgtgaaaatgacatatgccccctttgtgggcagggaactgtttaccagttagatcattacctaccaatttcttgtttcccgatttatggggttagcccaattaatttgataccagcttgcgcagactgtaataaacgaaaatctatctatgtagctgatgcagcgaataaacagactctacatccatattttgatgatatagataatgaaagatggctttatgcttctgttattgaaacacaacctcctgcgctccagttttatattgagcctccagcacattgggggggcgttatatctgaacgcattttagcacacttcaaaacatttggattagccgcgctttatgcaactcatgctgctgtggaaattactaacatacgatattctctgcaaagaattgcggttggtgaaaattctgcaaaaaacgttagagaccacctcatagacaaagctcaaagctgcatgcatgcgcgacttaattcatggcaaactgcaacttactatgcattagaaaaatcggattggttttgcaatggtgggtttaatattacctaa

SEQ ID NO: 196840 - DNA, 1545 bp, Klebsiella oxytoca
atgttctttaccgttatcgaaaagaatgaaaagatatcatataataatccattaaaagcgtatcttttagtcgattattgggatgactgggcaaaataccgaacaatgttcaccctaattgtaatcgatgaaaatggggataagcatactattggttcagtaaaaataggacagaaaggacttcttccagcgcaaaaaaaatcagataaccatcgctgtccaatgcttgataagcattttgatattttaaagggtgattacttttcgctgggacaaagcgaagattattatgaatcactaaataaattaagtgagtcacttcggacaagagttttttcaggattacgcgattgtgcagcgaatttaacaatatttgaaaaatatattaatgaaactgttatggttgaatctttattgcgggatattcggaaagaaaatgtgagagggaaattaaatcgtttgagtcgtggtgatgctcaattgacagagtatgctttcacgtatacattccctgattttaatgaagagaagcagcctaaaattttatttgaggtcatacctgaatccaaaccacctactaacgttcatgttttgatcgggcgtaatggtgtaggaaaaacacgagctatgaaaaatatagctctatccatcttgggaagaaaaacagaagaaaatacatcaccaggtttaattgaaatgaatcatagtagcgcaataggagaaattgcgttttcagggttaatattggtttcatttagtgcatttgatgattttgagttaaaagcatcagaaaaagacaattttatatttcatcaagttggcttaacatcgatcatttcgacagaatcattatccccatctaaaaaggacaattcgataagctccgattttgcgaaatgcctgcagcgctgtaaatcgggtgttaaagcacaacgatggataagagcgatgaaaacgctggaggaagatgatctttttgcggaagcaaatgttacatctttactagaagatgcagagtcaccagcacaatggcgagtacgagcaagaaaattatttaagaaactcagttctggacattcaattgtacttttaaccattactcgattagttgatcttgtagatgaaggtacgcttgtattgattgatgagcccgaagggcatttacatcctcctctactctcatcttttgttagaacactttcagaccttctgattagtaggaatggtgtgggtataattgcaactcattcgccggttgttttacaagaagtaccgcgctcatgcgcatggaaattacgtcgtagccatgccgttacagttgttgagcgtcctttacttgaaacatttggtgaaaatattggcatactgacgcgagaagtttttggattgcaagtaacccagtcaggcttccatagaattttgcgcgaagaggttaatgatgggaaaagttaccgtcaaattattcgtgattttgataaacagttaggcgaagaagctaaagctattatccaagcattaataatacaaagagatggggaattgtaa

SEQ ID NO: 196841 - DNA, 906 bp, Klebsiella oxytoca
ttgatcgaatcgctgataaaaaatttaaatcaggatattgctattcttcaacttcgtgtcgagagagataaggacacgggttttaacgatatgtcacggctacttgaggcaatttctatacagttattcaaagcattaggtattgccaacctcaaaagtaaaaaccagattagagttaactttccagccattgatgctgcggatgataacatgaatggcggaatagctgtccaggtaacctcagtagctaatgcagtaaagataaaaaaaacaattgagactttcgagaaaaaggataaaaacggtaaatccttgagggacagatacgcggttctttacatttttggtttctgtaagatctcaaagggtgtgatagttccaaattattgtaaggttgtggagccgggttttttccttaacaggcttattgactttgatgatgaagaaaagatacaggttgttatcgattctatgcgtcgccatgtagactattcttctatccacccctacgatgatattgactgtttgaaaatcatattaggttatgtgagtcgaaatgcggtcaggcactacatgtcctgtgaaggaagtattgaatatatgacaaaaggcctcaaggaaatctcggagctaatcggaaaaggtactgttaatggtagacagaagtcaaaggcccaccacgaatttgaagatcagaatatcgcgagttttttgaggcaggtgatgagcaaaattggtagcataattgcgattatcaatcatgcgagccgggatggttttgtcttccttgacgagcatgatatgaagaaaattgataatcagaaacgggaaatgataatagcagcccagcatgtagctgttgactacggtattgatatacaattgggaatgcatgaaatagattga

SEQ ID NO: 196842 - DNA, 1983 bp, Klebsiella oxytoca
atgtattttcaaattcgaggtatcgtactttggccgcggaacaaaaaattccaacctcgcaagttgcgttttgaacttggtaaagtcaacgtcattagtggagcctcacgtacgggtaaatcagcggtcattccaatcatagactactgtctcggcgcaagcacttgctctattcctgtaaataccattcgcaaatactgtgaatggttcggcatcgttgtggcgaccgagcaaggtgacaaactcttggcccgaaaggagcctgggtctcagcgtagcaccaatgatatgttcctgctggaagcagagaatataaccaagattcccagccgtcttagtaaaaatacaaacgttatagcagtcaaaaggctacttgatgacctagccaatctgtctaatcttgatttttctggtggagaggatgtctcggggttcgatgggcgcccggcttttcgagatttggctgctttcacatttcaaccacagaacgtagttgccaatccggatgttctattttttaagactaacacttacgagcaccgtgaaaagttgaggaagatcttcccctatatacttggtgcagtcacatcagcattgatggctaagcagttcgagctgaacagagcccgccaacttctacgtcgtaaagagcgagaactcagggatgcccaagatgtctccgcgcggtggcttgccgacttgagatctaagtacagtgaggcgcaggaacttggtttgatccccaagctggaggatgaaatatcgcgaaaccaaatgattaaacatcttgacgaaataatcactcgaacagacctaactttggctgttagcacattaacgatctcagatgcactaagtgagctgaatgatttggaaagtgaagagcgagttgtttcgcgcgaacttactacgcttcgtcatcgcttggaagaaatgaaccgaatgcgaacaggtgtgcaacagtatcagacggcattatcagtgcagagggggcggcttcaactatcgagttggttggtgtcgcatgcaaacgatgaatcggattgtcccatgtgtggtagccataatgattcagccaaacgaaaactgcgggttctggctcatcgtctggaagaagtcgagttagctgcgggcgcagataaggacaaagaaatacctgccgccttcgatcgtgagtttcagcgcgttactgcagaggttgatagcgtgaccgagcgactgagatccgtacaaatccgcaaaagagcgttgacgagtagatcgaaggaagctaatgaccagcaattttctgcgaagcgtaccgagcgttttataggcaacattgaatcgtcattggatctacatcgcaaattgggcagcgacagcgaacttgtcgaagaggtgcggatgctcaaggaatcggtacaaacattagaaggggaactccgcgaacaagatatcgaggctcgtaagcataaagctctgcgaattatcaacacaaacgctgggaagcttctcccctatctagatgttgagaatccacacgacccgatttctttagaagtcaatgatctaactatcaaagtccttggggctgagcgcgatgactatctttcagaaataggaagcggttcgaattggctttcctatcatttggcagtattgctctctcttcaccaattctttctgggccaacgaagcagccctgtaccaggatttcttgtgcttgatcaacctagtcaagtttactttcccaaacccacggtgcatcaagacattattttagacgaagaacccaaggttcgggatgaagacgtggaagctgtccggaaggcattcgaagttatgggcaatgtcgtgcttcaggaaaatggaaatctccaactcatcgttctagaccatgcttcgagtgtagtgtggggcgaaattgctggagttgtcggcttgccggaatggcgtgatggtaccaaattggtcccaatggaatggtttagtgaaatttag

SEQ ID NO: 196843 - DNA, 495 bp, Klebsiella oxytoca
atgctggcaagagaagttcaaaatgttcagaatccggcactaggcgcagcaatcgtctggcgtttttgttgtggatatgtcgagacaaatcgtataagtgcctcaccccctctacctcttctatttctagtgctccctattattcttcatcaagcaacctcagaatttgtaaagcgtaccttcaaaagttcgggcttacgggcgtttgcggcaaagttcggggactcatctgtatccaaacaggacttgttgttgcaaattcaagagcgcgctattcgttggcgcaagctcagcctgctgtccattgaactcgcggttgctggaaaactgatcaaacttgaagaaaacggcgaggtaattccattatcgcagactaaggcgagggggttatccgatgaggtgaggcaacttatggatttggcagaaaaacttggtgcttggttcggtgaactcaccgtgcatgaagtcgtaacaacattgagggtgaagctctaa

SEQ ID NO: 196844 - DNA, 1212 bp, Klebsiella oxytoca
atgacgacttcaagaacgaaaggtcaatctcgagtcaagcgtagaaccgaggttccgggccaggcgttaggatacagcctccaatttacacgacttactcatttgttgcttcaagcgcccgagggtagtttgtgtagtttggagcttcttgacgatgtagcccaagaggatggcgatggcggcgttatactggttcagagtaaaagcgcacttacagctaatcctgtggctgaccgagcgaaatcactatggaaaacgctttcaaattggattgagcttgcagcatcaccagggtttgaaatagacaaagctattttcgagctttatgtttctcgcccagttgaagggctgatcgttgaaagtttcgcaaaggctgatactcctgaaagtgctagattagccatcgcacaggctcgcactttgttatgggggagtgctccagattacgatatgaagaaaagtgtctctgtagaaattgctacatacgtcgaaaaggtgtttacagccgacccggatctttcagaacgacttatttgcaattttcaactgacgcagggcagcggcagtcctcaggcagatcttgaggcgctagttcgaagtcaccccgtatcaccatctaaggttggagatatcaccaaccatctttgcggtcaggtgaagcgccacatcgatatgctactagagacgggaaagcccgcagtcattgcacgcaatgacttccatgtctggtacacatcgttcgtacaaaaaattgatcgacaaacggtcctatcgagccgtgcgcatccaccatcagaggaaatatcacgggaatatcttcctgataatttcattcgacaactagatatcattggtctgccatacgaagagaaactcggagctgttagtgatttcttaatggcttccttcgatcggacagattgggctgtccggggagaagttgacgagagctcttttgacgatctaaatgatgtccttaagcgctcatggaagaataaacagcgggtttgtaggttgaatcacagagaaagatccgagcaggagcaagggcaatttctttattcagactgcatgcagttcgttgctccagttcaggcaatgtctacgccggggcacttcattcctggttgcttccacatgcttgccgatgagttggttgtaggctggcatcctaactaccaaactcagttgaagggcaagaaggtggcgtaa

SEQ ID NO: 196845 - DNA, 876 bp, Klebsiella oxytoca
atgaataaacctgacggccttcaggcctttgaacaaccgctcgcgtcgcttccgtgcacgcttcgccagcttattcttgaacgtatccagaacctgactcactacgagccgctgattggcatcatgggcaaaagtggtgctggtaaatcctctctctgcaacgaacttttccggggcgaggtgtccccggtgagtgacgtgaacgcctgtactcgcgacgtactgcgcttccggctgtgcagcggttgtcacagtctggtgattgtcgatttaccgggtgtaggtgaaagcgggcgacgggatcatgagtaccgggccctgtaccgtcgaatcctgccggagctggatctggtgctgtggatcattaaggccgatgatagggcactgaccgtggacgagcagttgtggcacggcgtgatgcaaccttacaggcaaaaggtacagtttgtgattaaccaggccgacaaaatcgaaccctgttatgaatgggataccctcaccagcaaaccttcaccgcaccaactgggaaatcttaaagcgaagcaggctgcaattatggcgatgtttaaaccgcatcatccggtctgtgtggtgtcagcccgcactggctggggcattgaggagatggtggcagccatgatgcgctgtctgcctgaccgcgccaccagcccggtagcgacacaactgcacgggaggctatgcacagagccggtaaagtcgcaagcccgtaacgattttggtgaagctgtgggccgggttttcgatacagcagaatcatcttcgttcatgcctgcatcgctgaaaacggtgattcgtagcgtgcgtgatgcggtggtgtcggtcgcacgggccgtctgggtctggatattcttctga

SEQ ID NO: 196846 - DNA, 1017 bp, Klebsiella oxytoca
atgaataggtgggaagatttcgcttttaatgaaattcacacgctgatccgagctctcaacataacacagaacagcccgcttaatgtgaatgctccggaactgagataccttgccgcgctttttgccgaaatgtcttatcacttggtaccagaatgggaagtggataagcataaacgcgcaaagctctacagagtcccgagtgaaggctatcagatattggtcgaccaaggtatccggggcagtgaaaatgttttcgaagctttcattgatgcggaactaccaaaacccttcattgcgtcatctgcagggattgtagtggttggagtggtaatcgacgggattatgttcattggattccgtggtacggcactgctgttcgactggaaggttaacttacgtgcagagcttgtgcgcgtggattccgctcaccgcgtaacaaaatatcattggtttgaccattgccacattgaagataaaaaaattatatctggtggattgcatagtggttttgcggaagaagccgttcggataacaaagcgcatttttgacgcaatacctgaagcagaccgttcatctatcgagcatgttgtactcgctggccattcactgggcggagccgtagcggcagtatcgaagtctctgataacacaatggccagctacggcgtgtatattcggtgcaccaaggtatgctgatgctggtttctatctgaattgtttcgacaattatccaatccagatacgccgacttggtgatttagtaccaaccgttcccccacgttcatatggtttctgcgaccaccctaatgagttcgccaccaacggtgaagagtacatagacacaagtttaaattcatggcttgtgagtgatctatgcaattggaccagatttttgagtacaaaaaccgctgctcatagcatggagaattatcgcacggagataggcaaggcgataggatctcagttcgcagataaacctctgacaaaggcagtaaaaattacgaaaaggcacatatga

SEQ ID NO: 196847 - DNA, 228 bp, Klebsiella oxytoca; identical to SEQ ID NO: 147913

SEQ ID NO: 196848 - DNA, 2655 bp, Klebsiella oxytoca
atggcgaataagttaaaacagatcattaccccggttgaggtttcagccgtgatgaatttcgatgcaactgatacgcactggcagtatcaatccggtgcttccagcatggcggcgaagcaggcagagggggtggctgggttgtggaatttgctgaataaacaacgactggcactccttgctgatgaagtcggcatggggaaaacttatcaggcgatgggagtaatgttgttgttatggcaggcaaaacctgatgcacgcattctggttatggcacctaacaggacgctctgtgataactgggagagagaatttagcattttcacagagatacactatcgggctgaacataatgcctttaccactttagagggtaagacaaaatatgccccacaaatttatggcagactggcggagctggcggccgctgtggaaaaaaaatctcaccatttttaccttactactatccattcactaagcggtctggtccctccagatgaaaaaaaagatgctttaaatgctgccgcgtcttatggcgtgttatatcgtcagcagattaagcaagctcttggaaaaggagggtttgacttaattataatcgatgaggctcattactttcgtaaccgaagcggatcacagcgtgccgccgccgctcaggccttctttggtgatgcgcaggaccggctggggagcaatgtactgttgttgacggcaactccaaatcactcagcatcgcgaaatgtttatgacatatttagctacttcagtgacatgccaaaacgttatgcagaggatgatgtccgtgcgctgatgaatgattttgccatccgccgactgcgcaaaatgcagggcagagagagcagccacagcaaatatgaatatcgtcatgagcgcgctagcatttccagttttactaataagatggatgctgagttgttttttgctctatatcagaaacaactcgtggttcaactggacaaagagaaaaaggcaggtggcggcaggcgcatgctatatggctatcttgaagggtttgaatcaacgggcagtaccgcaagtgagcgggataatagtagtgatgaagaggggcaaatccataatgacttcaaccacgcgccggattctgctctgctcaatagcttgacccggcagtttcacgatatctataaccgctttccagatcatcccaaatacgacactctggtagaggcctgctttaccagtgatccgttcaagcagtctcagccgctacattgtagtaagcatttggtttttgttcgtcgaataccatctgtacgcgaaattactcagcgcatcaacgcacgttatgatgaaataatggctgagcgattgatgaatgtctggcagctacctgcaaaggcgctggcagaatggcgagagtcgggttggtcccgagatatttttgttaagcttttatcggaaaaatccaatgaaaagtccgattttgatgagcatatgctggaggacggggagacagatgagcctgaaacggataacgagctaaagctttcaagtaaaattgccgagctatttgttatgaagaaaacgggcctgcgcagtaccgactgcgccaacgttagtttgcgtttccgtcgccctgaaagcctcttttcattatttcttgagcctgcattggatggtacgaccgggacctatcattatcattaccgcaaagagtctggtgaacgtcaacgtgacagctatggtgatgccgcgagagatgcccggctgcagcagtcgacaacagctcagaaaatcaaatatatcactgctttgcccacagcctggggattgatgtttcatgagctgccgcggccagcaaaagagcaattgattaagtggcgtgaccagcctaacggtatggcaattattgagaactttgccaactatcttcgcacgggttacctgtttgccagccctgtgatcattgagctctattgctggtttacagagttcaaccgtcgacctcaaacaggtgaggtccagcagcgatatcagcattttgtagaatgggtcaccccaaaattgaatggatcactgatgctacgttattttgtggctgccattgaaactttcgaaacgctatgtgtgaaaattgttggccagaaactagataatactcaatatacttggcgcgagttcactagcttgagtagtccaagttggtatgccagcgggcagtcaaaaaatcgcgaacgtttaattcgtggatttaattcacctttcttccctaatgtgctggtagcaacctctgtgttgcaggaaggcgtgaatcttcatcttcaatgcaatcaagttcatcattatggcatcgcctggactcctggtgataacgagcagaggaatggacgggttgatcgcctctttggtcgaatcaatacaatgcttcaagtccagggggcggctgagatgattatcaattatccctaccttgcaggtaccttcgaccaggatcagttggcatcatttatacgccataaacacagtgttgaagagaagttagatagttgcgagctggaggattttgacagcgaaattgatattcaggaggatcctcaaggttggcaaaaatggctacggcattcttgtaaggataaagataaagaagatccttacccagccaagtttgatcagtag

SEQ ID NO: 196849 - DNA, 1902 bp, Klebsiella oxytoca; identical to SEQ ID NO: 105676

SEQ ID NO: 196850 - DNA, 837 bp, Klebsiella oxytoca
gtgtggcaggcagcagaggcatttattcggaatgtaccagagctgaaaaaattacatgcagcggcattgacttacatgcaattgaaaatgcaggcctcacataagcgcgacctcaacccatttttcgaagatattcctgtcggcctaaaaaaggcgtatgtaaaggcattccgcgacccgaaaatggtcggggattattcgcgaatattctggctacaaagaacggggttagataaatatgcagcgggtgctatttatcgggtactcaagcaggaacgtttggacgagttagagcttacagatgctgaagttttcaaacgtgccatgcatcaggcgaaaagtatgcctgaaatgaatgaaagtgacctcagggcgttacaacatatcagtcaggcggagccatttttatccctgatcgacctgatgttttcaggcttacgccgacagagtagtcagactttggcagaatttcgtcaattctggcagtcgcgcggtcttagggaacttgatctgccacaaaaggcggctcagcttctggaaaatgatgtgctcctttcctcgctttccggtacgcccgccagacgttttcagcaactattagcactggcctgtatgccgtcgctggaagatcaggttcgaggcttgctggattatcatcacaagataatggagtcaagggggcagttcccgtggctcctgcttgaaggtgatgatattttgctgcaggtaccaccatgttcgctacgcgaagatcgtcagaatagcgactgggtaaaccgttattatctaccacagttcagacatttgctgaacggtttatgggggcattctgcatga

SEQ ID NO: 196851 - DNA, 591 bp, Klebsiella oxytoca
atgtacatcgagaaatttctgactgaatacgatgactcgctaacgggtgagttgaatgtggatccgcttgggcaattagtcatctggtcgtcctgggggcaggacatctttcatagccgtattacttctatcgcaaatgatgtacggcaatatacgctgaatctgctgcatcacagcgtattgcgccagatactggtcgatgaaaagctgcaaacttcaggcgtgatgaaaggtctgtatcccaaaaagcaattacatgagtttagagttgcctgtctgatccatttggaaaatatttatatctactccatgctggcggctgaaaaaagaggtgtcactctcactggtgtgcagggtattaataaagccagatctaaatggaacgctgcaaataaaaatcctcagatattttttggtcatgataaaagtagtgagttactgactaatcagatcgctcttggtaccaatgggcgctataaatcgccaatgatgaaaatgcatttttctctactgattatcgctatgatctgccggaaagcaagccagtgtggcaggcagcagaggcatttattcggaatgtaccagagctga

SEQ ID NO: 196852 - DNA, 2124 bp, Klebsiella oxytoca
atgacgattccaacgccaaaggtggcactttctgatggttttctgggggcttttgcgcggattcctaaagcgcagcaaaaaaaggtccaggaattcatctctaagttccgccaggatccgacgagtaatgggctgaactacgaaaagatccacgatgcacgcagcaataatgtgcattccgtgcgtatagaccaaacctaccgggggatcgtcctgaaacctgagcagggtgctctgtatatgctgatgtgggtggataagcacgacgaagcctacgactgggcgcggcgacacgaatgtgcgattcacccggtaaccggtgcgattcaggtgattgataccagctatatcaaacctacccccgagccgactgttgtcgataaacccaaactctttgctgcgtatacggcagagcagatcctcgcgctgggtgttcctcctgtgtttattgagcaggtgatggctcttgtggataccacagggctgaatcagctggaaagcgtgatgccagcagaagcctgggagcccctacactggctggcagaaggtctggattaccaggaagtgctggaggagtttaacgatcaccgtgatgagcctgttgataccaacgactttattgaggcaattgagagaagtaaacgtcgtttccatgtcgttgaaaatgaacaggagctactgcaaatgctcaatgcgccactggaaaaatggcgtgtattcctgcacccgagccagcgaaaactggtggagtctccggcaaatggtccggtgcgagtgttaggtggtgcaggcacgggtaaaacagttgttgcgatgcatcgtgcacgttggttatcccaacgcctggccgataaacccggtaaaaaagttctgttcacaaccttcacccgtaacctggcggcggatattcgcgccaacctccagcgtttgtgtagccgtgaggagatggcgcgtattgaagttgttaatattgatgcctggatgagcgagcagcttaaacgccatggatatgatttccgcgtggtctatgacagcgatgaagggcgacgtaaatgctggaactatgccttgcagcaagttcctgctgaattgggattaccggataacttttattctgaagagtggcaacgtgttgttcagccgaatgcggtttacagccgtgaagaatatctgaaggtgagtcgtattggtcgtggcacggcgttatcccgtattcagcgtgcgaaaatctggcctgtgttcgaagagttccgggcacaaatggcgcgagccaaactgcgagagatgggagatgccatgcatgaggctatcattctgtttaaagaaaaacaggtgcaattgccttatagcagtatcgtagtcgatgaagctcaggatataggcgcaccggcctttacccttattcgtagcctggttccagagtctcctaacgatctctttatcgtgggtgatggacatcagcgtatttaccgcaataaagtcgttctaggtcagtgtgggattaacgttcgtgggcgccgtagtaaaaaactgaaaattaactaccggactacagaagagacgcgacagtttgctgtcgggttgttaaccggcgttaaggttgacaacctggatggtgaaactgatgccagcaacgattatttatcattgcttcatggtgaaaaacccatgatcactcatgcttcagattttaaagaagaggctgcgacgattatcaagcaaattcaggcgttgttagccaatgatgtccgttcccaggatatctgcattaccgctcgtacgaagcatgcttacgagcgttatgcttctgctctgaatgatgctggaatcgagacctataatttaggtcaggatagtggtgatagtgatcaacgccctggtgtgcgtatggcaacgatgcaccgcattaaggggttggagttccagtatgtgtttcttgcgggcatcaacgatggtgttgtgccggaagtcaaagcaattgcatctgatgaccctgtagaacagcgcgatgcattatttaatgaacgagcgttgctccatgtggctgcaacgcgcgcggtaaaaggattgtttgtttcgtcttacggtaaacctagttttttactggagcctgaaagcgagtaa

SEQ ID NO: 196853 - DNA, 6342 bp, Klebsiella oxytoca
atgctgccttctgttgtcagtcggcaggttgccgacagcgttgcctcctttttacgggcagccttcccgcttaacagcccgctgtttaatggtgaagaaaataataacgtctcgatgctggagcaatttctgtcccagccggaaacgctgctgaaagggccgtatctttctgctcagctgccgtttcgtaaaagtgatttaccgctggatttctttcccaacctgacgctgccgttcccgccgcacgcgcatcaggcgcaggcgtttcagcgcctgggtatcgaggtgcctcagtcgacgctggtagcgaccgggacgggttccggtaaaacggaatgttttatgttcccgctgcttaaccattgtgctggggcatcagaggccagtgttaaagcgatcatcatctacccgatgaacgccctggcaaccgatcaggccagccgtttcgccaaaaccatcgccagcgatccgcaactgcatggcaaagtgaccgtcggcctgtttgttggcgacagtgaaatcgaacccagcaaaaagatgtctgcggataaagtcatcacctgcaaacataccctgcgtgagaacccgccggatatcctgctgactaactataagatgctggattacctgctgatgcgccccggcgatcagaagctctggcgctataaccagccagggtcactgcgttatctggtggtggatgaactgcacacgtttgatggtgcgcaggggtcggatctggcttgtctggtgcgccgcttaaagcatcatatcggtgttgatgacaagcgttttgcctgtgtgggaacgtcggctaccgtaggtgacgaactgggacaactactcgattacgcgaaaacgatctttgatcagccgtttagtgatgacgcggttattcgcgaagatcgctacacggcggcagagtatctgcaaggttatactatcgagtacagtcagtatccgggccaggatgtcagcgctgcgctggatccgcaaacgtacgccagcccggtagattatctgaacggacaaattccgctgtggttcccggatagttcactgcaattacctgccgatctggacagcgatctcggacgtgaaaagcgtattgagttgggctcattgttacgtcgccacagcatcctgcacgtactccttgaggatttgcaggggggaattttgtcggaacagcagtgcctggaaaatctccaggtgatgctggcggaaagcgccgggcatgcaacccgcgtgctgcaaagcattctggcactgattgcccaggcgcgcctggacgttccagaaaaacaggaagatcgggaaaagcgcctgcaggcgaataaagcgcgtcctgttctgccttttgtgcaactacgttctcagctgtggttgcgcgagatgcgccgcctggttgctagcgtgtcaaaaacacctgagcttgtttttgctgatgatgtcgcggtggaagatcgcgaacattaccttcccgttattcactgtcgtgactgccatgctaccggttgggcgagcctgcgccatggtcagagtgttcaactcgaaaccgacctggacggtatttatcgtcagttcttcgaaaaaggccgttcgattgtattagccttcccggacaacaacgataaaccggtcagcggtgttcaccagaaactgtgcccttcctgtttaaagctcaataagcaaactaacgtgcagtgtgggcattgtggccatactgatctgctacaagtactcatcccggatatgctcaaagagcgtaaggatgagctggaattcgccaacgaatgcccgtactgcaacagcaaacagggtatttcgattcttggggcacaggcagccagcctgtcggcggtgatgatccatcagctttatggcagccagttcaacgaacataaaaagctgattacgttttctgactcggtacaggatgccgcacaccgcgccagtttctttaccgcccgaacctggccgttgatggtacgcggacaaatcgccagcgtgttgggtgaaaaagaaacgttaccgttggatgcttttgcgacacgcgtctgccagcagacgcgtgaacgttcaccggatgatgctcattttgccgcgagcttcatcgcgcccaacatgcagtggatgaacgattaccagacgctgaagaacgaaggccagctggcagagagttccgatttaccggagctggtttctcttcgtctcgactgggaggtatacagcgaatttaccctacgcgcacgaattggacgtacgctggaggccaccggttacgcagctgcaggaattgatattacgcgtttcaattcagcgataacggcgcttcaccaacagcttgtcgaagagctgggtgatgaaatggttggggtcagcgttgagcaggtggcacacctgatgattggcgttctttggcatcagcggcaggcgggagctgttctgcatccggcgttcgaaagttatcggcgtgagggtaagacctttatgatgacgcagaaggagcgaacttcacgctatatgccatctattggcccgaaaacgcgtaaacctgcctatgcatcatttgaaaaaattaatggcttccatcgcctgattggcgcgaaatccaaccccagctggtatcagcattggatcaaccgcacgctcagcaacggcaataatctgtttatcagcagtctggccgagacggttttacgacgtctgtttgcgatactgaaaatggccgggttggtaaaagattttgatacaaaaggcaaagaagcatgggggctggtaccttcggcgctggtggtgagtcgtgatgttgttcagctaaactgcacttgctgtcgtgaggttgttcgggctccggccgatcagggctggcactggcgaaacgcgccatgcctttctctgcgctgtgaaggccgctatcaggaagctgaaaatacagtgacctggcattgggataatatggacattgctcgtgttcagggggcagagcataccggattactgagccgtgaagatcgtgaggctacggaacaatcgttctatcgtggtagtcagccatggaatatcaacctgctttcggcaacaccgacgctggagatggggatcgatgtgggtgacctttctacagtattactctgttctgttccacccgcgcaggctaattacttacagcgtattggtcgtgccggacgtaaagacggcaatgcacttaacatcacggtggctgaggggaacccgcacgatcagttcttctttgaagagcctctggagatgatgcaagggcaggtacaggcccctggtgtgttcctgaacgcaacggctattttggagcgtcagctggccgcattctgcatggacaactgggtgaaaacaggtgttccggtatctgctatcagcaaaaacgtgaaacagatgctggacgagctggagtttggacacaaatctgggttcccttataacttcctgagttacgtcgaaaaacatcatgttgatatcgctcaacagttctcgtccatcttccctgatcttacggacgacactcgtctacagctcctgtcatatttgcaaggggcaccagggcaacgttctctggtgcaacgtattgaagaagcattaaaattgctggtggaggatcgcaaatcgttgcgttcccgaattgataagctcaagcgcagtatcgacaagctggagagcgatccgcacgatcaaaactttgatagcgatatgcgcgagttgacttcggaacgccaggcactgatggcgctggtgaaccagatcaacaacaagcaaacgcttaatttcctcaccgatgaaggattacttcccaactatgccttcccggaggccggtattacgctgcgttctgtgctgtggcggcgcaaggacggtggggaaacgcgtgagtatcagaacacgacctacgaatacgaacgtccggcttcaacggcgctggctgagcttgccccgttgaataacttctatgcgggtgggcataaagttgaaatcgaacagattgatctgaaagtgtctgagcctgaaaactggcgtatttgcagccactgtaactacagcgagaatatcgatcagaccggcgatcagcataaatactgtccaaaatgcggcacaccaggttgggctgatgccgggcaaaaaacgacattactgaagcttcgtcaggtttatgcccgctcaagcgcgcgtgacagccagatcagtgatgagagcgatagtcgcgaaccggcattcttccagcgacagctactggtcagcttcgaaaaagaggatgtatcggccgcttatgctattgatgaaggagaaatcccgtttggctttgagtttttgagcaaagtgactctgcgagatatcaactttggcaaaatggcggatgatgccaatgagctgatgatcgcaggagaggcaaagaaacgcaccgggtttaaagtttgcctcggctgcggcatggtgcagcgccctcgagatcatgaaccacgtcatgacctgagctgtaaatatcgcgctgaacccgaaaaagcgaagtttgaagattatctctacctttatcgccaactggaatctgaggcattgcgtatcctgctgccagtgaccagctacagcaacgatcgcgtggtggaagcctccctaggggcagccattcagcttgggcttaaacattacttcaaaggtaacgtggatcatctgaaaggcgtggtgtatcgcgagccggaaaatgagggcgaatcctggcgtcagtatctggtgatttacgacaccgtaccagggggaaccggctcactcaaagaattgatgcgtacacctgacaaccttctgaaattacttgagctggcctacaaggcgctagtggaatgcagctgcaaccatgatacgcataaagacggctgctatcgctgtgtttacgcttaccgtgaccgcgggcgtatgaagtatgtatcaagagatcaggcgcgtctcttactggcgaaaatcctgaaggccagtgctgctatacgcgttattgattccatcaaaaacatttcgcttgatgccatgatggggagtgaactggaaaaacggttcattcactgcctgcaggataacaaaaatcttctcgtgagccggagttatgcccatcagaatgcaggctggattattaatacccgtacagaaccggcgatgagctggcatctcaaagcacaggttgatttaggggttaaagaaggagtaggcatccttagccgaccagattatgtgctctatcctctgatgcagtcagaaaagataaaaccggtagcaattttcctggatggttttgcttttcataaagatagcgtgtcggatgatgtccaaaaacggcaggcgattaaagacagcggtaatttttgggtatggacagtgacctgggcagaccttcaagaacaaggtattaaacatgtacagaatgttatggggcttggtcataacccggatatgaaacagcctaagttttataacccgttccatgatacaaactttgctacgcttgaaggttcattcagggagagaaacagttttgcactgctactcgattatctctctgatcccggtaataaaactctgctatggcagaaaatggccgctgcctttgcttgggtgtggctggatcctaaaaagtcgcaggataccggagccaaacaaaagtatgcctatgaaatgcaggagaacgctcccgcttatcggttgaatgcacttttgcctgatgaaccttttgtatttggcggtttactggatagctgtagttcatcacaacagttcattgagctggcagctgttgtaccgcaacaagccattaaatcaacgacaagcattgaacaaatgcgaaattggttgaggctgcatatttgctttgacgatcgttatccccaggataatggctatgaagccggatttaacggtttctggtggatggtgaatttactgcagttcctgccagatatgacattcaccagccgtaaagcggtccatttaccgcagaagcctgaagcggtaaaaatgcagacttcggtggtagtggatattcagcctgacgagagctgggcggatatacttgagtttggtttattgagcgcagaagaaatcgctttgcttcagtcgttatcgcttccggcaccgacagtcggatatgaattacaggatgacgatggcgaaattattgcggaagccgatctcgcctggccattacaaaagcaagccctgattatcgataatcagagctttactgctttattcgaaagtaagggttggcacgttgctttcgggccaattgacgaaaatacattgcagcatctgtccggaggtgacaaatga

SEQ ID NO: 196854 - DNA, 4923 bp, Klebsiella oxytoca
atggcgctggtcggtattaataacgaaaacgaattttactccaaccactatctgggcgaagtctttaccagcgacatccgtgatgttctggagccttggattgagcaggaaaatgccgctcgcgaggctgaacgcgctgcccgtgaacagggcaaagaggttgaggcaggctaccgcgcgccgtggaaccagcttaacagcctggcgacagagtttttccgcaaactcactgatcatgaaaaacagcgccagatcccgcagcgtcttgccgatcaacgcactcgctggcagccgctattaaaggcattgggttatgaactcaatccgcatattcagatgctggatgacgatacgcctttgccggtactggctcgttacaacagcaccgacggcagtccgtggctgtggattgtcgaagcacatgaccaggaagaaggaacgctggatccgctggcgctgtcgctgctgaccgcgcagttcccggcagataccgataaacataagcgcgacagtctgcgtaaaaaagcgaacggcgaataccgcagctggcaggatctgctctccacggtggtcttcacgcaaaatgaaccgccgcgttttgtgctgctgctcggtaaccgccagctgttattgctggatcgtactaagtgggcgcaaaaccgcctgctgcgctttgattttgaagaaattttaagccgtcgtgaaacggatacgttgaaagcgacgtcggtgttgctacacaaagattcgctgttgccaggcagcggtgcaccgtacctcgattcgctggatgacaattcgcacaaacatgcgtttggcgtgtcggaagatctgaaatatgccctgcgtgagagcattgagctgttgggtaatgaagcgatgcgttatctcatcgacaacgagctggcttattataccgggaaacgtgctattaacccggatgagttgagccgcgaatgcctgcggtatatgtatcgtctgttgttcctgttctatatcgaagcgcgcccggaactgggctatgcgccgatgaccgccaaaacctatctgcagggctacagcctggaaacgctgcgcgatctggagatgatcccgctgaccagcgaagaagatcgcaatgggcgctacttccacgatagcctgaatatgctgttcaaactggtgcgtgacggctacagcggcggcgtgaaaatgcagagcgacctggagagcggcgacctgatcactattcacagccatcagttcagcgtgccgcgtctggaaagccatctttttgaagcgaataacacccgtattcttaaccgtgtggtgttccgcaacgaaaccctgcaacaaattattcaggcgatgtcgttaagccgcccgggtaaaggacgttttaatcgccgggggcgtatctcctatcgccagctgggtatcaaccagttaggtgcagtgtatgaagcgctgctctcttaccgaggattctttgccagtgatgacctctacgaggtgaaaaaagccggagaagagtttaacgaactggaaacgggctacttcgtcagcaaagatgagatcggcaaataccacgacgacgagaaggtctacgaaaaagacggcagcctgcgtattcatcgtaaaggcagctttatctatcgcatggccgggcgcgaccgcgaaaaatccgcctcttattacaccccggaagtgttgacccgctcgttagtcaaatatgccctgaaagagctgtttaaagagcagattgatccgattaccgatctgcacgccaaagccgatgcaatcttaaacctcaccgtgtgcgaaccggcgatgggcagcgcagcgttccttaacgaagccatcaaccagctggcggaagcttacctgttccacaaacagcaggcggaaggtcgccgcattcctcaggatcgctacacccaggagctgcaacgggtgaaaatgtacattgccgacaacaacgtattcggcgtggacttaaacccggtggcggtggagctggcggaagtgtcgctgtggctgaatgccatcagcggcgatgcatttgtaccgtggtttggctaccagctgcactgtggcaactcgttggtgggcgcacgccgtcaggtgttcaacaagagcgagctgacctacaaaaaagcgaaagatccgagctggcttaacagtgaaccggccgagctggcgatgaatattccacgcgaggagaagcagattttccacttcctgctgccggacagcggtatggccaactacagcgacaaaaccgtcaaacagcgctatccggatgatttcaaagcgctggacagctggcgcaaagagtttaccaaaagctttgaagcgcatgaggttgctgatgtgcagcgcatcagcggcaaagtggaagcgctctggaacacattccgacagcagttgaaagccgagcgccagaaaaccgccgacaattacccagtatggcctgccgataatacggctcaagtccgctcttctatacgcagtaaagatgaaaccttcagcggtcgcctcgaagataacagtacctatcagaaactgcgctgggtgatggactactggtgtgcgctatggttctggccaatcgacaaagcgaatgaactgccagatcgcggcatgtggctaatggagatggagactctgctcgatggtattgtcgtcacggaaagagtcactgaagccgcagaacaggtcactggcgatctgtttgccgacgagggcatggtgcgtgaagagtcttcgctgttttccggtgcaggtcgcctgaaaaccgatgtgctgttccgccatttgccgcgtctggcgatagtcgatgtgctgaaaaagcagcaccgtttcttccattgggatctggaattctgcgatctgttcgccgagcgcggcggctttgacctgatgctcggaaacccgccgtggttgaaagtagaatggcaggaagctggcgtgctgggcgactacgagccggagtttgttctaggccgattgagtgcttcgaagttggcgacattgcgtcatgaaaccttcaatcgaattccgctgctcgaaaatgcctggcgcagcgagtatgagggttgcgaagggatgcaaaacttcctgaatgcgcagcagaattattctgtacttgtaggccaaaaagcaaatctctataaatgtttcttaccacaggcgtggcgtttgggagcgcagaaaggtgtggcagggttcttacacccggaagggatttatgatgatccgaaaggcgggcaattgcgcgcgtcggtgtatccgaggttgagagcgcattttcagtttcataatgagttgagtctttttgctgaggttcaccatgcaacgatgttcagtataaatatctatggaccgaagaatacagcgccgtcttttattaacatgtccaacgtttacgcagtaagcgcaattgatgcctcgtttgaacacaataatttaggtccagtgcctggtatcaaagatgaacaggaaattgatggaaaactgaaggtttcctggaacacctctggtcaccgctcacggctgattcatattggtgtaaaggagctctctttatttgctcgtctgtatgacagtgaaggaactactgcgtgccaagcccgcttgccagctcttcatgcaactcaactagttgctgtgctggataaatttgccgaccagaaaacgaagttaggagatttaggggatagctattattcaacccagcattggaatgaagttaacgcccaaaacgatggaactatgattcgtgaaactcagtttccagagaattcctcacaatggattttatctggcccgcacttctttgttgggacaccgttctacaagactccgcgcgaaaactgtacgttaaacagcgattatgactgcctcgacctgctaaccctgcccgacgattacttgccgcgtactaactatatgccagcatgtgatgtgcaggagtatgccaaacgtactccacgagtgacttggactgaaccaggtgaagacgagccgaggaaggtgacggattattatcgttttgtgaatcggagaatgtttggagcatcatcagaacgttctatgatctctagcatagttccaaagcacgttgctcatatacaccctgtactctcaacgacattcagagagccaaaaagcctgctaagcttttcagcattttgtcattcaatagtggctgatttttatttgaaaacaacagggcgggcggatgtttatgaatctacattgcgttgcttcccttatgttgagctaatgagtgcaaactcaagagcattagctttgaacgtgttaacgaaagattatgctggtctctggcaatcctgctataacccagatttcaacacccagcgctggagccgcaatctcccgcaacttccacaagatttcttcgccaatctgacccctgagtggcagcgtgattgcgccttacgctctgactacagtcgccgtcaggcgctggcggaaatcgacgtgctggtagcacaggcgctgggtttaaccctcgaagagctgctgactttatatcgcgtccagttcccggtaatgcgtcagtatgaagccgatacctggtacgatcaaaacggccgcattatctttaccccaagcaaagggctggtgggcgtcggcctgccgcgtaccgcgcgtaaagcggacctgaaaaacggttttgtctttaacgtcgacagcccagactggaccggcggcgattgcaccgatcaagccatcggctgggatgatgtcaagcatctgcaaaccggcactgtcagcgtcacttttgatgactatacccgcagcgatgaaggcgagcgcagaatcgtcatttggcaggctccgtttatcaaacccgaccgcgaagatgattacaaagtggcctgggcattttttgcacaagataaggagagcgcctga

SEQ ID NO: 196855 - DNA, 2832 bp, Klebsiella oxytoca
atgcgggtggttattcgtgatgcagagtggcgcattcgccgggcggatgacagcggagatggtggttacctgctgacctgtgatggcatttcggagctggtacgcggtaaagaagggctctttctgacaaagctggagcaaaaagtcgagattcttgatccagcaaaaacaaatctggtggaagatgagtcagccaattaccaggcggctcaattgtacatagagagccagctacgccaacgtgtcccgactgacagcaaagtccattttggacatcaggctgcgatggactccatgccctttcagctcgatcccacacgcatggcactggcacagccgcgccagcggatactaattgctgatgcggtagggctgggtaaaacgctggaagccggtatcctggtttcagaactgattcgccgtggacgtggcaaacgcattctggtgctggcggttaaatccatgcttacgcaattccagaaagagttctggagccgttttgctattccgttgacgcggcttgactccgctggtttacaaaaggtgcgtaaccgcatcccaaccaaccacaacccgttccattatttcgataagaccattatctccatcgataccctgaaacaggacatcgaatatcgccaccacctggaaaacgcctggtgggatattattgttatcgatgaagcgcataatgtcgctgaacgtgggaccagctctttgcgcagcaaactggcaaaattgctcgccgggcgcagcgatacgttgattatgctttcagctacgccgcatgacggtaaggctgaaagttttgccagcctgatgaacatgctcgacccgacggctattgccaatccgaaagagtatgaatacgccgattttgccgataaaaatctggttgtgcgtcgcttcaaaaaagacgtgaaagatcagatggctggcgattttccggaacgtaatattgtcaaactcacgcacccggcaaccggagccgaagaagaagcttatcgtcggctggttgagagccagttccgtgaggacgatgatgaagactcgcaatcaaacaaaggccgcctgttcaaaattacgctcgaaaaagcgttgttttccagtccaatggcatgtgccagcgtggttgctaaccgcctgaggcggcttgagaaccgcaaagaaataaacagtcagagccagattaacgaattagagtcattgctgctggcgctcaataatattgatgccagtcagttcagcaagtatcaattgttgctggagaccatccgtaacgatcttcgctggaaagcgaataacactgaagatcgcctggtgatctttaccgagagtattaaaacgctcgagttcctggagcagcaactgcgttacgatcttaagctgaaagacgatcaaattgccacgttgcgaggcgatcagggcgatacagttctgatggaaaccgtcgaagcgtttggcaaaacccagtctccgctacgcctgctcatttgctcggatgtggcgtctgaaggtatcaacctgcatcacctcagccataaaatgattcatttcgatattccgtggtcgctgatggtattccagcaacgtaacggacgtattgaccgctacggacaaaaacaccagccacagatccgttacttgctgactgaagccagtgaaccgcagatcaacggcgatatgcgcgtgctggaagtgctgatcaataaagacgaacaggcgcagaagaatatcggtgacagctccgaatttaccggcaaatttacccaggaagaggaagaagagcaggttgctgaattcatgatgcaggacgatggcgccagcctgttcgacgacctgttgaatagcaatgtcactgaaaattctgaacacgacctgtttggcgaaatctgcagcgcagtgtccagcgatgcctcaaccgtgaccgaaagtgacattagcctgtttgataatgagcaggcatactgcgaaaaagcgctgggctatctgaaggcctgcggccagaccgtgcaatacgataccttgcctgataacaccttatcgctggtcgcaccggaggagttacgccgtcgctttaaccagttaccgccggaaattgcgccggaaaactggcagctttatctaagccaggacaaaactgttattacggaagccatttcgcgtgcgcgtggtgagcaacatgcctggcccgatgtgcagtatctctggcaaattaacccggtcgtgcagtggttagacgacaaaattcagtccgcctttggtcgccaccaggctccggtgatgcgcctgccacacctgtttgagcctgatgaagatcatttcattctttccgggctgttcccgaaccgtaagtcgcacccgatggtgaacccgtggctggtggtcagctttaaccgcgaaacgttaagcggcagcctgccttttgctgagttcctgaaacgacatccgcaactgagtagcaagctgactaacagtggcggcaaagatcgcaaccatcaacgccagcaggatctgctggaggcggcaatcgcccatgcgcgggatgtgtttgttcacgatcgaaatgcttttgaagagcgtatcaatcagcagctcaatgagcatctacagaagctggatgttctgcgtgggcgtcagctgagtcaactggagctggattttgccgataataaacagcagctttcagtgaaacagagccgcaaagaacaacgtcagcgagaaatcgaacacaattttgacagttatatccaatggattgaggacaccatgaccaccgaaaaagagccctacatccaggttattgctgtaatcaccggagcggagggctaa

SEQ ID NO: 196856 - DNA, 6327 bp, Klebsiella oxytoca
atgaacgttcagcaactgcattatgcgccacttctaaatcagcttcatcagcgtgcggtgaggtcggtggtaagtcagctggcattgcggagcaagtcgttgagtcaatatctggaatctcaatatttccagcctccaggtctgggggggtcactgcttgcagatccggtattcgaaagtacgtttggctggatgcccgcggatgaaacaatggaggatttgcgtgacaaactgatctccagcccgctggttgatgctttgagcaatgcgccagtgccgtttcgtcatcagctaactgcgtggcgaacgattcttgaagacaagcagtccctattagtgagcagtggtacagggtcaggaaaaacagaatgttttatggtgccggtgctggaagatcttattcgtcagcaaaatttgacccggcagtcactaacagggacgcaggctattttcttgtatccgttgaatgcgctaataaatagtcagcaagagcggcttcgcgagtggactcgcgggtttaaagggaagatacgctttgcgctatataatggcgaaacccggcataccaaatatgaagttcaggaagaccagctcaaagtacctgaacaggcattgagtcgggaagccatttatgaagccccaccgtccatcatggtgacgaataccacgatgctggaatatatgctgattcgtcgcaaagatgcccctgtcattgaaaagtcccagggaatgctgaagtatatcgtccttgatgaggctcacagttatattggctctcaggcagctgaattagcgctgcttttacgtcgcgtcatgcaggccttcaatgttggacctggtacagataaacctgtgcaaatcattgctacctcggccactattggtgaagattctcctgaaggtaataaagaacttgctaaatttgttgccgatctcgcgggggtcacagaacgtgatgtaaaagtagttcgcggctatcgacaaataccgccgatatcggagtctcttattcgtcatgaatatcccacatctttagcatctcttaactcactaagttctcaggaactttaccaacagctgtgccattaccgtgtggcccagcaattgcgtcaggcgttaactcgccccggacgcctggcggtacgtttgagtgaattgctcaatgttgccagaagaacctggccagacattaatcaccgtgagctgctgcagcttctcgatctgatggcgaaatcgcgagagggtgaatctaaattttcactagcttttacgccattacgtatgcatgggtttatccgaacactcgcgggcctatgggcatgttcaaataaacaatgcgcacataaagcgagtgaattaggtgagagtgactggccatttggtcaggtatggtttgaacaacgccaatattgtgactgtggtgcgcctgtatttgaaatcttacgttgctccgggtgtggttcagcttatttgtctgccaaggaggaagtgcgcggtgatggaacgagctggttggtggcgcaacctgctgctgccgaagaggatgagtttgctcttgatctcgatgtttattctgaagatgaagataacaacgaattagaaaataactcccaatttgatcgtcttatagcgagcgatggtgaaaaatatatcatttcactggaggaagcgacggcgggtaaaatcgaccgcgaggcgcaaaagcactatgagataaatctgctaagacctgaatctcgaggtgagggacgcaataattcctttgcttgtgtttgttgtggtgacacccaacggaaaaataatcctttgttccgtccgcttcgactcggtgcacccttttttttaaatgaaattattcctactctgcttgaattttcgcctttaccgcaaacaagagaagagcagttaggaccgtttaatggtcgacgtttgctcacctttacggattcacgtcagggaaccgcccgtatctctgcccgattacagcaggacgcagataaagctacgttacgaaccctttgttatcaggaactggcaaatattaatgagccatcagtaaagctcagtccggcacattgtgcattgttagagagttttattacccagttttctatccctccgttaaaaaattccatcgacgcactgagaaaagcgatggtttcgaatgagaagcttagcccagcagacgttcaggcgcttagaattatcgagccgatggttagttccttaagtcaggaacatgctgaagcaatgcaaatactcctcgtcaattcaggcaatcagcagaagaaaaccatgtcgtggcaaactctgtctgaacaacttgttggcagtgtggatcttgcggacagaatgagaggcagttttaaagacttgtctggacttgagcttactaaacaacagtttgctgatttttgtttatacagtgagtttggtcgccgccctaaaaatgcctggaccctcgaaagtctggggctggtggccattcactatccatttattgataaagtcacaacctgcccgcaggactggaagacattattacccgaccccgataagcaattaccggaatggcgtaatttattgaagattacccttgatttctttatacgtgaaaacagtgccgttttttacgaaaacgaggagtaccctcgctggatgggagcacgtttcccggtaaaaatgctgcaggggccagataaaaaatacaaagggcagaaacgtgatcaactttggccacaaatacgcgatcgtcattataaccgggtcattaagctattaattgctgtctttccggcaatacagcctgagcaggctcactggaaagcgctggttaattacttaatgaatgaggtctgggaagctattcgaccatgcctgcgtcagtttgaatcgggttatcaattggacattaaacaacaagctgaattttacagtccaaagcaagtctggcgttgcccctatactcgccgtgcgttagatgtcactttattgggttattctccgtatttaccaggtagcaaagagatagcacctgaaaaagctgtattgattgaaatgcctgagcttcctgcgcgtcactggcgtttatctggtggtggagaaatggcgcgagaagagcgcctgcactggctggaatgtaatgaacgcattcaacatgctcgggaggagggggtatggtctactcgcagtgatcgattggccctgaaagatagctggtatcgtctggaggaacactcagcgcagcgaacaccagagaagaaccagtttaatgaaaaacaatttaaagcagggaaagtcaatgtgttgaactgttccacgaccatggaaatgggcgtggatattggtggtatgagtttggtcgcgatgaataacgttcctccggctccggcgaattatttgcagcgtgctggccgtgctggccgtcgcggtgaaagcgcatctgccgccattacgttatgtaaaaacaccgcgcatggaatggaggtattcaaagaccctctctgggcgttcaacaccgttgcgagtgacccacgggttcgttttggtagcagtagtattgttcagcggcatgttaacgcattggttttaggtgcgtttttacgggctgaagttcctgatgcgacaaaactgagttgtaaatggttctttgaaggtgatgagagccagtgtcttcgttttctccattggttaaatcatcaggccgatcagctggcggataaacttaaacgccttacccagggaactgtactgatgtcattgacgccgccacagctcttgactcgtacgcaaacgatgatgcagctggttgatactcgttggagaagccaacttgccatactgttggaaaacatcgaagcgttgaaagcagataacagcgcgtgggaagaaacgccagcaggcaaagcaatcacttatcagcttcgtgattatcgcggtgcttatctgttttctaaactcatcagtgaagcgttcctgccgggtcatggtttcccggttggcgtggtcaatttcaattatctgactgcggatgaactggaaagacgtcgcgcaataaaagccactcaggctgaccctaatgaagggggagaaaacttttctcgccgcattgaaaaactgcccagccgtgacctgcccacagcattacgtgaatatgctcctggtgctgatgtggtattgggcggaaaagtatatcgttcctcgggtattatgcttggtaaagtacttgccagcgggcaggagctgtctggcgatcatcatattccgtggttctggcattgccgtaaatgcggcgcgggagcgaccagcgccacccggcctgtcgaatgttgccactgcaaggcagatatacagcagcttgatgtgaagcggtatttacagcctgtcggtttcgcgacagacattcgttatcaggcacataatgatgtatccatgcctgcgcaacttccctggaaagatcctcgtgttcttgtaccttcttcggtatgggtctccttacccgatgctggactcggacgttaccgttttagtcatagcggggaattgttccactttagtgagggtgaatttggtcatggctacgcaatttgtctttcctgtggccgggcagaatctcaaacccagccccagcgtactccggagaatctaaagaacccggagaaggaaaatacacactacctgttgagaggcggtagtaatgatcggcaggggaacaataaattgtgccacggtcatgttcataaagatctgtggttgggatatagcagccgtacagatatggttgagctgcaactcagtgatgatagtggcttactgatcagggatgatgttgccgcgcgttcccttgcggttgctttgcgtgaaggattagcgcataaattgggtatcgaaaatactgagctgggcgtgacgacacagcaagcgcgcgatatcgatggcttcactggatattctatctttatttacgataataatgctggtggtgcgggttatgcagtgcaattgatcgataattggtcggatgtctttaattacgccagaaaattgctcgattgcagctgtgataaattctgccaccactgcttgctcagctacgacagtcagcattatgtcggcaaattagatcgtcaccaggcattaaccctgctcactaatcttcgtctacagcggcttaatctcgcgccagaatatcagtacttcggagaaagtagtcgggttgaaaccaacccactcagtttgcgtattgcgcaatgcctgaacagcgaggtttatgattcttgctcgttggttcttgctgggtcgcaggaacagtggagttttgcgcaatggccattatttaaagagttactccagtttgcttcctctgggggcaatgttgagttgctgattgccacgcagctggaaaacttagctgatagcaccagacatcagctttccgcgctagcggcgataccgggtgaatgcttgcaagtgaaatctatagacactgcgcaacttgtgcaagggaatgggcacttactggcacaggtcactcgtgaggggcaaacccaacagtgggccgctgccgacagtgccaccgtttcgcccggtgaattatggggacaaagctcggcatcgccggtagtgacgattaaaggggcgtccagaaaaacattctcgggtcagactttgagtgcagaagacttactgccagcattgcccgccggggcggtacgcatcaatctcagccaacaacttgacggtcaggtggaaggttttggttcgcgtttctgggcactgatagctcagcagcatgctggctggaagaaggtttttactaatggacgcgaaattactcacgtccattatagtgatcgttatctcaatagcccatttactgtacgtttgttaggtgaaattttgacagaattggttgaacaggggctggcagaacgtgccgaactcactgtttcagttaaaaagttagagtacagttctcgccaacacgattcactctataacgcatggcttgatgagcaggatcgccagcaagttatgaccacgttgctggaagagggctaccttgggccagcctggtcagggaaaatctcatggttagcaggagataatcagaacaccgatcacggacgtgaactgaccgtgaccttcagcgatggcagtgaacattatgtgttgctcgatatgggactgagttactggcgttgtacaggtgacacattcttcgatttttcaggacgaataccgaatcaggtcgagcgcctggcaacatgccgggcattggttatagccccggataatggattgaagagttatatcatcgcaggctaa

SEQ ID NO: 196857 - DNA, 3354 bp, Klebsiella oxytoca
gtgaaaactccagttaacccacttttgcgatggctcaatgcgttttttagcagtcgttcattacccggagctgatgggagggcgctgtatgcttaccgttgtcatgatgcagagtatgaaagtttggctgctcttcttcgtgcccatgttccacgtaactaccccaaaaccatattcatttcttacagtgatgttttgttcagcatatacgccgctgagtttatccgccgtaaccatactgcaggacatccaagatgggacgttattttagaatcgattggctggaaggtaccttacgcacatcggcaaaagctggtaaatgatgggattcgttactggaaaagaaaggtgagaagtctgggtcaagcatcgggttatctgcatactctggcttgcgaaggcggtttgcccatccggatgattgaaaatgaaagtggctatttaataacctatttcaaacgagtttatcaggcactacgtgggcaatcgtcaaggcgtcctgcggaaataatcgcacaagaactgggcgacactattcctgcgacaatgcaaaatgaactcgtctatgaaatagctggtgaattttgcgagacacttcatacgttactcaatgagcatcccactcatggtcaggaccccgtttcctcactacgcaaacaatatcctgactggcatcttcaacttccgttggtactcccggaagagaatgcctcagagattgtaagacgattactttctcaatcttcagagccccgtatatcaagcaatgtgctggttgaaaggatatgggttgatgttgatgacagttggtattgcgatgcccggtttcgatttccggccacaatgcgtactgaacagttaatatccctgtttgaaagcaatattcagccggaacagacacgactcatcatttctgcaaaatggagaaatggtggggcccggttggcaatgctaagccgttatgaacagcaagattggcgagtagagttattacccttcgctatgcaaaaactctctggggcagatgcgatgaccgaaatatcgttgtcgctccatgaagggccgattctgctaggtcacgtaattcccaaagggggttatgagcttaccgaagatttaccatgggtttttgaagcgatgaatgagagcgagtcgcagttaaaacttgtcggcatgggctctgttagttccaggcaaaactctctttttatttcgctaccgacaaatagtcatttggatattagtggagaaggtgagtttgatatcccgaggttgctgaaaaatagtgaacgtagcttaactaaaataagcggagtattcagcgttgttttacatgatggcgcagtttgtacgattcgcacgcagcaactttatgattctgcgattgagtattatataaaaccgacagagatcgatctggtaaaatctgattatcctgtccatcgtgcttggccaaagatcggctggaaaaaggatatgcagcatggcattgtcccagagaacgaacttttttggcgatccattcgttcaggtaacaactcctggttttctgtcgcatcagtaatgccgaaagggcagatagaagtcaggcgaatagtcaatggtgaggttttatttagcggtaaagttgtgattttgccagcagatttcgatattcaaattattcccgagactgctcagcaaggagttattgtactctctggtataacggatgcaagggttgataaatattcaaacaatgaaaaagtaacacttaaatcagattatttgcaaaacgagtgtgttattgattgtaattcatcacagatgctagagagcaccatcaatttacgagtatcctggaaagatggttctaatcttaaattgttattacctaagcccgttagcggtggacggtttgtaagtaatgatggttctgttcattttgacggtgttgtatctatagcacatttgcatggcgtggacgctgagctgttaacaatatcttgtgccgggaaaggatatcttaatatcgagttgttggatgaaaacccgatgtctgaaaaatttcattatttacatgcggatattccattgttatctggccgtaatgaaaaattgcaacagatttcactttatgagaattataatctgctgaacgccatgcttgtatgtgcatggaaaaatgatagtacattacgtgttgatttttactctgacagatttggtaaggacaaaacaacactcaatattaaacgctacgatggccgttttattgagggtgatgaaagattgctggttgatataaaagattctattgtttttccttaccataaaatagacgacatggttgttgaagccatttctcttaatactcctgacttatgcacagtcctgctgaaaaaagatgagtctggttatgatttctcgacgttgaataatcaaggtggcccatggttaattgtgggtaaaattgatggtgcaattcgtattgcaccagtgattaaatggatgctacctacattacagacagatgatttatttctaaatgctatatgcaacgcatcgccagaacaacgcaaggaatattgtaatgcgctgtttttggaaatgaaaaataatcctttgcaaaactcttgttatttgttggttgagtacattaaaaaatataagttgaataatagcttgcctttactggaactggatttatttagagaaatttcgagtaattattgcgtggttgttcagttgttaatatcatcatgtctttctggggatagtgatgctatttatgatatacaggaggaattacccttctcatggggatggattcctgtttcaatatggaaagatgtctttgaacagtgttggtattctctggaaaaacagattaatgataaggcatttgcattaaatatactacagccatttattgcatttataaatcatcaagcgcatatcgatcgtcgattagttcccatcgctaatatgttgcttacacatagtgagatattacctgcaggttgcactgtattgccatctgtaagccgcgagcagtttaatgatgccaaacagatgttattaagaaacccagatagttttggacgtgtcagcattttttctaaagagctttgggatagtgctattactccagaccttaaatctatttttaataaattttggatcgaaaacacatatcacactcgttttgaaaaacgttttaatttgatgttagtcgcggcgctgctttcccaaagaaacaataaacttatgcatcagctaactgcactttttgaatttcactatcagcaagccccgcagcaattgggggttatctatcagtattattttgaacaagcaggagtatgtcattga

SEQ ID NO: 196858 - DNA, 1653 bp, Klebsiella oxytoca
atgttagctcagctttttgaacatttgtttcaatcaattgattccacactcgtcacaaacatttttatttgggctgttatctttgtattttgtgctgcttggtggtgtgatcataaaaatattcataacaaattccgagagtacgctccaacattaatgggagcattaggcatactgggtacttttatcggtatcattattggattgcttaattttaatactgaaagcattgataccagcatccctgtattattaggaggtcttaagacagcattcattaccagtattgttggaatgtttttcgcaattttgtttaatggattagatgctttcttttttgccaataaacgtcgcctattggaggcgaatactccagcgtcggttactcctgagcatatccatcaagaattaaaagaacaaaataaacatttagtgaagttaatctctggcatgagtggtagcgaagagggttccattgttgcccaaataaaactactgcgtaatgaaatcagtgatgcctcccgggcacaaatatctaaccattctaatttcagtaataagctctgggaacaattacagcaatttgcagacctgatggcaaaaggagcaaccgaacaaattatcgatgcccttaggcaagttattattgatttcaacaataatttaactgaacaattcggtgagaatttcaaagcacttgatacttctgtaaaaaaacttgtcgactggcaggaaaactataaaaaccaagttgagcagatgggtgagcaataccaacaaagtgttgaatctttagtcgaaaccagaaaagctgtcgcagggatctgggaagaatgcaaagagattcctcttgcgatggctgagcttcgtgacgtgctgcaagtgaatcagcaccaaattggtgaactctcccgtcatctggaaacctttgtcgccatacgcgataaggcaactgatgttttacctgaaattcaaacaaaaatgtctgaagtgggtgaactcttaaaattaggtgccgcgaatgtcagcgcgtctcttgaacaaaccagtcagcagatacttatcaatgctgattcgatgcgagttgcccttgatgaaggcactgaaggtttcagacagtcagtgactcagacacagcaagcttttgcatcaatggcccatgatgtcagcaattcctctgaaactcttaccagcacgctaggagacactattacggagatgaaacaaagtggtgatgagttcctgaaatctctggaaacacactcaagagaattgcatcgaaatatggaacaaaacactactaatgttattgatatgttcagtaagacaggtgagaaatttaatcaacaattatccagcaatgccgataacatgtttggttcaatgcaatcttcgtttgataaagcaagcgcgggactgacatctcaggtgaaagagtcaattgagaaatttggtagttcaattaacgagcagttacatgcttttgagcaagcaacagagcgcgaaatgaatcgtgagatgcaatcactagggaatgctctgctctcaatcagcaaaggttttgtcggtaactacgagcgactactcaaagagtatcaagctgtcatgggacaactgcaaacattaatttctgctaatcaaaaacgaggataa

SEQ ID NO: 196859 - DNA, 708 bp, Klebsiella oxytoca
atggataaaatccttggcaagcaggcccctaaaaaagatcaagataatgaacattgggtttcaatgtcagatttaatggcaggtctgatgatggtatttatgtttatttctatcgcctacatgcactatgtgcgtattgaaaaagaaaaaattaaagaagtggctgtcgcctatgaaaatgctcaacttcaactctataatgcactagaaactgagtttacaaaggatttgccagcttgggatgctgaaattgacaaacaaactcttgaggtccgttttaaatcacccgatgtcttatttggtttaggtagcacagagcttaagccaaaatttaaacagatccttgataatttcttccctcgctaccttaaagttcttgataactaccaggaacatattactgaagtacgtattgagggacatacaagtactgactggactggagcgcccaattctgacatggcctattttaataacatggaactctcgcaagggcgaacacgagcagtactgcagtatgtctatggtttaaaagaaagcgcagcacaccagaagtgggtaaaaagtaaatttgctgccgttggatattcttccgcacaccctattcttgataaatctggtaaagaagatcccaatcgctctcgccgagtaacatttaaagttgtaacaaatgccgagttgcagattagaaaaataattcaggagtaa

SEQ ID NO: 196860 - DNA, 1092 bp, Klebsiella oxytoca
atgaaattatctatcgacatttctgaacttattcagttaggaagaaaaatgttgccggaaggcgttgattttttccttgacgaaacgcctgtagtttttgatccaattgatatcgaactttctgcaggtaaagaagttagaattgaagatcttgatcccggcagtggtcttatttcctaccaagggagacaggttcttttgtatattagagaccataccggacgttatgatgcggctattgaagatggagagaaagggaagcgatttcatattgcctggtgtagaacattagatgacatgcgccaaaaaaatcgatttgaacggtatcatgcaacaaatcgtgttgatggcttatttgaaattgatgatgggctcggtcggagccaagatgtcgctcttaaagtttgtatgaactgcctagaacgccttaattacaaaggaagtatagataaacaacagaaaagagtaatatttaaatcattttctttgaatgaatttttttcagattatagtacctgctttcgccatatgcctaaaggaatctatgataaatcaaatagcggctatgtagaaaattggaaggatatatccagaactactcgagaacaagctaactacaaatgtaatgattgtggtgtgaatttaatgtccatgaaaagtctatgcgatgttcaccacaaaaatggtattaaatatgataactcagctgaaaatctactcgtcttgtgtaaagattgccatcgaaagcaacctttgcacgaaggaatatttgtcactcaggctgacatggcaatcattcaacgcttacgttcccaacaagggcttttgaaggctgaatcctggaaggatatttacgatctgacagatccatcgattcatggtgatataaacattatgcaacacaaaggatacccgccaccagttccgggattagacttacaaaacgcggagcatgaaattattgctaccgtagaagctgcctggccggtttcaaaaattgcagtaaatttaacaccggtaaaagtcgatggttggaaagtattctccgtgggagaactcgttaaagaaatacaatctggggttattttctaa

SEQ ID NO: 196861 - DNA, 567 bp, Klebsiella oxytoca
atgtctgatacgttgaaagttgttacgttactcggaagtctgcgcaaaggctcttttaatgccatggtcgcgcgtaccctccccggcatcgcgcccgcaggtatggcggtttccgcgttaccgtccattggcgatattccactctatgatgccgatgtccagcaggaagagggattcccacaaagcgttcaggatatcgcgcagcaaattcgcgaggccgacggtgtggtcatcgtgacgccggaatataactattcggttcccggcggcctgaaaaacgccatcgactggctatctcgtctgccggaacagccgctggccggtaagccggtactgattcaaaccagttcgatgggggctattggcggcgcgcgctgtcagtaccatctgcgccagattctggtattcctcgacgcaatggtgatgaataagcccgaatttatgggcggcgtgattcagaacaaagtggatccgcaggaggggaaagtcgtcgatcagagcacgctcgatcatctgagcgggcagcttagcgcttttgccgagtacattcagcgggttaaggcctga

SEQ ID NO: 196862 - DNA, 324 bp, Klebsiella oxytoca
atgaatactttacctgcaataaaccagcgggctgttcagccatatccatcgcccgtggttgtctggcaaatgctgcttgctcggctacttgagcaacactacggcctgacgttaaatgacacgccgttcagcgatgaagctgttattaagggacatatcgaagctggcatcacgcttgtcgatgccgttaattttctggtggagaagtacgagttggtccgtgtcgaccaaaggggatttagctggcaggagcaagcgccttaccttacgattgttgatatcatgagggctcgtcgctatcttggtatcactaaccgtagctag

SEQ ID NO: 196863 - DNA, 957 bp, Klebsiella oxytoca
atgaactcgtttaattttaataaatatggatttttgtcttatacgcttcttcttcccgctttaattggtcgtgtcgcaagtaggattgaaagtgattatatcatagcacattttgggccgtgtggagttttagcaaattgtttgcggagttgtggtattttacatgggaaaatagttacagtttttcatggttacgatctttcagctaccaatttactaaacagatataaaggtttctataagagactctttaatgatggtgatttgttccttcctgtgagtcatgtgtgggaaagtaaattaatcgaaatgggatgtgataaaggcaaaatttctgttatcagaatgggtatccagattgaaaattttagcttttatccgcgcccctttagaaatgaaccgttgaaacttatatcagtatgtagattgacagagaaaaaaggcctgcgctatgcaattcaggcgtgtgatatcttgaataagagtggttatagatttcaatatgatattgttggttatggagagttaaatgcagaacttcaacagctcatcagcaaatatgggcttgaagataaagtaaatattatcggttttcaacctcagtctgttgttaaaaaattgttgatgaagagtgatgtttttctcctaccctctgttactgcaaataatggtgatatggaaggtattcccgttgctttaatggaagcaatggcaattggtttaccagttatttctacttttcacagtggaattcccgaactaattgaaaacgatgttagtggttggctatgcgatgaacgagattttcaggctattgccaatatcctaatttcattgttaaaggatcaaaaagatctgaaatatattcaagacaatgctagacgcaaaatcgaattatcattcaatcaggaaaaagaatactctcaaatggctaatctcttggagaggctttcatga

SEQ ID NO: 196864 - DNA, 1326 bp, Klebsiella oxytoca
atgagtggattgaggaagcaagcttcttggcttttgttttccaacatatttgcagcaatacttcagattatccaaattagtgtgttagcccgacatttggaactacatgagttgggtatgcttgcgatcgttaattcaattttaatgatagcaatgattttgcaagatatgggtatgagtagttatattattcatagacaagatcttagtcgagatgaacaaagcacaatatattgggttaattttattttaagtattttggcaggagggattgttttattagttgcttggcccttagctagattttatatgatggataagcttactccattggtcatgctttcaagtataaactttctgtttttaggttcgctttcacaatatcaagctcattatatcaaagcaaagaggatggtgtctctttcccaaatagaaatgtccgcaaaggctctctcttttttatttgttatatatgcaatattgtatacagagttaagaacttcggcagttattatcggtcttattgttaatgcctgtctcaggttagcttttatgagctattttggagataaagattggaggcctaaatttgttttcgaaaaaaacatttgtaaaggtgtcttcagttatgggatataccagctcggttctcagataatcaatcagcttagaactcaattagacgttattattattggcaaagtccttggtggtgattctttaggtttatattctcttgcaaaagatttgattatgcaacctttgaaactgattacaccagttataaatagattagcactacctcgttttgctgaagcacagcgtgatactaatcttctagagaaagtatacttaaaagggactctgttaatagtatcagccagtgcaatatcgtttgtcggaatttttatcttttctcctataattatttttattttgtatggagagcagcgtatgacgataatgactttattaccttatatgttgctttttggaatgttgagaccaatggggggattaactggcgcgatagcacaagccaacggaagaaccaatgttgaattcaagtggaatataatagcaggcattgtagcattatgtttgtcaagctcaatatttttatattcctctctatggtatgtctctctggtgctatcgattactcaaataataataacttttcttgtgtatccatttttcgttaagccaatagtaaattcaaatttctcttcttaccttctaaattggatgccggtttgtctgttgtttattgttattgtaatattgattcagaattgtaatttctttgtttatcctttttggtaa

SEQ ID NO: 196865 - DNA, 147 bp, Klebsiella oxytoca
atgattcaaccgtttcttagcaataactatttagggggaattttccccctccagcttatctctgagatcgatttagtcactaccgaacaaatcacgggtatacactttgtcagcgacatccgacagctcttcagccattcggtttga

SEQ ID NO: 196866 - DNA, 1866 bp, Klebsiella oxytoca
atgtttcgtcttgacatcaacggcttgcgtttcattgctgtagcaatggtggtactttttcatttcaaaataggatatttttatggcggttatgctggagtagatgttttctttgtaatatcagggtttctgatgaatgaaatctgtaaagaaaaagtaggtacaaaaggctgggttagtaatttttataaaaagaggtttaaaagaatctaccctgcattagtagcgtgtgttttgttttcgtttatattggcaattacatccacaccaccatcaatgcttagaagtctttttctgcaagtaatatcatcattgagttttacttctaatctatattatctaaaagcaacttctggatattttacagatgcggctgatagttttattttcttacatacttggtcattgtctgttgaatggcagttttacttgattttccctttaattttaattgtttctaatgcgttatctaaaaaagccccacaatatgttatctatttcagtctcattttgacttcttttatattttgtattttattaatgaaatacagccaaatgtattctttttatttgttgcctagtcgagcatgggaattaataattggtgcgatggcatcatcaatcacgttcaaaaatagataccctagaactacagaagttatatcgttggttactttaatgctatttactggtatagttaaagaaagctatagttggcctggttttacgacattaatccccacgattgcaacggcgctgctactacatgcgaacattgggaataataaaactttgttaaaagcaaaaccattccaactgattgggtcagcatcatattcaatttatttatttcactggccagtagtgtcgttattttatttgaataatattgagttcagtctcttcaatcagttcgctggaatattaatatctctaattcttggctttttatcctatttcttcattgaaaaaagagcgcaactagcgattcttaagcttgctttttgcgcaatatttatttcatttgtggcttttttatgtaataaattgaatgcttctaagttgtggttacctaattccgtattggcaatggatgaatttcattcttatgcgggatctaaagaaggtattgaacagtttggtaaccagggacgaatatgcttcctgacaagtggatataatagcgctagtcaatttactgagagctcatgtttggcgaaaaaggctgattctagtatacaaagattgcttctggtgggtgacagtcatgctgcagagtattacaaggcatcaacagaattatacaaagattttttggtaatgcaagtaacctcatcaggctgtatgcctttcgtaaataatacttatggggagaagagatgtactgatttaatgggaaggctatataagcaatacattaaagaatataagattgataccgtgattatatctgctaactggattgatggtgagaagtatttttccccttcgcaaattgcaaataatatagaaaatacagtggcttttttcaagcaatatgctagggatgtagttgtgttggggcaaacaaaaaattacgacaccgcattctatcgtatcgcacaaagtaatgattttaatgaaattgataaacatgcattgataccccctaaaaatctgaataattatctcgtggcatttatggaaaggaaaaagattaattatataaatctttatgatttagattgtgacgataagaaaaattgttcttatatctcaccagaaggatatcccatgatgtttgataacaatcattttacatatccatgggcgaaaattatgttatctaaggttcgataccaaaataatcattcaacgcgtgaatga

SEQ ID NO: 196867 - DNA, 2166 bp, Klebsiella oxytoca
atgtcatcagtaataaataaatctacatctaaagatgatgaaggaattgacttaggtcgccttgttggggaagttatcgatcataggaaactaatcgtttcagtaacatccttatttacattaattgcactattatacgcaatttttgctacacccatttatcaagcgaatgcccttgtacaagttgaacaaaaacaggctaatgctatattaaataatcttagccagatgcttcctaatagccagccacaatctgcaccggaaataacattacttggctcgcgtatgattcttggcaaaactgtagatgatttaaatctgcaaatacgagtaaagcaagaatattttccaatatttgggcgaggtatggcaaggttaatgggagataaaccagggacgctgtcagtatcacggttatatatacctgaatcaaatggggaagatgttcctgaaattcaattaatagtaatcgataataataattttaaacttgatattggtgatgaatcttacgatggtaaagtgggtgagctgttagacaaaggaggtataacaataaaagtagatgaaattaaggcgacaccaggtgctaaattctcaattaaatacgttagtagattaaaggcaataacagatttacaagagggcttggaagtcgccgatcaaggtaaggacacaggaatgttgggtatttccttgactggagataactcacaacttattgagagaatagttgatagcgttagcaataattaccttgcccaaaatattgcaaggcaggctgctcaggatgcgaaaagtttagattttttaaatgaacaattgcctaaagttcgaagtgaactagatttagctgaggataaattaaataaataccgtcagcaaaatgattctgttgatttgtcattagaagcaaaatcagttcttgatcaaatagttaatgttgataatcagttgaatgaattaacatttcgcgagtccgaaatatctcagttgtatacgaaagaacatccaacgtataaagctttgatggaaaaaagaaaaacattacaagatgaaaaaacaaagttaaataaacgtgtggcaacaatgccagaaactcaacaagaaatactaaggtttagtcgtgatgttgaatcggggcgagctgtgtatatgcagttacttaatcgccagcaagaattaagtatatctaagtcaagtgctattggtaacgtcagaataattgacaatgcggtaactgaattaaagccagtcaaaccaaagaaagtattagttgtacttatcggtattatattgggtggaatggtctcaattggtatcgtattactacgtgtctacctcaggagaggtatagaaagtcctgagcaattagaggaagtgggttgtaatgtttatgcaagtatacctgttgctgaatcctacactaataccgtttcacaagctaaaaaatggggtaaaaaaagtagtgatgaaaatcaaggttttctcgcggtagataacccggctgatcttgctatcgaggccattcgtggcttacgtacaagcttacattttgccatgatggaagcaagaaataacgttctgatgatttcaggtgctagtccaaacgcagggaaaacatttgtaagttctaatttagccgcagtaatctcgcaaacaggtaaaaaagtattattcattgatactgatatgaggaaaggttatacgcacaagctctttcatgagaacaacgaaaatgggctttccgatatattagtcggaaaaattgaaccttatgcagccatcaaaaaagtcacatcagcaggttttgattatatctcaagaggaatggttccgcctaatcctgctgagttgctaatgcatcgtcgctttggcgagttaataaattgggcaagtgaaaactacgacattgtagtattagacactcctcctattttagcagtaacagaccctgctgtgattgggcattatgcgggtactacactattggttgcgcgctttgaactaaatactgtaaaagagatagaagtaagtgttaagagatttgagaatactggaattgtagttaaaggttgtattttgaatggtgtagtgaaaaaagccagtagttactatggttatggatatagtcattacggttatacctacaaggataaaaattaa

SEQ ID NO: 196868 - DNA, 633 bp, Klebsiella oxytoca
atgacgcttatcgtcaggaatattattgtcagtattgctttggcagtatctgattttttttcgtttgtaatttctttgtatttggctataggtgttttatcgctcacaatgagcgattacgaaaaaattgtgcctagtaatcaaatagaaggctggattgcgcttcattggcttcttgctttctgttgtgtcggttggtataccataagattacgtcattatttttaccgaaaaacattttggttcgaattaaaagaaatacttcgtacattagtcattttcgcagtaatagaaatcgccgtaatggcatttactacttggtctttttcacgttttttatgggtattaacctggatattcgtattatttctagttcctacactaaggatgataacgaaaagagtgttagatgtttttggtttatggcgtagggatacatggattattggtagtagtacaaatgcgatagaggcttacaaagcaataaatagtgaacgtaatctgggattagtaattgtaggttttattgcatgtgaaggcgacactaaaagagttagtgacattgacggcataccggttttaatgaacgatctaaatggctgtcaacgattgataaaaaaactcaatttatag

SEQ ID NO: 196869 - DNA, 1305 bp, Klebsiella oxytoca
atggctgagctcagtatttctgttatttctgatcaggcatcggaaagtaatcaggccgggtggtggcacccgcttgattcattccagggggcggaatattacggcctgtgcaaagattttggcacacccggaaagcaccaggttgaaatagtcagacgtgatatagatggcacgctgacgcgcggcctgtgcaaaaacactgacgggactaccgctgaatacgacaatgatgtggggcacaaccaaccctcggttgtcgttgacggtgagggatatattcatgtcttcacctcgatgcatgtgaacctgctacgctattttcgcagcactcgctccggcgatgttagcgagatggtagatgcatcctgggattttacagatgtcgactggccctatacctatccgattgttgcgcgtggctcaaacggcgatgtgtattgcatgatgcgtgccggagtacgcagctcggttggggccaataaacaaggcggggtcatctataaatatgacctgtcagggaaagtgtggtcacgctttgcaccggcagctgagacccagcatagggcgatctaccctgacgatatgtctggtcacgcagatgggctacatgtcatttttcaatgggcgccgtaccctgcatcggccgtcagacatgtcggggagtacggaatcatcggcaacgatggcctgatgcgcacggttaatgggttacaggtttctatgccggttactcagggccagctggcatataagccccttcaggcaggagaaaactcatcatccggcaccggtctgacaatagggatacagtcggcaaaatttgcgtttgatggcgatgctctgtcccacatcgcttaccgattcagaacagaagatgatccgaatggcacatatttcagcaagtttcgggtatttgtcactacgtggaatggatcgtcgtgggtggaagaggaaatagcgtatgttccgcctgaagtgggcgacacatcagcagccctggccgcgacgatccagggcggtaagcgacgggtttatttttccgttgagtacacagcaggtggcagtaaggtggctgtgatagtccttgctgaagatacagagtccggatggatatattctattctgggaagcaacgccccaactttgcttcgcttaggttgtgcgcaattagatgagggtgatgtgctctacgtttcatccccatatgcgggcatggtaagtcgttacttcattcccgaagattatgaaccgtccagcgtattcgtaagtttcagtgaactgctgggaactttgactggtgattaa

SEQ ID NO: 196870 - DNA, 675 bp, Klebsiella oxytoca
atgggaaccgcaattttcactaaaggggctgatgtctcagcgtcatcaaatcattattttccgcctgttgaaactccactcgtctggggcaattttgaaacagatgcattgcgtcaaagtcgtcgcctgactaactggggctcattagcgggtacgtttactttatcaggtatcgcgcagttggttgccaaaggtattgccgcaactgccgggacagacagccgtatcacgctggggacgtttacgcctgacgcgttcacgcttgtagcgttggtcgatgttggcgaaaacgcggctattttccgccatcgtaatatccgcatcagtactgatgccagcaagaaattacaacgcatcatggatgcaggcttcagtaattcaggtattacagctccgtccaccggtgcatttgtcgtatttcttaatggggatgcgacgggacacgcctatggtttgctgacgtcatccagcgtgcagaaatccacatcgactgctgctaataccagaacaactgccacctggcttggcgggaacaatcaggctggtgtggccactgcctgggcggcatatggtacggcgttttatgacagaaaactcagtgataatgaactgattctggtagcagaacgtcttatcaatcgcgcaagggctctgggagtgacggtaaatggctga

SEQ ID NO: 196871 - DNA, 1599 bp, Klebsiella oxytoca
atgatggtcagtatcaataccgaggtaagtaacatgtcaattttgcaggaaaatcctgaatgggttgatggtatttatcaactcacggaagagacccccgttctcggtaagcaggagaatgtgtcgggtgatggcccgtcgaatattcaggcacagcaactggctaaccgaacgttatggctgaaagaagaaattcagtccacatctgactatcgggaatacaccttttatacctccgaatcagacccggacggcaccattgccgggcgtgccggtacgccggtcggaaaaacatttcgggtggcgattgctgatgcggaaaatgtgatcattgcattcagctattaccgtaacgatggtgataccgtaatctatctcaactctgtacccagtaaccgatatattgaaaatgttattgattttattgctcaggaagtcaggaagaggacgaacctgatttccagcagcggctcagatgcaattctgtcactttgtgatgaatggggttatgaggctgcaagaatcacagaatcaagttttgagacggttaccctgcagcttatcagaacttctacaggcccgcttttattactggctgatgaatacgggaatgccattaaactgttatcagagaatggtgcgctgattgctggtaataacgagtttcgtacttcagagcatttactctccattcaggatgaatatggaaacgaaattgtgtttctggataagaaggggcggcagtatatcggagaaaatatcatttttgatgcgcctgagtgggcgcatgttgttctggatgaatttggatgggtcatttttggctacaaaaatgatggtacctatgtcgggccagataccggagggggcagtaacatagagcccgttccgtctgttattgaagccgaagcggcagctcactggctttttggatatgaaggcacatcttacagcagtcgtgtcggtaataaatctctcacgcctcaatcagcgccggaatttaatcagaattttatttctctgcccgcctggaacggtgcgttaatcagcgacatccctgaaagcggggaatatacggtctgtgccgttgtacgaatacctgtccaggcgtcggagactgactgtgtggtgatttacggtacacagaatgggtattccctgcgggatgatgatgatacatataccggcaatcaactctcattattctctgacagggaatctcggcgctggattcggtcaaaaatatcaggataccgtggcacatcccgacattacccaacgacctatcctccgacggggcagtggctgtttatcacgcacgttgtaaaactgacgggcaacggcgagcgattccaggtaattagcattggagggaacaattatcagaaactccgcgaggctgattcggatcgtctgattctgtcaggcaggacgttcgcaatcggtaatgcctattgcgatgttcctatgtttaaaacaaaaggtctggatattgctgaatgtatttattttgacagtgctctttctcagcaagatatccagcgtgtttatcagaattcacgccagcgtatgactgagcgtcgtatcagtttactgtaa

SEQ ID NO: 196872 - DNA, 810 bp, Klebsiella oxytoca
atgagggaaaactattattatggtcagggtaaggtattcctggctccgagagataataagcgtgcatttcgttgggtcggcgatgtttcaacattgaaaatagcgttttcgtatgagcaacaaataacgaaagcatcgcgcggcgggcagctctatcagaatcagagaatcattaccggtgccagcggttctgtcagttcaacctggcataatttctcggttgaaaatctggcgctgttattgggagcccaaccggtagatgagccgttttcatttaatgagcagttcgccttacctgatgggatcgttaaaggggatattatcgcgctgccccataccacggtttataacgtcagtattaatggtctggaacgtgatactgattatgttattgaccgccagttcggcacgattgagtttctggtaactcccgtatctacgggcctgattgctgtatacgaacaccttttcaaccagtggctaccgtttttctctgcgaaaacacaggaattatgtctgcgttttcaggggataaatcttgcagatgcagcacctgtgctgctggaactgtatcgggtctccgtcgaccctcttgcggcgcttgagttaattaatagcgggagtgatatcgcaggcatggatatgacctctttaatcttgcctgattttgatcagagggttgaatcaaatttaggttatttcgggcgtctgcaggtcgtcaccccgcagccccaacagcctgcacaaacagcgctgacatataacggtcaggctaactatgatggtcagtatcaataccgaggtaagtaa

SEQ ID NO: 196873 - DNA, 153 bp, Klebsiella oxytoca
atgtctagtcaacaccagtatggcctcttaccgtgcaatttgcaaggaggagtaaaccatgaaactaccgcgaaacgccctggtctggtgcgtattaatcgtctgtttaacgctcttgatattcacatgcctgacccggaaccgcttatgtga

SEQ ID NO: 196874 - DNA, 1305 bp, Klebsiella oxytoca; identical to SEQ ID NO: 196869

SEQ ID NO: 196875 - DNA, 675 bp, Klebsiella oxytoca; identical to SEQ ID NO: 196870

SEQ ID NO: 196876 - DNA, 1599 bp, Klebsiella oxytoca; identical to SEQ ID NO: 196871

SEQ ID NO: 196877 - DNA, 810 bp, Klebsiella oxytoca; identical to SEQ ID NO: 196872

SEQ ID NO: 196878 - DNA, 1815 bp, Klebsiella oxytoca
gtgacctggcacgatccggtgacgaattctgacggggaagtccgggcgcagaacctcggcgcgattcagattaacggtctgaacagcagttctgttgagtacaaagcgatccccacgcattcactcgccgcccgcgtggcccagcgagacctggagaccgcccagtctgaactgacccgtctggtcatccagttcgaccggcgcggcggtattctgcgcccgggtgatgttttccgcgtcaagttgccggaccgaaatatcgacaatatggtgctgcgcgtggggaaaatagaggaaggcgataccggcgtcctgacgctgactgtggttcaggatgtttttggcctcccatccacctcttacagttccggacaacaggacagcggctggacaccgcccgataaatccgcacgacctgtcaccatccaacggcttattgagctgccttatgctgtgctggccgggaccatcagcgaggctgacctgaactatctgaaacctgaatccggctatcctggtgtgatggccgtcgcgccgacgtcgctcagtatcaactatctgctgcagacccgtgcagcgggtgccacgttcgcagagcgtggccagggagactggacgccgtcaggaacgctagcggctcctgtcgggcgactcgataccgtcctgcatgtcagcatggccatcttcccgaccgttggtgatggcctgatggttaatgatgaaatcatgcgtgtggacgcggtcgatattcctgcaggcaccatcaccgtcgggcgtggttgcatggactccctgccgtcagggcattactccggggaccgatgctgggcgtatcaggatgcgctggactcggacgggctggaatacctgtccggtgaaacggttgaggcacgtttacttacccggaccagcacggagacactggcagaatcagccgccccggtggctacgctgaccatgtccgggcgtcaggccagaccgtatctgccggggaatatccgggtcaatggcgtctcatatcccgatgtcgtggccagcgcagatactttcgttctggcattctctcatcgtgatcgcctgctgcaggccgaccgcctgattgactgtaccgaaaacagcatcggccccgaacccggtacagagtatgtggtgaaactgattgctcagagcactggtagtgaggtctggtcgctggccacgagtgacgccagcattccgatcccctatgtcaccggcggtgatgatgctggtgtacataccctgaagctgcagagcaaacgcgatggtctgatgtcggtttatacgttccaggcggatcttcctgcaggtcgttataaggcattcccgatcaccgtcaccctgtccctgaccgtcgtggatggtaacgactgggccacggcaacgccggaagataccaccaccggtgcggtgccggagctgcacgccatcgccgatgccgccggaatcaccgcctggtatccacccgacctggtggccagcggtctgtctattcctgccgatgatattgaatggccagccggtacatggccgacgtcgccgtggtcgttcggcacccatccggtgctggccatcgcgcagtggactgaaaccagcgggccactgaccgtgctggcgctggaaggtgatgcctctgcgctgctgctggattccgcaaccgggccagcagctgctattgaatgggacgccggtatttatctcgcagaaatggatatcactatttttacgacagacggtcccgttttgaacgagggcataatctccctgaaactgactgaacggagtatcggaccatga

SEQ ID NO: 196879 - DNA, 597 bp, Klebsiella oxytoca
atggataaagtcatcatccagcgcgagacgtatgacgggccgctcttccggcatggcccgctcgatccagacgccgggaatacagataccattaccatcccgggggatagcgtccagctcctcacgcatcgccgctttgcgaggaccataggcgttacggatgcggttataccaggtctttttactctcgacggttgccgcttcgcctttcatggcgcagacccgttcaaacagaccgttggcgaccgcatcatcaaaggtgacggtaaatacggcggcatcatcaccataacggcccgcttcgatgtcgttacaaaactgacagaagggattgttcttaccgttatgggaactgatgatgacgatacgcccaccccagataagcagcgctgtcgccgcatccagtacgccctgaacatcctgatggaacgccgcctcgtcgataaccaccactccctgcagaccacggatgttggcaggtcgggaagaaagtgccgccacctgaaacccactggcgaatcgtacgcgataggccgcaatcatccgggtattgccctgttcgtcctggtcttcgaagagaaactcttcaatcgctga

SEQ ID NO: 196880 - DNA, 276 bp, Klebsiella oxytoca
atgcactcaaaaaaacggcatctcagcgtgttaagtgcgtgtttgatgacaatgttatgcagttgttccgggaagcgagagaacgcgccgcaaccgcagcagcagatggtctttccggcagaaatgaccgtgaagtgcccgcctccggaggaagcggacgataactcgatggacgccagcgcggtggccctgaaacggttgtacgacctttacggcatctgtgcgggcaggcataccgatttgattcagtacattcagaacctgcaggggaaataa

SEQ ID NO: 196881 - DNA, 450 bp, Klebsiella oxytoca
atgacgccgactgactggataaaactgctggttcgttacctgttgttagtggcctcggggctgggaatgctctggcttatctggcatcagggatatgaacgcggcgcgggtgatgtgcgccttgaggtcgccagtcagaagacccgggaggccggagacgccctgaatcagttcatcgccggggcaaagcagctgaccgcacaggctaatcaggccagcacattgctgtcgcaacaaatcgacgcccgccagctggcggatgagaaatccacggaggccattcgtgaagcgcttaaaaagaacgctgccagccgtactggttgcaattttgatgctggcgtcatgcaggaactcgcccgagctcgtgagcaggccgcaacaaccgctacctctggttttacccgcccggctgaccgttccgtgtcctcgcccggtctatccggccagtaa

SEQ ID NO: 196882 - DNA, 456 bp, Klebsiella oxytoca
ttgggctttggtcgcctcggagagggaaccgttgcggatttcggcctcaacgcgatccagttcggtgagcgcttttttctggttcagggtctgctgcagctgtttgttgtactgttcggccttctggccggatttatccagcgctttggtatcggtgtcccactgaccaccggaaaagtttttaccgtcagtagaggtgacgccacgggactgaagcatgtcccggccacttgcactcttccacaacgtttcatagttcttacgggtttcttcaaccgcgtcggcttctttttcaagctcagagcggttgcctttccagagtttctggagtttatcggccgctgcaatgctctcagcatcggtttgtttgcgctttgcttcgattgcgatggctttttcttcagcctgttgtttttccttcagtgcagccagatcctctttgtatcgcttcactga

SEQ ID NO: 196883 - DNA, 897 bp, Klebsiella oxytoca
atggccggtcgctaccagcagctcatggatatgcgtgatacccatccgtactgggaatatgtccacagcgatgtggtcgagcatccgcgtcaggatcatctgggctggaacggtatggtgttgcgggcagatgacccctggtggatttatcatttcccggtgaatgcctggggatgccagtgcagcgtgattgcccgcaccgaagatgacctgaagcggatgggtaaagatggcccggatactgcccccccgatcaagttcattacccgcgagattggccagcgcagcccgggtggcccaaggaccgttattgtgcccgaggggatcgacccgggattcgagcataccccgggccgcagccgcgtattcagcgaggtgcccccgccccggagtggcagtccgttcggcgacggaccgttcactcctgtggcggaagcgccagccacaccggcaccgttgcctgctccccgtccggctccgacgcctgagaatgatactgacgcggtagatgccttcctgcagctgttcggcgcgaccgctgaccgcgatgcagcgttccgggacccgacgggccaacgcatcgccattggcagcgacatgttcgcggcaccggagggtcagggtcagataccgctgtcagtggcgcaggcactgcagctggcagagaccattcaacaccccgatgaaatctgggcgcagattgtctggttgccggaagagcagcagtcgctggtgaggcgctattacctggcccgtctgcagcaggaaggtgaagctgacccgctgtcagtagtgttcgccaccgggcgcgatggctgggccggaaatatttcaactgacgatacgctgctgcagtcgttgcgccagggtatccagctgtggtcgcgggagaattga

SEQ ID NO: 196884 - DNA, 561 bp, Klebsiella oxytoca
atgtcgggtgtgacgctgacgtttaatgctcaggatgcgctgagcaaactctgggatgcccgggcggagctgatgcgaccggcaccgctgctgcgttcaatgggagagcgcctgctggagtttcacaagctgcgtttccaggaacaaaagtcgcctgaaggtatcgaatgggctgcacttaagccccggtaccagcgccgtaagcgtaaaaatgcgaaccagatcctcacccgtgacggttatctgaaaaataccctgcgctggcaggtgaatgccgatgaactgctgttcggtactgaccgggtctacggtgctattcaccagtttggtggcaccatcgaaatcgccgcccgcagccagcaggcgtattaccgccagaagaagagcggcaagattgccaacgagttcgttcgcaaggacaagtcgaacttcgcgcagtggcacaccatcccggcctacaaaattaaaattgaggcccgtccgtggcttggtgtgtcaaagtccgagggggaaacccttatcgagatggcgaaaaactatctgcagggggcgtttaactga

SEQ ID NO: 196885 - DNA, 498 bp, Klebsiella oxytoca
atgaaggataccccggaagaaacactgaccgatattcaacgggctgctcgcttcttctacctgcagaaacaggcttttggtggaagggtggccgatcatacatttggcaccgcaaccacctgtgctccaggccttaatctgctacgcatagaagaagaactgtcgttggctcacctgcgactctccagaaccacgattgagcatctggactgggctacctgcattaaacagtacgatcgcccccatacgcttttttattgtgacccgccgtacctgaaaactgagggatatggcgttgattttgggctggaggaatacgtcagaatggcgactctggcccgaacgatcagagggaaaatggttatttctgtgaacgatatcgaagaaatgaggactgcatttgccgggctacagattcaaacggtagatatccgctacaacttgcagacaacaggtaaggctgaactcaaaagagagttaattatctgcaatttttaa

SEQ ID NO: 196886 - DNA, 597 bp, Klebsiella oxytoca
atgaacatgagaactattgggtggtgtgtcctgtctgtaggtattttatggcttattgtggctataaacatggacaccagcgttgaaagtagccctggtatacgggtaatgaactttagcctgattgcgcaacaacaaaatcagttgcttattggtgctttgatttcccttgcagggttaatgtgcgtaatttttggcagaaaccaaggcgggagcaacaatgccctagatgtaaagtgcccattttgcgctgagtacatcaaacctgatgcgataaagtgcaagcattgccagagcgaattacctagaaatttctcaaatgttgcagccatgaatctcttggaagaattcaaacatttttcccaccatgactttgttggtgatgatggttctcttaatgagctcaagatacaaaattttgctgatattggtatcagatacctagaagtgataaagcaagttaacggagatttaaccacggcagagaaggaacttctcacaaaaatagagtctacagccactatgttcgatagtgatctagctgatgagtttaaccagctatgtgttaaacactccccttggttggtacttggctaa

SEQ ID NO: 196887 - DNA, 231 bp, Klebsiella oxytoca
atgcctgggggagattttcttcttcggatgcatcaggagtttggagttgatataacatggttgctcaccggggtgagcaacggctcgccagctcatgaaattcaggcgatgtctcaagaaaaaaaagaactattggatgcatttgatggcatgacacctgagcaacggagggcgattctcgaggttggcagagggctcgcgcaagtcaaaccaagcaaattcgcaggataa

SEQ ID NO: 196888 - DNA, 1272 bp, Klebsiella oxytoca
atgaaattattattagttggcaatcacacttgtgggaatcgtggtgatgctgcgattcttagaggattgttaaattgcatcagggaaattgataatgaaattgagatagatattataagccgatactccataagctcttcatatttattgggtgagagtatcaagcaagatactttatattctgacgcaaaaaaaacaaaagcgggaatatacgcaaaggttaagtcaaaaataaaaagcatatttttaccatgggtccttattgcacattgccgtgaaaaggggattcttaggtatattagtctgccgaagcatattactagctttactgaaagcataaaagaatatgatgccattattcaagtaggcggttctttttttgttgatttgtatggcgctgcacaatttgaacatatcttttgttctttattagccaaaaaaccgatctatctaattgggcatagcgtaggtccattcgataacaaaaatattcagaaaattgcaaaatttgctttttctaatgtaaataatctaattttgagagaaagtattagtaaggagcttattgctgattataaattcgatatggacaacgtgtcagatggtgttgatactgcttttttagtagaagggacaaattattcttctttcaacgattacatctgtcagcattggttaaccaaaataagaaacagcaaatgtgttgccatgactgtaagaaaactagctccatttgataaacgactcggtgtaactcaggaacaatatgaatttgcaattgctcgcgtaattgaccatgtgattagtttaggatatcaagtaatcattttttcaacatgcacaggaattgaaagttataataatgatgatagaattgtggcgctttcagttaaaaataaagtaaaaaacactgaaaaaattagtgttgttatggatgagattaatgatgctcagttaggttttcttctaagtaagtgcgaatttacaattggcacacgacttcactctgctattatctcaatgaattttgggacgccagcaatagcaattaattatgagcataaatcgaaaggcatcatgcaatcactctctatggatattctttctgtaagtgtacagggactattcactgatgaagtggttaataaaattaatcaccttcataataattatgatggcatcaatcatgatttatctcttcaattgaaaaaagtcaaaaaagaagggcgggatataatttccgaagttattaaagaaattggtgcgaaatga

SEQ ID NO: 196889 - DNA, 573 bp, Klebsiella oxytoca
gtgatcaaacatcaccttgatgagtttgtccggcagttcagatgggcgctggtcagtcgtcagatataccgctggatgaaggataccccggaagacacactgactgatattcaacgggccgctcgcttcttctacctgcagaagcaggcatttggtggcaaggtggccgatcacacctttggcaccacaaccaccagtgcaccacgccttaatctgctgcgcatcgaagaagaactgtcgctggcccacctgcgactctccaggaccacgattgagcatctggactgggctacctgcattaaacggtacgaccgcccccatacgcttttttactgtgacccgccgtacctgaaaactgagggctatggcgttgattttgggctggaggaatacgtccggatggcggctctggcccgaactatcagaggaaaaatggttatttcggtgaacgatatcgaggaaatgagggaggcatttgccgggctacagattcaaacggtagatatccgctacaacctgcaggccacgggtaaggctgaactcaaaaaggaacttgtcatctgtaatttctaa

SEQ ID NO: 196890 - DNA, 195 bp, Klebsiella oxytoca
atgtctctgacctgtaaacgttgtgataatccggtcgatgatctggattttgaacaggcgacgattatggaaagttttgatggtacatggtgtgtcgatttgattctgaaatgccctcactgcgggctgtcctataacgcatttgtccccacctctgaattacaacctctgcaaggtgataatcatgacgaatga

SEQ ID NO: 196891 - DNA, 522 bp, Klebsiella oxytoca
atggcaaaagcaaaaaagcgacttaaagcaactgctgcattatatgtcgcgcagacgaaagaagaggttattacagggattaagctacttggcgatattcagcgggaacttatccgtgttgaaacagaaatgaatgattccatcgcagagattaccgccagtcattccccggccatcgagggactgaaggcaaaaatggaggagttacagaacgggattcagacgtggtgcgaagcacatcgtgacgaactgaccaataacggcaaggttaaatttgccaatctcactaccggagaggtgcaatggcggaaccgcccgccgtcagtcagtattcgcggggctgatgcggttattgatttcctgaaacgactgggccttaaacgtttcattcgtactaaggatgagttaaataaagaggcgatgctgaatgaaaaagatgccgtgaaaaacatccccggcattaccataaaaacggatgttgaagatttctccattattccgtttgagcaggaagtacagtaa

SEQ ID NO: 196892 - DNA, 273 bp, Klebsiella oxytoca
atgaaaacagtcccgaatattaatcaacagctggccaatgtgatgacggccattgccgcactcaacgccatgaatacgcctgttgccagcatcatgatttattcaggaaaaccggttattcgcgtctcccgtgacagtccgtgcgtcagtcaattcagggagcaggagtccggttatatgatgaccggcattgaccatcaggggcgatttcggcagggagaaattgagttgtacggctgcagggttatctggtccgaatctttacttcactga

SEQ ID NO: 196893 - DNA, 339 bp, Klebsiella oxytoca
atgaatgaaaaggtagatttacaggaagcctttgatgctttaacaaacagagtttgtgctcttgaagctgagctatttgcagtcagagccagagacgaggtgttgcatggctttctgacttgtcaactgatagcccatccatcaccagataaaatagagcggctatgggagcgctttgtaagtgatgggcttgaaaaacagatacttgcacgttacgaaaaaagtgatgttttcaagcgtgaggatatagtcaaggctttcaaaaaatccctaaagggagccgttgagcagtggagcgagcaagctaaggccgccagagagcttaaagaagaccagtag

SEQ ID NO: 196894 - DNA, 264 bp, Klebsiella oxytoca
ttgccccgcgttcgtcatgctaccggtggtctggcaggcatccccgcacagaatatgccggtaccggccacggtgcccgaaactgcgatggccacaccgtcagcagcgggtactcagccgatcagcctgcaacagcaactggttttcgatgccggtgatgcctacaccgccggagcccagacgttagctggccagcgccagttcaccacgtcgctcaaagcgcaggtaccgaccctgaaacaatggctggggctgaataaatga

SEQ ID NO: 196895 - DNA, 450 bp, Klebsiella oxytoca
atggttgatgccggtacgttcggtatgctcggtcagcgcgttgaagccgcttttaaggtcgaagaacgcgctgagaaccccgcttttaaagccggtgacctcggtctcaagcgccacgccttcttcgtcaggtgtttcagtggcggaacggcggaccaggcgagatttgagctcttctttttcattgcgcattgtgccgagctcttcttttttctcggccagcatctggcgactgatttcgaggtcagttgtcagctcttccttctcgcgggcatgtttggcgatcatttcttcagccaggtcaagcagcgcagttttgtcgccttctttggccacttcgataagggcgcttttctggtcttccggcaggcggcggaactggcgcaactcgcggtagccgatacccatgcgggacatggattccagggcttcttcgccgaaggtgcgtaa

SEQ ID NO: 196896 - DNA, 522 bp, Klebsiella oxytoca
gtggttgatgccggtttgttcggtgtgctcggtcagcgcgttgaagccgcttttaaggtcaaagaacgcgctgataacgccgcttttaaagccggtgacttccgtttcaagcgccacgccttcttcatcaggtgtttcagtggcggaacggcggaccaggcgggatttgagctcctctttttcattgcgcatcgtgccgagttcttcttttttctcggccagcatctggcggctgatttcgaggtcagttgtcagctcttccttctcgcgggcatgtttggttatcatctcttcggccaaatccagcagcgcagctttgtcgccttctttggccacctcaataagggcgcttttctggtcttcaggcaggcggcggaactggcgcagctcgcggtagccaatacccatgcgggacatggattccagggcttcttcgccgaaggcggtaagattggcaatatccaaatcagctttatctacggatattccgagaacgctgcagaactcgtcccatgtgcctaa

SEQ ID NO: 196897 - DNA, 132 bp, Klebsiella oxytoca
atgactttcagcagccaaatgcattacagcatcgggttgctgctcattaaaaatccggtcaagttctgctctgtcacagatactcacctgttcaaatttaaaacgtgggctgtcagcaacgtctgtcaatga

SEQ ID NO: 196898 - DNA, 609 bp, Klebsiella oxytoca
atgcgcaagcataagctgagccagaatgatgtcgatctgatggatatcaccagcaaggccagtaagggggctccgtcccatgcacaaagcatccctcgttatatgacgtttctgggccagttaatttgccgcgcgatgggcgttaactgctattactcgtttcgccgcaattatatgaacggccagaagcaaaacaccgtcattttttatggtcctgacgaacgtccggaaatcgctgcttatgccttcgacgttctttcccgacagatggtaaaagcccgacgcacctttattggttctctgcgtaaaaatattaagccagccaccaaaacagcccgcgccgaccagttctgcgaagggtgggccgaaggcgcatatcaggctatagagccatttatggtaacggaaaccgaaaaaacattgatggcaaatttcctggcaaagatgaagaaagagcaggatttatccgatctgaaaccccgtgaagctaaaaaatgtcgtggtgatcaggatgcagctgaagcgggatttaacgagggattaaaggcgcgtttaaatcacggcgtatccggtcaggaatcatccctttctctggagtacaaatcatga

SEQ ID NO: 196899 - DNA, 288 bp, Klebsiella oxytoca
gtggtggacccagaaccgacgtttttttatgaacgctgtcgtccggctggaaaccatcagggcaacacgggtgaaattgtcggcttcggcagcatcttcgcaaccctcatccgggccgggcacgacccgggcaggctcggaacctacaccctccgccagctgacgctgtattacagcgaagcgctacggcaacaccggcaggcgtgcattgaccgcgtatttgacgtcaatgccgcctatgccggtggtaactacgcgactcagcgggttaatgccctgaaatcctga

SEQ ID NO: 196900 - DNA, 207 bp, Klebsiella oxytoca
atggaaggcccttcagggtggaatctcatgagctcaacttttctaagcgttaatttatgcttggattctactattcatagccatgtgatgaacactggtaatgaaaaaaccttggtcattcaagtgattcatctcaaagtaaacgatatgaattgccactgttttggtagtcatccttttaggtggcttaagtcaggaggtatttaa

SEQ ID NO: 196901 - DNA, 615 bp, Klebsiella oxytoca
atggaggacaatgacaataaaggcaagaccctgaaagcggccagcatcgccgaggcgatcatcagcaccatcgcaccgctggaaggtgtcaaacgcagccaggaagcccgttttcgccagttacaccgtgtcctgaaggactccagcaacgccggttacagtcacgttctggtgattgaagaggctcactcgctgccgctacccacgctgaagcacctgaaacgcttctttgagctggagcatggatttaaaaaactgctgtccatcgtgctgattggccagcctgaactcgcgatgaagctgtcagaacgtaaccaggaggtgcgcgaggttgtacagcgttgcgaggtcgtcgagctcctgccgctggatacagagctggagcggttcctggagtttaaatttaagcgggccggtaaaaccgtctcggatgttcttgataacagtgccgtcgacgcgattcgcgcacgcctcagcaacaatattggcggtcgccggggggttgtcagcctgttatatccgctggccatcagcaatctgattattgccgccatgaatatggccgcgcagctcggcgttccggttgtcaatgccgacgttattaagggggtttaa

SEQ ID NO: 196902 - DNA, 216 bp, Klebsiella oxytoca
atggatacgttcgatcaggtcgcggcgcagcgtacttttccccgccccggactctccgatcaccgccataaaaccaccgtgccgggccgtctgatacagcgcctcgcggacgtagcggatatccggcgtggtaaacacatcatcagaactctgcatggcgtcatccgcgaacgggtcacggaaaataccgaattgctttttggtgactggatttaa

SEQ ID NO: 196903 - DNA, 189 bp, Klebsiella oxytoca
atgactgcagaacaagtcaaatcactctttcgccagcgtggggtcacctttacccagtgggctgaagagcatggctactcccggagcgaggtctaccgggttctcaacggccagaccaaagccaactacggtaaatctcacgagatcgccgtcaaactgggcctaaagcccggcaatgttgcagcctga

SEQ ID NO: 196904 - DNA, 399 bp, Klebsiella oxytoca
atgacgaacgcggggcaaccagccctcgactgcagccatcccatgccggttgaactgatggagaaaacccagcgcacccggctgctgaaccacagctgcacgggtcacaaactcctggtcggagagcatcgccggaatagagtcagaggtggtgctacccgggccacgtacctgaccaccatcggcggcaaaaagactgccaatcaggccacccgcagcgccactgctgccaatcaggctggaggtggccatctgggccagctgctgggccgccagttgcgccatgctgttaataatggtgagggcgaggtttttcaccgcatcgcgaaggttcattgtccctttggccagtcccatcagggagctctcgataccgctctgcaggccgtcacggaatga

SEQ ID NO: 196905 - DNA, 447 bp, Klebsiella oxytoca
atgctttccgtgatgctgggttcgactgctatttacggggtactcgaacaatcatggaaaaccgttgcgcttgtggctcttggacttgtcactgggctatcggccattaatctggtgctgggttcttcccagagagctcgcctccacttcgatctggcacgtcaatttgttgagctcgaaaaagcgatgatgaaagctgccccctcggaggaaaagattacggagtttacagataaacgcctgaccatcgaaatggatgaaccgccagttctccgtgtactggatgcgttgtgttataacgagcagcttcgagccatgaactatcccaattcagaaatggttagtatcggttggttccagcgtaagatggccccctttattgacgttcacagcgatcagctgaggaagataggtcaaaaatcgcaacaacctcaacaacagaattaa

SEQ ID NO: 196906 - DNA, 261 bp, Klebsiella oxytoca
atgatgaaaaccgaaccctcggaggaaaacattgctgagttcacagataagcgcctgaccatcgaaatggatgagccgccggttctccgcgtgttggatgcgttgtgttataacgagcagcttcgtgcaatgaattatccgaaatcagaaatggttatcatcggctggttccagcgtaagatggccccatttattgacgttcacagcgatcaactgaggaaaataggtcaaaaaccgcaaaaacctcaacaacagaattaa

SEQ ID NO: 196907 - DNA, 207 bp, Klebsiella oxytoca
gtgcgccacggcgataccgcgattgccggttgtctggcgaactatgcagccctgaacctggccactgagattgcgtttgaatcgaccggtgagcgcgatattttccgcgtgctgtcaggcttcggtgacagcagccgcgccggtgagctcaccgataccgggtttggaaccgtgcgcggtattaatgactttggaggattcctgtga

SEQ ID NO: 196908 - DNA, 207 bp, Klebsiella oxytoca
gtgcgccacggcgataccgcgattgccggttgtctggcgaactatgcagccctgaatctggccactgagattgcgtttgaatcgaccggcgagcgcgacattttccgcgtgctgtcaggcttcggcgacagcagcagcgccggtgagctcaccgataccgggtttggaaccgtgcgcggcattaacgattttggaggatatctatga

SEQ ID NO: 196909 - DNA, 201 bp, Klebsiella oxytoca
gtgaaaactgatatcaccgaactgacgcagagcgacatcaacaccgcgatgctctcctcaatcgaagggtttgcattccttgtcgttgattctctcgaattcgaaatggatcgtgaacttactgatgaggagtctcagcgcgtctataagcaggtagaagcggctattaacaacgcggcaagcgaaggcggtgcagcatga

SEQ ID NO: 196910 - DNA, 225 bp, Klebsiella oxytoca
atgaaagttaaatgcatcaaagataccgagggttggtggaccgaaggcgaatattacgaagctgtagaatctgccggcggttttattctggttggcgatgatgaagacccagcaggtgacggctggagcgctatgcctatcgaatatcgtgacgatggttcgatcgtttatgccttgggcggcatcgaaggtgaggtgttattcgaggaggccagccatgactga

SEQ ID NO: 196911 - DNA, 567 bp, Klebsiella oxytoca
atggcgggggtttttgcttcatatggcaggttgaaacacaggacagatgaatacctgtccacgacgctatacccaaaagaaagcggcttaacggtcagcttcctcattcaaagaaaaccctcgtcagcaatggcgggggtttttgcttcatatggcaggttgaaacacaggacagatgaatggctgtccacgacgctatacccaaaagaaagcggcttaacggtcagcttcctcattcaaagaaaaccctcgtcagaaatggcgggggtttttgcttcatacggcaggttgaaacacagggcagatgaatgcctgtccacgacgctatacccaaaagaaagcggcttaacggtcagcttcctcattcaaagaaaaccctcgtcagaaatggcgggggtttttgcttcatacggcaggttgaaacacagggcagatgaatgcctgtccacgacgctagcgggcatagggcgcgggtgtagtcgatcagttaaggacctggcaataaagcggagacaacgcgcaaggcaggtctgccatcaaccgcaggatgaatcatacggccattaa

SEQ ID NO: 196912 - DNA, 1464 bp, Klebsiella oxytoca
atgataaagaaaaaaggatttaccttgttagaggttatcatcgtgttgggtattggcagtcttattgcttttatgaagtttcaggatatgaaaaaagatcaggaaacggttatggcggaaaatgtcggaacacaaataaaacagcttggtgaggcagttaaccgttatatcagtattcgatacgacaaggtttctaccttgtcatccactaataaccaaagcagtgatccggggccaagaacctgtgcggctaatggttgtgaaatcacttaccagacgttgattaatgaagggctgttgcctgcaggctataccggaaccaacgcgcaaaaatccacgtataagattttgttgaagcgttcaggagcagctcctgattatgtaattaatggtctgataacaaccagtagtccgtggaaggaagggaagaacgtccgttatgacctgctgggtaaagctgttcaggctgcgggtgttgatgggggtatgagcagaagcaccaagatcgcttctggctatggtggtcagtggagtgagaattcaggaagctacagcaatattactgacgggggattgttggcctatcgtgtaggatataactcttccatgtattctgtttatctgcgtcgtgatggaacattgcctatgactggcgatctaaatcttggcggtaagagcatcaaaaacattcaagacattacggcatcaggaacaacaacgaccggaacacttaatacaacgggtaaagcgtctgttgcatcagatcttgctgttggtggaacctcaaccctgaacgggcaggtgaatatcaataataacctgaaagtaaaatccgatacttatctgaacacgctatctacaaccgggctggctaagtttggtggacgtattgccactaatggactcaatcccaacgatctaccatcaggatgggccggaggtgttcgcacttatgatttgtatgcgtctggaactgttggggctggaacagggaaaacagttaatgcttatatgaatagcgcaggtaatattttcgcgtcaggcaatctgacagccggaacgataaaatctaatggaacaattgaatcaacgggaagggttaaagtgggtgagtatcttcatctgaacggtcaggcaacgttaaatgcgaaatgtacgcctaatggtctggtaggtcgagacagtacgggtaaggttttatcatgtgttagtggtaagtggcaaacagcaagtggtaatggtttaaaaggcatttttattacgattacagaccaagtatcaggatataagtgtgtgacgccaaatagtgatacgggaggatgctcttgtccggggtctacgtatagctcaaggtacggttatttatctggaacgctaatcgctcaatatgatgaacaacgttgtagtggtggtaaaaatacgcattgttatagtaatgacagaagattatatgcatgtaaataa

SEQ ID NO: 196913 - DNA, 489 bp, Klebsiella oxytoca; identical to SEQ ID NO: 195966

SEQ ID NO: 196914 - DNA, 543 bp, Klebsiella oxytoca
atgtttgagcagcggctgaaaccgctcaatgaagcggtgcttttctcggccccggaaggcatggccatgaccagtggtgaagatatgcagctggccgctggccggaacctggcggttaactccggagaagacttcagtgctggcgtgatgggcaatatgaccgctctggccggagagaagctgggactgtttgcccggacggggcaagtcagcctgaaatccggagaagggccaatagatgtccaggcgcagaacgccagcatgcggttgtttgctgagaagaagctgacgctgagctcagcgagtgacatctcctttgccggaaaaaaacgtatcacgctgatcggcggcggaagctatctgcgacttgaggccggaaaggtcgagtatggtacgacagcgacgtatatacggaaggtgaaaaggactatggcggcgggggcggcgagtatgccccttccattcagagagaaaggattatgtctgagctgtttgatggatgcagcaatgaacgggacggctgttgtgctgaggggaaattaa

SEQ ID NO: 196915 - DNA, 402 bp, Klebsiella oxytoca
atgggcaatctgaccgcgctggccggggagaagctggggctctttgcccgcaccagtcaactgagtctgaaatccggcgatgggccggtagatgttcaggcgcaaaacgctaacatgcggttgtttgctgagaagaagctgacgctgagctcagcgagtgatatctcctttgccgggaaaaaccgcatcacgctgatcggcggaggaagctatctgcgacttgaggccggtaaggtggagtatggtacggcagcgtcgtatatacgcaaagtgaagcgaactatggctgcggagccatcatctcttagcttaatgccctcttttagtcagagcggaatatgtctgagttgtcttcttgaagctgcggaaaatggtgcgctaatagtaattaatggggagtaa

SEQ ID NO: 196916 - DNA, 624 bp, Klebsiella oxytoca
gtggatcagggtaacaaccattttgatgttgtcgcccggcataaccatctctacgccttccggcagttcgatggtgccagtcacgtcagttgtacggaagtagaactgcggacggtagcctttgaagaacggagtatgacggccgccttcgtctttggacagaatgtacacttcagattcgaacttggtgtgcggcttgatggaacccggcttagccagtacctgaccacgttcgatttcttcacgtttgataccacgcagcagaacaccaacgttctcaccagcacggccttcgtccagcagtttgcggaacatttcaacgccagtacaggtagacttcgcagtctctttgataccaacgatttcaacttcttcgccaactttgatgataccgcgctcgacacgaccggtaacaacggtaccacgaccggagatggagaatacgtcttcgatcggcagcaggaacggcttgtcaatcgcacgctctggttccgggatgtaagaatccaggtagccagccagttcgatgattttcgcttcccagtctgcgtcgccttccagcgctttcagagcggaaccacgaacgatcggggtgtcgtcgcccgggaaatcgtactgggatag

SEQ ID NO: 196917 - DNA, 267 bp, Klebsiella oxytoca; identical to SEQ ID NO: 195977

SEQ ID NO: 196918 - DNA, 129 bp, Klebsiella oxytoca; identical to SEQ ID NO: 195981

SEQ ID NO: 196919 - DNA, 831 bp, Klebsiella oxytoca
atgcgcgcatggcaggcctggtgcgaggggctcggactgaacgtgctggccctgacgccggatgcccttgccctgccgcagaacccgaccggctggagcgccgtacgctgcggcgaacagtggctgtttcgctgcgagacgtgcagcggtatggcggtggaaaccccatggctcggcgaactgctggcccactggccccatatcgcacccatcgcctgctactcgccgccgccggatatcgccgcgccgtggcagcctcgcccggcgcaggatttgctggcgctggcggcgagcaacccgcaggcgcgcaaaatctgcttacgccagggcaattttgccgcgaaacgccggccgccgacgccccgacgctggcggccgacgattgtcgcaaccctggcgctactgctgctgtggagcggaaatcgcctccacgaccatctcgccctggcgcgtcaggccgacgccgccgtgcaggccagccgtgatttttaccgccagtggttcaaagcggaaaaaaatctcgtcaatccacgcctgcaaatgcagcagcatctgcgccgtctggaaaacgtgagcgcccggccggcgctcatctcacggctcggcgccctgcagcaaatcatcgctgaaacgccgggcattcgcctgcgcaccctgagctttgacgccgggcgcaacgcgctgcagctggagatatccgccgtttcatcgcaggccctggcgcagttcagccagcgggcgcgggcggggtttcgcgtgcagaccggcgagatgaagccgcgcgccgacggtattgaagggcgtctgacgctggagggtaacgatggataa

SEQ ID NO: 196920 - DNA, 636 bp, Klebsiella oxytoca
atgggtaacagagtggacaacaaagccccgaaattcactaccaaacgcggcaacactttctacatcaattttcgtctccctgatgggacattctttcgtcgcagtctgggcactgattccctaaaagctgttcaagtgacgatgagtcgcctaagcccatatattcctctcgttcaaaatggctcgctatccgtcgagcagttcaaaatgcatattgacggtttcagagaagccacccagcgcgattttgatacctatctgttggattggttgaggctaggcgttgatgaggttaagcggatgccggaactcggacgactgaacaagtcaattttccctgatagtcctatttcagcatccaagagtgttgaggaggctaaggggcaatctgagacccttctaaaccgtgtctacagcggggatgactctaccgctcggatgttacttgccactttacaccagaagaaagtttctttcggtcaacgagacctagaccaggcttatgaggtggcggggcagattgatatgcatcaggctatgttacatcaggcatatgaggcgttctatgctggtgatattgtccgttatcgtgatcttgttgaatccatgcaatcacaactaaatagctgcgcctaa

SEQ ID NO: 196921 - DNA, 267 bp, Klebsiella oxytoca
atgaaaaaggcccgctataccgaagaacagatcgcgtttgcgctgaaacaggccgaaaccggcacccgtgtcggggaagtctgccgaaagatggggatttctgaagccgctttttataactggaagaagaaattcgccggtctgggcgtgaccgaactgcggcgtctgcggcaactggaggatgaaaatcaacggctgaagaaactggtggctgacctgagtctggacaaggagatgctgcaggaggtactgaaacaaaagttctga

SEQ ID NO: 196922 - DNA, 1233 bp, Klebsiella oxytoca
ttgttattaccaactggggtagaaatccataatggcaagatccgcatagtctttagttaccgcggcaaccgttgccgcgaaacgctgaaaggctgggtcgtcaataatgccaatatcaaaaaggctggccacttacgcgcaaaaattcacagtgaaattcagttaggcgtcttcgactacttaacgcagttccccgactccagaactgctaagaaatattattccacgctgagaattaacacatttcaggagttgtgcgctgcctaccatgacgcgaaagaactggatattacacacgcttcaatgcgtaacctggaatcgaccatttccacactgacccgcctgataggaccctcgatgctaattagcgaaatccaacagatggatattcttaattatcgtaaaaaactcctgactggccctgtggttaacgagaagtacccccatctgaataaaacaggccgggcacctgcaacagtcaacgagcaaatccgtatactctgcaccatgatgaaatttgcccaaaatagtaacttcatcaaccacagcccttttgaaaaaatcactatgttgaaacgtcccaaaaaagcgccagacccattaacgaagaatgaatatgcagagctaattaaggccgttccaaaagccatgattaatctatgggtagtagctttctatactgatatgcgtcacggtgaactttgcgcgctaatctgggatgacgtggatcttaagaaaggaacgatccatgcacaccggaatatcaacaactacgaccaatttgggccgccaaaaacagacgcgggggtacgaacgataaccttgcttaaacctgtactggatgctcaacaggctcaatttgcgacaaccgggaaagataataaaaccgagattgttttccatcaccgtgaatacgccagcatggaacaccagaaggtgaatttcgtttttcgcccgctgagaaaatcaaaagagccgaacccctactactccaaaaatgcgcttcgttacagttggaagcttggcatcgagaaatcggggatccgcaagcgggtgccctatcagtccaggcacacatatgcctgctggaccctatctgctggggcaaatccttcgtttatcgcaacccaaatgggacatgaaaatgcgaagatggtttatgaaatttattcaaaatggatgagtgaaaaggacaaggatgaaatcgctatgctgaacgcaaagatgctgtaa

SEQ ID NO: 196923 - DNA, 372 bp, Klebsiella oxytoca
gtgccgctggtccagcgccagcgtgatgaagaaaagctgctgaatatcgttgttactgaccgcaaggaatgcagccagaggcgctgcaaacatagggccgtaatcgtcgaagaggccgagcgcgtacttcgctgcacccagtgcagggtcgttttggatcccttcgagcatattctggctgtcgcctatgacggtgagtccatagtcaccgagatcactaaactctacgaacggcgggatgagctgcgtgaggcagtcgccaaccttgagcgcgaggaaaagaacgctaaagcccgattgcggtctgcgcgtacctctatccttttcgcggaaaacgacctgaaaaacgtggagcaaggaacaaagcaatga

SEQ ID NO: 196924 - DNA, 828 bp, Klebsiella oxytoca
atgaatgataataagttcatgaatgaatctattgacgcttggttaaatgggcttgaaatggattttgcgggtctattaactggtaataatgactgggctggtatttcttgtggttcggcggtgttagttggtcgacaggcatctaaagcgctagtagatgcaaaggaaatgtcacaaatcaaaagtgatttagatgttttggcagagaaattagtaaaatctccggctaactttgtgaccacaatacttggaatcgcacaagcgaagacaaaatggaatccacttcagccagacaaatctgaaaatgaaaagaatttttataattatgtagatcaagtattaagatttcctttaatggtgtgtagcaaatccgaagatacgaatgttcattatgaatatagtaattacgattcgctcattgataatatttcttctctttatgattcggcgacagagaaagataagaaaggtattaaagacagcttggttcagctagttaagagttgcctttcaagggagaatgaagtaaatgaaaaatcgatgtttagccagagcacaattactgttgatgatgttgttaaactgacattctattcttcaaccgttcgaatggagaaatcaaaatctggcggtggcaaaagtgtaccaaaagaatccttccgatctgatgtaagcgttcgacaggttgaaattgttttcaatagtgcagcattaaatcgagaactggcgaagaaagtatgcacaatgctctacaaaggtgttgatgattggcttgaagcgaacaacacactagtaaatgataataatatacaattttgtttcggctaa

SEQ ID NO: 196925 - DNA, 813 bp, Klebsiella oxytoca
atggcgaaaacggactggaaaaagctggagcaggaattccagcgcgcgcacgccaaaactggcatcaaattgcaggactggtgtgcacagaacggcataagctacgccagcgctcgccgctacatcaaaacacgcaaaagtgcgcaaaataatgcgcagaacgcgcagaaaaaagcgcgcaaaagtgcgcaaaaaaagaagacggaagccagtaacggcgaggattctccgcaaaatctatctcgccccaacaaaggcgaaaattgcgcagaagagccaaaaacgaaacggattcgcggatcccgatctttggccccgacaaacgcgtttcaggagcgcaataccgcagccgtaaaacaccgcggctacgcgaagtatctcgatgctgatggactgatggacgatgccagcgagatggcgctcattgacgagctggttttcacccgcgcccgggcgctatcggtcaccaccacgatgaaacgcatgttcgatgacatggcgcaggccgacagcgttgaagtgcgtgttgaactgtacggcaaaattctgcaggtagagcaggcgctggaccgcaatattgggcgtattgagtcgatagagcggacgctcagcacgctggatgtgtatgcagccaccacaccgaagattatcgccgacaccgcacgcattaaagcggcgacggcgaaactgaaagcggaaaccgacattctcaccagccagaaacagggagttaccacgccgatgacgtccatcgttgccgacattcaggtgatgaacaattcagggaggatcaatgactacccggaggaatga

SEQ ID NO: 196926 - DNA, 1752 bp, Klebsiella oxytoca
atgactacccggaggaatgacccgcagtactgcgaaccggacatgtcagctatgtcggaggcggagcagcggcgcttcattctgctgaatctcagcaatccctggtggcgtctcaataacctgtacaaaattcaggacgagaagggaaatcttgtcacgttccgcatgcgaccggcacagcggcgtctgtttcggaacatgcacaacaagaacatcatcctgaaggcgcgccagctgggtttctccaccagcattgatatttatctgctggaccaggcgctgtttacgccacacctgaagtgtggcatcgtcgcgcaggacaaagcggcggcgggggagatattccgtaccaaaatcgcgataccgttcgataacctccctggctggttgcgggcgtcattcacagtcgtggagcgacgcggcggcgcgaatggtggctttattctgtttggtcacggatccagtattcaggtggcaacctcatttcgttcaggtactgtccagcgtctgcatatctccgaacacggcaagatttgcgcgaaataccctgcgaaggcgaaggagcttcgcaccggtacgcttaacgcggtggcggaagagtgcattatttttgatgaatccaccgcggagggcgtgggcggtgattaccattctatgtgcatggctgccattgagctggagcaggctgggttagatctgaccaatcaggacttcaaattccacttctatccctggtacgacgatcctaagtacagcgcaccggtgccgtcaggtggccttcgtctcagcaaataccaccgtgagtatttcgccgcggttgagcagcgcatgggtatcactcttaatgatgagcaaaagcagtggtacatcggcaaagagcgatctcagggtggagagatgaagcaggagttccccagcacgccggaagaggcgttcctgacatccgggcgccgggtattcgatgcgattgcaacaatgcgcgctggtggccggtgtattaccccgctgattgtctacgacattgatccggtaaccgggaagaagtcgaaggtgcaggcgctgcgcggcggtaatcaggaagagttgcagcgcacggtgatgaatcacctgctggtctgggaactgccggatcctgatgaggattatgctatcggcgcggatattgccgaaggcctggaacatggcgatcgttcgtcgtttgacgttgtgaagaagagcaccggtgagcaagtggctcattggtacggtcatctccacgctgaattattcgccatgctgctggcgcacgttggccggttatacagcagcgtcattgagcgcggtaacggcgaaaacctgtctataccggcgtatatcggcccggaacggaacaaccacgggcacgcagtgatcctggctctccgcaagatttaccccaccagccgtatttacaccgaagaatacatagaccgggataccgatgaagagacgacgaagcttggctggctgacaaccaggcagagcaagccgattgtcattgagggcatgaagacccttttacgtgaggactgtgatggtattcgttgggcaggaactatcacggagatgtcttcatacgtctacgacaagaaaggctcgatgaacgcacaggaagggtgttttgacgatcaggttatgagctattgcattgcgcaggagatgcgcgcccgtatgccggcacgcccggttgtattccacgaacgatccacatctcaacactggatgacgcaataa

SEQ ID NO: 196927 - DNA, 201 bp, Klebsiella oxytoca
atgcagattgtacagattaacaaacagcgtaagcacaaagggcagtttacgcagcagcagctgttgaagctgatgggcgatatcgatgggcagcccgactggcgcagtgatgccaatacagcggcagcttactatgatggcgatcagttgcctccgcaggttatacaggttttgcagcagcgcgggcaaagggagcaatga

SEQ ID NO: 196928 - DNA, 264 bp, Klebsiella oxytoca
atgcaacagtttgagtgggtccacgccgcctggctggcgctggcgattgcgctggaaattttggccaacgtttttctgaaattttccgacggctttcgacgtaaattctacggcattatgtcgctggcggcggtcctgggcgcctttagcgcgctttcaaggcggtcaaaggaattgacctgtcggtggcctatgcgctgtggggcggtttcggtatcgcggcgaccattgccgccggctgggtgctgtttggccagcggctga

SEQ ID NO: 196929 - DNA, 1038 bp, Klebsiella oxytoca
gtggggatcggcgccagcctgggacgccagttccagctcgacccggtgatgtccggtctgctggcgtttatggctttcttactggttgccgcgccgtacgccgatggcaaaatctccacccagtacctctctggtcagggtatttttaccgccttgatcaccgccatctattccacccgcgtttacgcctggctaaagcagaacaacattacgattcgcctgccgaaagaagtgccgaccggcgttgcgcgttcgtttgaaatccttatcccggtgctggtggtgatcgcgaccctgcatccgctgaatctgtttatcgaagcgcagaccggtatgatcctgccgcaggcgattatgcatctgctggagcctctggtttccgcctctgactccctgccggcgatcctgctttccgtcctgatgtgccagatcttctggttcgccgggatccacggctcgctgatcgtgaccggcattatgaaccccttctggatggccaacctgtcggcgaaccaggcagcgctggcggccggtgcggctctgccgcatgtctatctgcagggtttctgggaccactacctgctgattggcggcgtcggctccacgcttccgctggcgttcctgctgctgcgtagccgcgtcacccacctgcgcaccattggcaaaatgggtatcgtaccgagcttctttaatatcaatgaaccgattctgttcggcgcgccgattatcatgaacccgatgatgtttatcccgttcgtctttgtgccgatgattaacgccgttctggcttacggggcgacgcgcctcggctggctcagccaggtcgtttcgctgacgccgtggacgacgccggcgcctatcggcgcatcatgggctgcaaactggacgctaagcccggtggtgatgtgtttaatttgcatggtgatgtcggcggtaatctacctgcccttcctgcgcgcctatgaacgctcgttaatgaaaactgaagttgaaaaagcaaaagccgcagtgccggttgccgaaacggtcagccaataa

SEQ ID NO: 196930 - DNA, 210 bp, Klebsiella oxytoca
atgaacgtttcgctgtggagcagtaaaaatctgctattgcccgaggggcgtgagcagcctcacattcgggcaataaaaaaaggcggattttcatccgccttgtcggttcatcaacggttttacgctgactctttatcgctgttggccgcatccggcagcttgggcaccagcaccgtcggcttattgtcgatacgggtcaccagcagctga

SEQ ID NO: 196931 - DNA, 276 bp, Klebsiella oxytoca; identical to SEQ ID NO: 101078

SEQ ID NO: 196932 - DNA, 639 bp, Klebsiella oxytoca
atgccaaaatacctcatcatgcgtcagaatgcgctgctgcttgagcgtaaactggcaataccgccatcgaagcgggcgcatacagggaaagtggtcgttggagaaagtaaccagcggtggtgctctgacggcttcgagttcagctgtgataacggtgaaaaactgcgggtcacgttcgcgctggaatgctgcgatcgtgaggcacttcactgggcggccagtaccggtggatatgacagtgaaaccgtacaggacgtcatgctggttgcagtagagcgacgcttcggtaacagcctgccgacatgccccgttgagtggctgacagacaacggttcagcctaccgttctcatcagacgcgtcagttcgccagaatggtaggactggagcctaaacatacggcggtacgtagcccggaaagcaacgggatggcggagagcttcgtgaaaacgatgaagcgcgattacatcagcgtcatgccaaagcccgacgggttaacagcggtaaagaaccttgcggaggccttcgaacattacaacgaatggcatccgcatagtgcactgggatatcgttcgccacgtgaatatctgcggcggcgaaccagtgatgggttaggtgataaaaagtgtatggaaatatag

SEQ ID NO: 196933 - DNA, 330 bp, Klebsiella oxytoca
atgattgatgttctaggtccagaaaagcgcagacggggcagcgttcaggaaaaaatcgccattattcagcagagctttgagcccggaatgaccgtgtcgctggtcgcccgtcagcatggtgttgctgccagtcagctgttcctgtggcgtaagcagtatcaggaaggcagcctcaccgccgttgtcgcaggagaacaggttgtacccgcgtcggagctggcctctgcgatgaagcaaatcaaacagctgcagcgtctgctgggcaagaagacaatggaaaacgagctgctgaaagaggccgttgaatatggccaccaaaaaagtgaatag

SEQ ID NO: 196934 - DNA, 441 bp, Klebsiella oxytoca
atggcaaacaaacaacctgttcccctacccgcacaggttaccgacggcgactgggtggtcgttcgcggcggcggcgaacacaatcttaaaaacgtcaacgtcgctataccgcgcaacgcactggctgtgttttccagcgtgtcgggttccggcaagtcttcgctggcgtttggcactatatatgccgaggcgcagcggccctactttgaatcggtcgcgccctatgcccgcggattatcgatcatgccggcgtgctcgacgttgactgccgccggcggttgcgcttcagcagcagaacggtgccagcaacgcgtgctcgtcggtgggcaacgtgaccacgctttcaagccaggtacggatgatgtactcgcgggcgggcccctatccgtcggccagccgttgctgaatgccgaggacttttcggccaatacgcccaggtga

SEQ ID NO: 196935 - DNA, 1317 bp, Klebsiella oxytoca
atgaaaaacaagtacaaaatgattgttgataaatacgttgatttaattcgatccggagaattgacagcagggacccggttacctacacacagggatctggctgccagtaagcgtatttcactggctacagctacccgggtctatgctgagttggagacaatgggcttagtcagtggggagatcggacggggaacctttgtcagagaaatatcactacctcctggacatggtatcgatcagcatgatgtagcggcgggtataattgacctcaattttaattatccatccctaccgggacagggagagttatttcgtgaagctctcagacaaatatctggttctggcgatattgaatcgcacttgcggtgccaaccgcatgccgggaggttatctgacaggcaaattattgcagggcatctttcgcgcggcgattttgagccaaaagcggacaacgtgattatagtcaatggagctcagcatgggttaaccgtcacagtaatgggactcctgagaccgggggatgttgtcgctgtagatgcgctaacatactcaggttttaaagttcttggtgcattgtatcatttggaactgatacctatcccggtaaaaaacaacggaccagatcttgaagccttgcgtcaaatttgtaggttaagacatgttcgagccatatatgtaatgcccactttacataatcctctgggttgggtactaagccatgagcaacgtaaagaaattgttaatattgcgcgttcaaatgatctgctaataattgaggatgctgcgtatcattatctggttaaaacccaacccccggcagttgctttttttgctccggaaagaactatatacgtcaccggcttttccaaaaatgtggcgacagggttgcggattggcgtaattatctgtccagaggtttatcgtcccgctcttgaaagagcagtaagagcaacaacatggaatacaccatctcttatcgtatcactggtctgcaattggattcaggacgggactgtgtcacggtttgaaacgctgaaaaggcgtgatgcacgtgagcgacagaggatacttaaggaaacgcttggacacaagacctgtctatcacatcctgattcgtattttgcatggttccctcttccggaagatatgagggctgacaacgttgttaaagtattaatggaaaataatatttcggtttcaactgccgaacctttttgtatttctcagaatgtacctcaagctatacggcttgcgctaggatccgtcagttatgaaaatctgcataaagccctgcagaaggtcagaaatttgatttaa

SEQ ID NO: 196936 - DNA, 609 bp, Klebsiella oxytoca
atgataacactggaaaatgaagctcaaccccggtctatacagactcaggaaagcatttttattgaagaaaaagcttttcgttcccggatggtattagtgttcggtaacatcactgatacaattgcatctgatactgttcgcaggttgctgacactggacgcagaatcaaacgcccccattacaatgataatatcgtcacccgggggacatcttgagtcgggcgatgtaatacatgatgtgtcccgttttgtgtcttcaccggtcaatatggtaggtacagggtgggtaggtagcgcagccacgcatctataccttggcgccccccgtgtaagacgattctgcttaccgcagacacgttttctcattcatcagccaagtggtggaactggaggggctgccagcgatatagcacttcaggctgcagaaatcattaaggcgcgagaacgcattgctcgtgtgattgctcgagaaagtggtcagccgttagagcgggtacttgaggatattgaacatgatttgtggatgtcggcatcggaagcagttgaatatggattggtctctcgcatcattacccgccgtgaggaacttctccatattgatgatcgctga

SEQ ID NO: 196937 - DNA, 600 bp, Klebsiella oxytoca
atgtcaacagaaattctgatcgcatttattatttatgcatttgttacctcaattacacccgggcctaataacactatgttgcttgcatcaggtctgaattatggttttaaacgtagccttccccatgttcttggcatcagcattggttttgctctaatggtcattgccgttggtactggtcttggtcgtgtgtttgaaaattggcctcaggtgtatatagccttacggatatgcggtgcgacttatttaatatatctggcatggaatatagccacagcgttgccgatgtcgaaaatatctgaatcatcagcgcgcccatttagcttctgggaagcagcaggatttcagtgggttaatcctaaagcatggattatggcaactggcgccattactacttatttacctcagggagagaatgttcgctctgtaatatttttatcgattttattcgcaagtattaatgcgccaagtgttagtatatgggtcacttttggagcgactctgcgtcactggttaaatgacataaagtatctccggattttcaacgtgtgtatggcaatgcttttattagcatctctttatcctttgctatttttatga

SEQ ID NO: 196938 - DNA, 1002 bp, Klebsiella oxytoca
atgatggaaaaatgcattcgtgccgctacagtccaattttgtcaccgggccgatgacaagcagtacaatttatcggtcatagaaaatttcattattcaggctcatcgagaaaatgtgcagctccttgtatttccagaaatgtgcattactgggtattggcatgtaccaaatctcacaactgaaactttaaatgacctggcagaacgagttgaagacagtccatcgttgtccagaattgtcactaatgccgtaaattatcatatggccataggtgtaggtttcatagagaagggaggcgacgatatattatataattcttacgcagtctgtatgccggatggtaagatccatatacataggaagttacatgcttttgagcatccaaacatttccagtggaaataattttactgtttttgatacgccttggggggtgcgtattggtattctcatttgctgggacaataatcttgttgagaatgcgcgcataacagcattgctgggtgctgatattcttgttgccccacaccagacaggcggaactgactcacgaagcccattcggtatgaaacctattgaggtcagtctctgggagaataggcataatgatccggagaagttaatggctgcttttcgaggagataacggccgggggtggctaatgcgctggttgccctcacgggcacatgacaatggattcttcattctattcagcaatggtgtaggcctggataacggagaaatccgcactggtaacgcgatgattattgatccttacggcaggatcgtcagtgaagcattttcatatgaagatacgattgtatacgcagaacttgatcttggtctgcttactatgtccaccggacgcaggtggatccacggacgtcggccggaattgtacggtattatgtgtgaatctcagggctacgaacgggatgccagaacagctaggttttctgatgaagatccatctttttgtgccgaaaatggaaaattattttag

SEQ ID NO: 196939 - DNA, 543 bp, Klebsiella oxytoca
atgtcttcagttttgcaacatagtttcattcttactggtggcccagggtcaggcaaaagcacgataattgatacgattataaaacgcgggttttggtgttctaaagaagctggaagaggtgtgatacaagaccaggttaacatcggcggcgatgcattaccgtgggctaacaagaatgcatttgcagaactgatgctatcctgggaaatgcgttcgtggcatgaagcggaagggcaaacacaaccctgcttcttcgaccgtggtgttcctgatgttgcaggttatttacgtctttcggagcttaccataccgaggcatctggaaaacgccataaagaaatttcgctataaccgaatcgtatttattgctccaccctggcgtgacatatatgtacaggacacagagcgcaaacaatctttcgatgttgctgtcgcgacatatcacgcaatggtgaaaacgtatcgtatgtatgactatcaattaattgaattaccatgcacttcagtaggggaacgtgtggattttatcctttccaggatgtag

SEQ ID NO: 196940 - DNA, 543 bp, Klebsiella oxytoca
gtggtcgcagccgtcgatttgtatgagttcaccggcacaggcacggcggtaacgcggctgctgaatttttggcgcacgttgcttacgtgggacccaaagactggcctgagtcatcagtttacggacggtttctttagaaagatgaacaccgtgaacctcagacagcttttcacaggccagtgtcggaccgaaatcgttgtagcgctcgcgaataatattcagcgcgtatgcggccagtcccagaggcagctgattgttgctggatttaccacgacggcggctggtcatgccaagcggaccatcttcacgataacgcgcaagcagacggcggcactgacggtcggagataccaagctgctgagctgccatctgtgttgtcagacgccggtcgatgacgtcctgaatgatcttgagtctgttaacttcatccaaagtgaaaaactccgctgcgagagccgtcatggtaatccttacttgattatacacgccggacatcttaacttagccattatcggacattacaactttgctactacattataa

SEQ ID NO: 196941 - DNA, 138 bp, Klebsiella oxytoca
atgaaaacaaacacaagcttgatcctcaccgttgccatcctggcgttgtccggttccgctttagccgaagtcaaaatcgccctcgtggcgaaatcattgggaaatggattcttcgaagcagcgaacgtcggcgcgtag

SEQ ID NO: 196942 - DNA, 3441 bp, Klebsiella oxytoca
atgttaaatattattcccggatattgcacgctttgtcgttcccgctgcgggacgttgaatgaggtgattgaggaccacctcattaaggtaaggcctaaccctgaacatcctaatggtaaggctatgtgtatgaagggtaaagcggcacctgagttagtagacagcgcaaatcgaattctgcacccgatgaagagaactcatcctaaaggcgcagaaaatccgggctggcaacgcataagttgggaagaggctatgtcaaccatagccgggcaactgaaaaaatttaaaaatgagaatggggcggaatctgtcgctttcggttttactagcccaagcggtacaccccttagtgatgcaattgaatggttagaacgttttgttcgtatctatggcagcccaaacaccagctatgggacggagatatgtaattggcacaaagacgttgctcatcgttggacctttggttgtggcatccctgttgctgactattcacatgccgaacttattattctttgggggcataatccagccaatacatggctagcgcaggctaatgcgatagggactggtcggaataatggcgcaaagctgattgttattgatccgcgtccgacacctttagcaaaagaggcaaatgcttggcttaatgtatgtccgggaactgatggtgcattagctttgggattaagccatcttttggttgaaaggcatatgtttaaccaggaattcgttcgtgactggactaatggtcctttactgattagaaatgataatggctattttcttcgtgaaatagatattaacccatttgccaccagcaatcgctacgtggtttgggacgaacacatccagcaagtaatatttatcgattccgaaacccgtacagaagaaactcttacacctacagctgcacttgaaggcgatgttgaagtcacattagctgatggcggtaaaatatcctgccataccgcattttcctcttttaaaaatatactggctaattattcaccagaaaatgtaagccgtattactgggatatctgttgcttcaattgaagctgctgcaagtatgattggcaatgctaagaaaattgcatatcacagttggtctggagtagcacagcatactaacgcaacccaaacagaacgtgctattgcgacactgtatgctttaaccggttgtttcgatcaggaaggatgtaatcgaatctatgccagccacccggtaaatgtggttaattcaccgacattgatgcctaaaacgcaatgggaaaaggcattaggtcttgaagaaaggcctatcggcccgccttcacagggttgggttcattctcaggatatctggcattcagtattagaaggaacgccctacaaaattcgcggcttaattggctttggtgccaacatattactttcacaaagtgatacttccctcggacaacaggcacttgaggcgcttgagttttatgctcatgtagatttgtttgaaacacctacatcaaagtatgctgatatccttttgccagtaaacaccgcttgggagcgtgaaggcctaagagccgggtttgaaagtagcgctgctgctcaggagcacattcagttgagaaaacaaatggtttctccgcgtggtgaaagtcgttcagatcttgagattgttttcgaccttgcatgtcggttaggaatgaatgaagcattttttgatggtaatattgaatctgcttggaattatcaattgaagccactcggtttgactgttgagatgctcaggaataagcctgaaggttacgacataccacttgagcataaagtcaggaagtacgccttaaaagatcaaaagaccgggtatctgacaggttttaatacggaaacaaaacgtgcagagttttactctgaggtacttcatcggcacggttataatcctttacctgaatacgtacaacctcaggaatatcagcgtaatgatcctgatttccccttaatgctgacatcagttaaaagtggttttttctgccatagccaacatcgcagcctaacaagtttaagaaaaaaagcatcttatccaacggtagagatatcggttactcttgctgatgaagaaaaaattaagacaggtgattgggttgaaattgagactcgggtaggtcaggctcgtttcagagctaaggtggaagaaaaattatctcacgaaacagttattgctgaatttggatggtggcagggttgtcctgattttggaaaaccatcatatcctgttataggtgaatttagcagtaattttaatagcctaatcagtggggatagttatgatcctgtaagtggtgcactgccactccgttcgttcagatgccgtattcgtaggctgaatgaatttgaattagtaagacgtccatgggacggacgtagaactttccaagttataagtttgaagaaagaaactgataatgttacaaccgtgacttttcaatctaaagctgagggttttttaccggattatgaaccaggccagcatgtaacaataagctgttacccactgatcgattctgaagatatcgtaactagagcgtattcgttaacaggcccagcatttgtagacgctcgtaaaacttattctatttctgtaaggcaccagacagcgagagatgagaatggggagtttgttgaaggaataatgtcatcctttattaacactcgtttgcaagtaggcagttttgttgaaataactccacctggaggcaacttcatcgtcccacttaacgcaatgcaacctgtcgtgatttttgctggtggtattggtattacaccatttatctgttatctggagtctattgatcctgatgaaactggccctgaaatatggcttttctatgccaatcaaaatagtaagcaacatgcgtttaagaaaagaatacaggagttaagtagcttaattagcaggctaaaagtaataaatgtttataatcagccactagattgtgatgtcctgggagaagattacgatcgagcaggatttgctggagcgggagacgttgatgcccatctaattgaaaataatgctcgttattacatgtgcggcccaatgccaatgatggaggcgatatcgaagggccttcagcaaagaggtgttccagcatttgcaattttttatgagatatttcgttctccagcaaaaatcaatgatgatccttctctacgccataaagtaacttttgcgaaatcaggaagagaagagatatggacaactgataaaggtacattattgaattttggcgagaaacttggaatatcaatgccaagtggatgtagggttggccaatgcgaaagttgttctacaaaggttatcacggggagtgttcagcatttgaataatgtggaaccctctgatgagggggcatgtttgacatgtcaatgtatcccagcaggcgatatcacgattgatgcatga

SEQ ID NO: 196943 - DNA, 273 bp, Klebsiella oxytoca; identical to SEQ ID NO: 82733

SEQ ID NO: 196944 - DNA, 309 bp, Klebsiella oxytoca
atgattgaacaccacgatcaaaaagggtatttgcgttttgccattaatctgggtaatccggtgcttacgacactgctgccggatgggtctccggaggggattaccgtcgagctggcaaagaaactggctgcagagagccagcgcgaagcgcggtttgtgacctggccgacggccgggcaggtagtggacgcggcgctgcaggatcaatgggatatcgcctttctggctatcgacccggcgcgggaagataagcttcgctttacgccgtcctatgtcactatcgaaagctcgctgatggtgaaaaaatag

SEQ ID NO: 196945 - DNA, 204 bp, Klebsiella oxytoca
atgctccgtattagcttctccaggttaccgctgctaagggcggtggagcagaaaatccaggggccgaacgacagctatgccgagattttcgctgaggatactgaatctgtttttaatatgatcgccagaatggataccccgaatgaacgaataacggcgagaaatatcgcctgcccggtctctttcaatgtttcatataagtga

SEQ ID NO: 196946 - DNA, 411 bp, Klebsiella oxytoca
atgaataaatatattttattgttgttggtctgcctcgctccagcctgtggttgggcgtgtgagaccggagcgaattatggcgatgtctctatggctaatttgccagcgaaaatactggttaatgcaggcagctattcgacgggaaccgtacttttcgattccgggcagatcacgcatccaaaaacatattttataaactgccaggggtcaatctattcaaaattcgagtggagctccgggaatgcgctcgctttggtgggggataatatctactcgacctctgtgtcgggtgtcggtatcagggttaaggtctggctgaatattaccggcgagtatgatggtgatacaaacgattttagccccgaatatgatgttcatcatattggtgatgcagacggctttgttgaataa

SEQ ID NO: 196947 - DNA, 1128 bp, Klebsiella oxytoca
atgcttttcatgaaagaacattcagggcgcaacggctttatgattaaactcgataatattcgcaagacctaccccggcagcgcgcatgcggctattcgcggccttaatctggtgattaatagcggcgaactgtgcactttcgttggccccagcgggtgcggaaaaacaaccattctgcggatgattaatcagctggatattcctgacgccggtgacgtatacgttcagggcgttaagcttgccgctgccgatattattcaggtgcgccgccaaattggctttgtcatgcaaagcgccgccctctttccgcatcgtacggtcgcgcaaaatatagccacggttccgcgccttctcggctggagcaaaaagcatatccaggcgcgcatcgacgaattagtggatttgatgtctctcgaccgcaacgtcctgccccgctatccgcaccagctttccggcggccagcaggggcgcgtagcgatcgccagagcgctggccgccgatccgcctattctcctgatggacgaaccattcgccgccatcgacccggtggttcgcgagcgcctgcaggacgagctgctgttgctgcaacagcgtctgcgcaaaacgatcgtcctggtgacccatgatatcaatgaagcgattcgccttggcgatagaatcgctatcttccaggagggcggcgagctggcgcagttcgccacgcctgaccatattttgtcgcatccggccagcgactttgtgcgccgttttatcggccccgaaccgaatctgcagcggctggggagaattcaggtcggacagctcccacgccatgacgtgccgcttattgatgagagcctctcccccatcgccagcccgcatccgccggtcgccagtccgctgcgcctggtgctggacaaaaaacggcgtccgctgaactggttcgatccggttaagcgccgcacgctgccggtcgacgcgccgctggcggccatcaacacgctgcgctttgcctacagcgcactgctggatgcgcccggcggcgtagtggttcatgtcgataccgacggtgaatatcagggcagcatctcccacgctctgctgcagaacgtgctggaaggccgcgtggatcttcgccgctatgattga

SEQ ID NO: 196948 - DNA, 2157 bp, Klebsiella oxytoca
atgacatcagtaatgaataataaaccttcgccagttgaatctgatgatattgacttaggtcgtttaattggtgagttaatcgatcatcgaaaattaatagtcgcaataactgcgggctttactgtaattgcagtgttttatgctttgttagcaactccaatctaccaagcaaatgctttgatacaggttgaacagaagcaaggtaacacgattttaagtaatctaagtcaaatattacctgatagccaacctcagtcagctcctgaaatgtcattactacagtccagaatgatattagggaagacggttgatgacttaggtttacaaacgcatattagacagaaatttttcccgctagtaggtaaagggatagcgcggataatggggagtaaattcggtaatgttgaaataaaaaatctttatttacatgagaataatgagggtgaaatccctgagattactttaactataattgataaagacacttatgaagttgaaggtgatggggtaaaatttcgtggtaaagttgggcaactaattgaaaaaaatggaaattcgatattagttacagctattgacgctgaaccaggcagccgtttcattgtaaattatatgacgcgccttaaggcaatgaatatacttcaaagtgcttttggcgttgccgatcaagggaaagatactggaatgttaacattaacaatgacaggtgatgacccagatcaaataacaaaaatattagatagcataagtcagaactatctagctcaaaacgttgctaggcaagctgcacaagatgcaaaaagtttagatttccttaatgagcagttgcctaaagttagaacagatctagatcttgccgaagacaagcttaatgcatatcgtaagcaaagagattctgttgacttaacgatggaagctaaatcagtattagatcagatagtaaatgttgataatcagctgaatgaaataacatttcgagaagctgaaatatctcagttatatacaaaagagcatccaacatacaaagccttaatggaaaaacggcaaaccctgcaaaatgaaaaatcaaaacttaataaaagagttagttcgatgccatcaacgcagcaagaggttttgcggttaagccgagatgtagagtcaggtagggctgtttatcttcaattgcttaatcgtcaacaagagttgaatatctcaaaatccagtgctattggtaatgttagaattatagataatgcagtaagcgagccaaaacctattaagcctaataaaccattggttgttgctataggctttatcttgggattattattctccgtagggttagttttattacgcgtcttcctgagacggggtattgaatctcctgaacagttagaagacatggggattaatgtctatgcgagtgttccggtttctgagtggttaagtaaaaaccttggtaaaaataagctgaataaaaaagagtctgatatattattagctgttgagaatccagcagatttatcggtggaagctattcgagggcttcgtacaagtcttcactttgctatgatggaggcgaaaaataatattctgatgatttctggtgcaagtcctaatgccggtaaaacatttatcagtactaatttagcagccacaatagcactgactggcaaaaaggtattatttattgatgccgatttgcgaaaagggtatgttcataaaatgtttggtggtaaaaatgagcatggcttatcagatgttctttcagggcaagtctcattagaaaatacaattaaaaaatttaaggatggtggttttgattatataggtcgcggggctattcctccaaacccagcagagctattaatgcatccacggtttgaaagcttattaaagcaggtaagtcaagagtacgaattggttatcattgatacaccaccaattcttgcagtaactgacgcagctattattggacgctatgctggaacaacactattagttgcaagatttgaagtcaatacacctaaagagttgatggtaagtgtaaaacgtttcgatcaaagtggtattacaataaaaggatgtatacttaatggtgtagtcaaaaaagccagcagctattacggttatggttataatcattatggatattcatacgaagaaaaaaaataa

SEQ ID NO: 196949 - DNA, 1716 bp, Klebsiella oxytoca
gtgattcggattctgacagcgactcggattctgacagcgattctgattcggacagcgactcggactctgacagcgactcggattcagacagtgattctgactcggacagtgactccgactctgacagcgactcggattccgacagcgatgccgactctgacagcgattcggattctgacagcgattccgactctgacagcgattcggattccgacagcgattcggactccgacagcgactcggactctgacagcgattcggactccgacagcgactcggattcggacagcgattcggattccgacagcgactcggactctgacagtgattcggatagtgacagcgattctgactcggacagcgattcggactctgacagcgatgccgattccgacagtgattcggattctgacagcgattcggacgctgacagtgactcggattcggactccgacagtgactcggattcagacagcgattcggactcggacagcgactcggactctgactctgacagtgactcggactccgacagtgactcggattctgacagcgactcggactccgacagtgactccgattctgacagcgactctgactctgacagcgatgccgattccgacagtgattcggattctgacagcgattccgactctgacagcgattccgactctgacagcgattcggactctgacagtgactcggattccgactccgacagcgactccgactctgacagcgattcggattctgacagcgactcggactctgacagcgactccgattccgacagtgattcggactccgacagcgattccgactccgacagtgattcggactccgacagtgattccgactcggacagcgatgctgactccgacagcgactccgattccgacagcgattcggactccgactccgacagcgactcggattccgacagcgattcggactcggacagcgactctgactctgacagcgactcggactccgacagcgattcggactctgacagcgattcggactccgacagtgactcggattctgacagtgactccgattcagacagcgactccgattcagacagcgactcggactctgactctgactccgacagcgattcggactccgacagtgattccgactctgacagcgattcggattcggacagcgactccgattcagacagcgactcggactctgactctgactccgacagcgattcggattcggacagcgattcggactctgacagcgatgccgattcggacagcgactcggactctgacagcgactcggactccgacagcgactcggattcagacagcgactcggattccgacagcgactcggactcggatagtgactcggattcggatagcgactccgattctgacagtgactcggattccgacagtgattcggattctgacagcgactcggattctgacagcgattctgattcggacagcgactcggactctgacagcgactcggattcagacagtgattctgactcggacagtgactccgactctgacagcgactcggattccgacagcgatgccgactctgacagtgattcggattcggacagcgattcggactctgacagcgactccgattccgacagcgactcggactctgacagcgattcggattctgacagcgattcggatatcccgcaggccaatgcggataccaataccgcgctga

SEQ ID NO: 196950 - DNA, 597 bp, Klebsiella oxytoca
atgatccagcgcgctcgcggatttaccctcgtcgaaatgctgctggcgctggctatcctcgccgcgctcagcgtcgctgcggtcacggtgctgcaaaacgtgatgcgcgccgatacgctcacccgcgataagggcgggcgcatgcaggcgttacagctaacgttcagccagatggcggcggactttagccaaatcattccccgccgcagccgcgacagcgcgagcctcttttttgccggacgttttcagctcggcagcgacgactgggcgatcgcctttagccgcaacggctggcccaatcctttggggatcctgccgcgttcggaaattcagaacgtcagctaccgcctgcgcggggatcggctggagcgtctgagctacgaccagcaggacccgctgcccggtagtctgcccacggtgaccgttatgcagcgcaacgtgcaggcgtttcgcctgcgcttttacgccagcggccgctggcaggatgaatggcagcagacgcagacgctgccgcaggggctggaagtcaccctgacgctggaacagtccggcgagatccgccggctgtttctgcttacgccgggaggcagccaatga

SEQ ID NO: 196951 - DNA, 465 bp, Klebsiella oxytoca
atgaacgcaacgcgccccatttttcatcatgcctgctggtttgcattactgggcccctatgttggcgtactgtgggcaatagtcgctatcacattacagtctcgaaatccgtcattcagctttctgtgggacattgtcaccatactgccgatttttctcatcatcacatggttgactggcgtagtccctgcgctgatagcgggcattgccattgcctgtttacctgcggaaatctacgcgtttcactatcggcgtatcctcgctagcgcaataatcggcgcggcaattagcgcgaccgccgttatattaacgatgctgcctctttccagcccgagccttacaaattttatcctgcatgacaatgatgtcaggacaattgcgggttcaggcctgtttgccggtcttgtcatggggtggttgataccttatctgccgggaatgcagtcggaggaaaacgctggataa

SEQ ID NO: 196952 - DNA, 225 bp, Klebsiella oxytoca
atggaaaaaacccgtaaccgggactggcgcattgcgcaaaagcagcgcaataagtctcgcgatgttcacaccgccctcttgcgttttcgtagcgaaaaaaactggaagctgctctatatgcgttcagagaaattgctacgggccgcgcaactggggatggaatatccccgtaaaacccgtcgccaattggcgcaacaaggaatagaagagctgttatcaaattga

SEQ ID NO: 196953 - DNA, 189 bp, Klebsiella oxytoca
gtgatggagcaaaaacataaaaatcgtcttgtcgccgaatatcgtcggctggtcgaaaataaaccgctttacgtgctggatatctccgacgattatcgctatatggctcccgaactcgtcgcactactggaagagattgtccccaccctgcccgaactaaactcgcgttccaccgccgcttcaccctga

SEQ ID NO: 196954 - DNA, 471 bp, Klebsiella oxytoca
atgatgacaacacgacgaattatttatcatgctggctggtttgcattgttggggccattagccggtataccggttgcgatgatagcgatagtcgtcgctgcattgcagtatcacgattatccggatcgcttcctgtggcatattgccaccatattgccaatcatgttcatcgtcacatggttagttggcgcaaccccggcgctattggcgggtattgccgttgcgtgcctgcctgcggaaatctatgcgttacacactcggcgcatcctcgccagcgcggcgatcggtctggtcattagcgtggtaataacgctatccagcgtgctgtttttcaccgataaaaatcttttgcactttatcctgcgtgaagaaattttcctggtagtggcgatttcaggtctgcttgccggtcttgtcatgggatggttgatcccccatctgccggggatgaagccggaggaaaattcctga

SEQ ID NO: 196955 - DNA, 405 bp, Klebsiella oxytoca
atgaaaaaatttctgcatcatatttgctggtacgtagggcttgggccgtttatcccgctgccattgatcctcttttttcccagcggaggctcgataaccagactcttagggcagcttcctgagatattatccctcacctggattgttgcctttctgcccgcactgctttcaggcgttttcatggccatcctgtctggcaacgtctatcgcatctggttttggcgtttattgtcagggggaatagcgggcgtggtgataacagttatttattgcggcatcatcggcgcatttatcccgatgcttttctatgtgcttccgctcctcatcgtctcggcgctgctgtctggtatggttatgggactgattattccctggctaccgccgcgggtcgtgccacatcagtaa

SEQ ID NO: 196956 - DNA, 2118 bp, Klebsiella oxytoca
atggctggatttgacccggcgctggggagtacttctccggcggtgctgctcgataacgccaaacggctcgatgagctggtgaatggtgaaaaatccacggtggatgaccgcagcggagagcctcttcctacctggcgcgggatcactgctgatattgaaagcgtgctcgcgtcgcttgatacctccaactcaacgtttccggatgagccatccgggatagcaggcacaacaaacgggcaatatttccgtacgccgcaagggaccgaatcgcctgtggcctttcgatattttgttaatgcgaatggtgttgctcaggaggttgcatggctgctgggcgctcagcgcttttttgactttctctacctctttaactccatgttcagtaccagtggcgtagtcgggtttgatgctattttttcaaatacacaggggcagtatgtcggtggtattgactcctctggtgccctgaacttcgggaagatgatcgcgaacctcgcagcgtttgcgtcagctgatatcaagtcattgacgacggaatcaatgaagctggcgagcggggctgagatgacctcaaatatccctccgggatttgaatgggcgctgatgagtttgttcggcagcgcagctgttggcctgaaagacgacggtacttttgctgctggcaagttacaggcactggttgccagtatcggaaaactgcttggtgacatcgtttttcatggtggggggaaaaccacaggcgtattaccagagggttttctgtggggctggatggatgattacgggcgggttacacacggcgggaaagctgatggaagtgttgagtccggcacgataaaagtgaaaaggcttatcgctggctctatcgaatcggactcgttgcccgttgataaaaaacctctcgccaaaagactggtagatgtaaaccacatcatcggctttggacagtcgctgatggcaggtatcaattcaatgccactccagaccattactgccattcccaatgcctaccgttttaatggtggcgtcagggcgcaagagggttcaggttcatctgctgagaatcatgccagcctgcttccatatatcgaaaccacacatgatacgggagatggtgtcggctatgaaacacctgtggccggagccattagtgcgatatttgaccggctgtctgctgaagccgaggggtacgcgtcaggtgacgtaaaatttctgggttctgttccggcacagggaagtaaaaccatagcccagttgcgccagaatcctggcctctacatgcagcgcattatcgatgacatgacatatggtaaagtgtgcgccaatgagctgggacttacctattcaccccacgcaatgatttatatggggaatgaaagtgaccagaccgcagggacaacagaggaagtctacctagacagctttgacaaaatgattgcggccgtcaatggctttgccagcgacgtgacagggaaaacagagtcactcccgtggtttatctatcagttcaacagctggaaaaaccgcacgccaaataccagttatccaaccatcccccttgcattattgaagcttgcccggacccgcgatgacgtcaggctggtacaacccatgtacatgtacgactactacgatacagcgcacctgctgggcttagactcgaagatttgcggctatcgctttggcctggccattgagcaggaaatgctgacaggtaagaagttcgagccgctgtggtcgcaggacgtttctcttcaggggggcatagcaaacatctggtacgacccggttggcaaactggtactggataccagcattgtcaccgatccggggaattatggggtgtctgccgtagacccgtctggtaatgcgctgactttgacggaggtctccgtgcaccttaaccgcttgcgcatccgtgcatctggcggcattcctgcaggctcaaaaatccgcatgggctttactggcggcactaccggcacccttccgagccggactaacggaccgcgctgctgccttcgttacagccagggcgacactatcaaattcgatccgaatggcgtggcgtatcgcatggataactacgcaatcgttgaagaaattacactaaattaa

SEQ ID NO: 196957 - DNA, 741 bp, Klebsiella oxytoca
atgattgcaaaattaggttttatcgtggatggttcaggctgggacccggccaatattatcggcagtatctaccctcaaccgactgtcgcaaatattgggctactgaatgctgacggggtaaccatgctggcaggggcggcgccgacacaaatcggttcaccggtgatgggggctggttatcagacgctgaacggctataacgcagggtacgatacgggaattgcagatacaccgataaaaaccatgatggcgttggtgaaaccggtaattagcggctcgctgcggtcgctggcaatcgggtcatatcatggaggaaatggtacgccgccagtacctcagggggataccttcgctattgacccggtaaacctgacggtcagggctattggcagcacgaccacaggcgtggcgacatcatcgctgacccttacctccgcagatctgacaaagtttatgctactggttgcggactattcagccgctggcgttcagcttcacatgttcagagagggtgctctggtcagtgcaccactggcggcattcaccacaagggccattccgacatcaacgatccgtttgggtatcggatatgacatttcaattgcgacgggcggattgaacgggccgatacaggaatcagcctggggattgtggtcaggagtgaacctcacgactgaagaaaaattaagtatgtattccacttttaaaaacatgctgggtagtagcattagtattagttga

SEQ ID NO: 196958 - DNA, 870 bp, Klebsiella oxytoca
atgtttttagtgaaaaactgcgatagtaaatacaatatatctttagaacagcgttacctgcaattaggttctctagactattacagaaagattgaaaacacggaaatagccgacgcgggggaaggagcatatgaaatatcgattgagataaccaactcatggatacctaacgatatcattaacaatgtgtttcatagtcatatcaatattaatggcaaaaaaaataaaacagtttcacctgaaatcaggcttaattacaatgaaaatcagattttctttgacacagaaattagagtaagggaaatgcaggaggatgctacatttgttgactcccttaaggctaatattaaagtaacacactgcaattgttacattttttgcatgtctattttagatgatctgtctgaagttaaaagttgctttaatggttatgatgatttttggtattttgattatgatcttgccgagatattcgcatcatccataaaaaaagagcttaaaaaacaattaaatagaaacatttccatgcatggatggaaattaagcatgaatgatgatacgaatgcaaaagaggttttaagaaaagacatacagatagaatgtgttcatggcaaggtcaactacacacctaggatctatagaatagatggtgctgacaaactatcagtgcaacatcacttgtcaattttagaagaagtcccatttattaaacctgacattgagatttataaaagaaataaagagtataggtttgtatttaaagtgtattacaggggtgaccccatatcgacctcagtgaacaccattttggttagcgttccagatgttataaaaaaactcgcaatgtcaggtaataaaccacgtaaatag

SEQ ID NO: 196959 - DNA, 228 bp, Klebsiella oxytoca
atgatccataaatccgattcggacaccaccgtcaggcgcttcgatctctcccaacagtttaccgccatgcagcggataagcgtggtgctgagccgcgctaccgaagcgagcaaaaccctgcaggaggtgctgagcgttttacataacgatgcgtttatgcagcacgggtgtaatggctcaatagtaatgtccgcctgtggctcaattcagatgtccgcgctatggtaa

SEQ ID NO: 196960 - DNA, 435 bp, Klebsiella oxytoca; identical to SEQ ID NO: 105725

SEQ ID NO: 196961 - DNA, 1260 bp, Klebsiella oxytoca; identical to SEQ ID NO: 105726

SEQ ID NO: 196962 - DNA, 810 bp, Klebsiella oxytoca; identical to SEQ ID NO: 105727

SEQ ID NO: 196963 - DNA, 612 bp, Klebsiella oxytoca; identical to SEQ ID NO: 105728

SEQ ID NO: 196964 - DNA, 423 bp, Klebsiella oxytoca; identical to SEQ ID NO: 105729

SEQ ID NO: 196965 - DNA, 393 bp, Klebsiella oxytoca; identical to SEQ ID NO: 105730

SEQ ID NO: 196966 - DNA, 750 bp, Klebsiella oxytoca; identical to SEQ ID NO: 105731

SEQ ID NO: 196967 - DNA, 540 bp, Klebsiella oxytoca; identical to SEQ ID NO: 105732

SEQ ID NO: 196968 - DNA, 558 bp, Klebsiella oxytoca; identical to SEQ ID NO: 105733

SEQ ID NO: 196969 - DNA, 1062 bp, Klebsiella oxytoca; identical to SEQ ID NO: 105734

SEQ ID NO: 196970 - DNA, 507 bp, Klebsiella oxytoca
atgaaagatttaactcaactactcagcagcttaaagaggttgatggttgcagatcactaccctttagccagcccggtagccccggaagtcttgaaagacttaatctgcaatccgcctccagtggagtgggcagatcacaaaaagagcgcctatatagatatacagaaactcattaaaaccaggattgattatgcccaagtgtttaatgctatggatggttttgagtacaacggacttacgttttataaccttgttcaggcagagaacgaaaatctattgtggtcaaatatttacatacgcaactttgaagcacgagacaatgaaatctacgttgacccaaatctcactgataaggtgttaatcggagaagatggcatgtcacttttcgcttatagttttgcagacgactgctttcagataagagacaaagcatctactgattatgttattgaatctcatacagagtttgatagatttttgtcttcactgattcaaaccgtcagttga

SEQ ID NO: 196971 - DNA, 3951 bp, Klebsiella oxytoca; identical to SEQ ID NO: 105736

SEQ ID NO: 196972 - DNA, 1416 bp, Klebsiella oxytoca; identical to SEQ ID NO: 105737

SEQ ID NO: 196973 - DNA, 1047 bp, Klebsiella oxytoca; identical to SEQ ID NO: 105738

SEQ ID NO: 196974 - DNA, 513 bp, Klebsiella oxytoca; identical to SEQ ID NO: 31756

SEQ ID NO: 196975 - DNA, 801 bp, Klebsiella oxytoca; identical to SEQ ID NO: 105635

SEQ ID NO: 196976 - DNA, 486 bp, Klebsiella oxytoca; identical to SEQ ID NO: 105636

SEQ ID NO: 196977 - DNA, 738 bp, Klebsiella oxytoca
atgaacgacgcaattatcacggacaatgagcgtattaacattgaaccaaaagatgtaatggtaaaaggttcaaataaaaagcaaggcgtaaacgctcaaacttctactcaacgtagaccagagcaccagggtatggccaaagttattattaaccccggcaccccagactttaaccggtttttaactgccagaaatggagcagtcatcagaggttttgatgatgtgagtatcgctatttcctctctctttaaaacggttgatgcagttaaacatcctgaccttgttcaggctattcaggattggttcaacgagctgcatgaagaaaacaataagatgaaagaaaatcttgttgcttatattaagtcaattgagttcgacaagaatgactcattcatgtcatcaactcagtttgtacctttcagttttgaaccagtacaactcaacttcaataaccacaacaccatgaggttttacaagtacatcttcgagatgaaccagctcatgaacacaatgtatgagtacaactcattgggtttactggctgtaagcgactatccggttatgtctcacaacattataaagagtattaatttatatgttgagaatgtgaaaaacactctgaatgtttctcgccgtaaggatgggccatacagtccagcagagttcatcaccaaagtaatgcaatataaaagtgtgcaggcatacattgcagccgaactgtcaggcaaacgtcgataa

SEQ ID NO: 196978 - DNA, 3147 bp, Klebsiella oxytoca; identical to SEQ ID NO: 105638

SEQ ID NO: 196979 - DNA, 2085 bp, Klebsiella oxytoca; identical to SEQ ID NO: 105639

SEQ ID NO: 196980 - DNA, 1110 bp, Klebsiella oxytoca; identical to SEQ ID NO: 105640

SEQ ID NO: 196981 - DNA, 663 bp, Klebsiella oxytoca; identical to SEQ ID NO: 105641

SEQ ID NO: 196982 - DNA, 1182 bp, Klebsiella oxytoca; identical to SEQ ID NO: 105642

SEQ ID NO: 196983 - DNA, 732 bp, Klebsiella oxytoca; identical to SEQ ID NO: 105643

SEQ ID NO: 196984 - DNA, 123 bp, Klebsiella oxytoca; identical to SEQ ID NO: 31757

SEQ ID NO: 196985 - DNA, 354 bp, Klebsiella oxytoca; identical to SEQ ID NO: 26525

SEQ ID NO: 196986 - DNA, 285 bp, Klebsiella oxytoca; identical to SEQ ID NO: 105646

SEQ ID NO: 196987 - DNA, 369 bp, Klebsiella oxytoca; identical to SEQ ID NO: 31758

SEQ ID NO: 196988 - DNA, 537 bp, Klebsiella oxytoca; identical to SEQ ID NO: 105648

SEQ ID NO: 196989 - DNA, 438 bp, Klebsiella oxytoca; identical to SEQ ID NO: 105649

SEQ ID NO: 196990 - DNA, 297 bp, Klebsiella oxytoca; identical to SEQ ID NO: 31759

SEQ ID NO: 196991 - DNA, 702 bp, Klebsiella oxytoca; identical to SEQ ID NO: 105651

SEQ ID NO: 196992 - DNA, 282 bp, Klebsiella oxytoca; identical to SEQ ID NO: 105652

SEQ ID NO: 196993 - DNA, 1185 bp, Klebsiella oxytoca; identical to SEQ ID NO: 105653

SEQ ID NO: 196994 - DNA, 945 bp, Klebsiella oxytoca; identical to SEQ ID NO: 105655

SEQ ID NO: 196995 - DNA, 600 bp, Klebsiella oxytoca; identical to SEQ ID NO: 117444

SEQ ID NO: 196996 - DNA, 357 bp, Klebsiella oxytoca; identical to SEQ ID NO: 105657

SEQ ID NO: 196997 - DNA, 204 bp, Klebsiella oxytoca; identical to SEQ ID NO: 105658

SEQ ID NO: 196998 - DNA, 321 bp, Klebsiella oxytoca; identical to SEQ ID NO: 31761

SEQ ID NO: 196999 - DNA, 159 bp, Klebsiella oxytoca; identical to SEQ ID NO: 105660

SEQ ID NO: 197000 - DNA, 522 bp, Klebsiella oxytoca
atgaaggtggatgggaaagtgttagttgcgaaatttgcacttaaacagttttttcattccgactttggtgactttatctcatttgtcgagaaaagaattacagattgtcttaatgaaactttaaggattatcaaagctgttgaacatggctttgtacgtgttgggcagcataagattaatcgccgtattaatgatgacttaaagttatgcattgatttcaatactgatgattatccggcaaatatgccagatatatatattaagtttaacgatacatttgatgggaacggggcgttatattgtgacaatgatgccctcatatccctctataccgatgttgcttcaattatcaatgtgccggtgatgatggaagtaagattgatcaataaaagagggcgtgttgtctgtgattcttcgcattcaacttacgtatctctcgaaagtaatgaccgatacagagtaactgatcgcacattactaataactgaagcttttgacgattttcgtaacgcgtctcaatga

SEQ ID NO: 197001 - DNA, 957 bp, Klebsiella oxytoca; identical to SEQ ID NO: 105510

SEQ ID NO: 197002 - DNA, 276 bp, Klebsiella oxytoca; identical to SEQ ID NO: 105511

SEQ ID NO: 197003 - DNA, 591 bp, Klebsiella oxytoca; identical to SEQ ID NO: 105512

SEQ ID NO: 197004 - DNA, 258 bp, Klebsiella oxytoca; identical to SEQ ID NO: 105513

SEQ ID NO: 197005 - DNA, 537 bp, Klebsiella oxytoca; identical to SEQ ID NO: 105514

SEQ ID NO: 197006 - DNA, 447 bp, Klebsiella oxytoca; identical to SEQ ID NO: 105515

SEQ ID NO: 197007 - DNA, 963 bp, Klebsiella oxytoca; identical to SEQ ID NO: 105516

SEQ ID NO: 197008 - DNA, 906 bp, Klebsiella oxytoca; identical to SEQ ID NO: 105517

SEQ ID NO: 197009 - DNA, 330 bp, Klebsiella oxytoca; identical to SEQ ID NO: 105518

SEQ ID NO: 197010 - DNA, 1176 bp, Klebsiella oxytoca; identical to SEQ ID NO: 105519

SEQ ID NO: 197011 - DNA, 213 bp, Klebsiella oxytoca; identical to SEQ ID NO: 105520

SEQ ID NO: 197012 - DNA, 1083 bp, Klebsiella oxytoca; identical to SEQ ID NO: 105521

SEQ ID NO: 197013 - DNA, 1557 bp, Klebsiella oxytoca; identical to SEQ ID NO: 105522

SEQ ID NO: 197014 - DNA, 1638 bp, Klebsiella oxytoca; identical to SEQ ID NO: 105523

SEQ ID NO: 197015 - DNA, 1041 bp, Klebsiella oxytoca; identical to SEQ ID NO: 105524

SEQ ID NO: 197016 - DNA, 639 bp, Klebsiella oxytoca; identical to SEQ ID NO: 105525

SEQ ID NO: 197017 - DNA, 642 bp, Klebsiella oxytoca; identical to SEQ ID NO: 105526

SEQ ID NO: 197018 - DNA, 639 bp, Klebsiella oxytoca; identical to SEQ ID NO: 105527

SEQ ID NO: 197019 - DNA, 162 bp, Klebsiella oxytoca; identical to SEQ ID NO: 105528

SEQ ID NO: 197020 - DNA, 468 bp, Klebsiella oxytoca; identical to SEQ ID NO: 105529

SEQ ID NO: 197021 - DNA, 1209 bp, Klebsiella oxytoca; identical to SEQ ID NO: 105530

SEQ ID NO: 197022 - DNA, 957 bp, Klebsiella oxytoca; identical to SEQ ID NO: 105531

SEQ ID NO: 197023 - DNA, 1080 bp, Klebsiella oxytoca; identical to SEQ ID NO: 105532

SEQ ID NO: 197024 - DNA, 774 bp, Klebsiella oxytoca; identical to SEQ ID NO: 105533

SEQ ID NO: 197025 - DNA, 1143 bp, Klebsiella oxytoca; identical to SEQ ID NO: 105534

SEQ ID NO: 197026 - DNA, 1059 bp, Klebsiella oxytoca; identical to SEQ ID NO: 105535

SEQ ID NO: 197027 - DNA, 582 bp, Klebsiella oxytoca; identical to SEQ ID NO: 105536

SEQ ID NO: 197028 - DNA, 1158 bp, Klebsiella oxytoca; identical to SEQ ID NO: 105537

SEQ ID NO: 197029 - DNA, 456 bp, Klebsiella oxytoca; identical to SEQ ID NO: 118149

SEQ ID NO: 197030 - DNA, 1041 bp, Klebsiella oxytoca; identical to SEQ ID NO: 118150

SEQ ID NO: 197031 - DNA, 579 bp, Klebsiella oxytoca; identical to SEQ ID NO: 118151

SEQ ID NO: 197032 - DNA, 576 bp, Klebsiella oxytoca; identical to SEQ ID NO: 105538

SEQ ID NO: 197033 - DNA, 1242 bp, Klebsiella oxytoca; identical to SEQ ID NO: 105539

SEQ ID NO: 197034 - DNA, 456 bp, Klebsiella oxytoca; identical to SEQ ID NO: 31745

SEQ ID NO: 197035 - DNA, 192 bp, Klebsiella oxytoca; identical to SEQ ID NO: 31746

SEQ ID NO: 197036 - DNA, 2040 bp, Klebsiella oxytoca; identical to SEQ ID NO: 105542

SEQ ID NO: 197037 - DNA, 987 bp, Klebsiella oxytoca; identical to SEQ ID NO: 105543

SEQ ID NO: 197038 - DNA, 393 bp, Klebsiella oxytoca; identical to SEQ ID NO: 105544

SEQ ID NO: 197039 - DNA, 657 bp, Klebsiella oxytoca; identical to SEQ ID NO: 31747

SEQ ID NO: 197040 - DNA, 498 bp, Klebsiella oxytoca; identical to SEQ ID NO: 105546

SEQ ID NO: 197041 - DNA, 1389 bp, Klebsiella oxytoca; identical to SEQ ID NO: 105547

SEQ ID NO: 197042 - DNA, 297 bp, Klebsiella oxytoca; identical to SEQ ID NO: 105548

SEQ ID NO: 197043 - DNA, 1326 bp, Klebsiella oxytoca; identical to SEQ ID NO: 105549

SEQ ID NO: 197044 - DNA, 207 bp, Klebsiella oxytoca; identical to SEQ ID NO: 105550

SEQ ID NO: 197045 - DNA, 411 bp, Klebsiella oxytoca; identical to SEQ ID NO: 105551

SEQ ID NO: 197046 - DNA, 525 bp, Klebsiella oxytoca; identical to SEQ ID NO: 31748

SEQ ID NO: 197047 - DNA, 150 bp, Klebsiella oxytoca
atgcaaaagacccgctataccgaagaacagatagcatttacgctgaaacaggccgaaaccggcactcgggtggaggaagtctgcagaaagatgggcatttctgaagccacattttacatgtatggactacctccgttttgcaagtactga

SEQ ID NO: 197048 - DNA, 510 bp, Klebsiella oxytoca
atgactgaggctgaattagcgcttgaacgagcaaaaaagctggcgttcttaatgacagagcgtttcagtatgaaccccattagcgccaaactgcttaatgaagcctggcgtcttgcattccctgacgaagtggcagtggctaggcgcatgagggctatggtagaggcgctggagaaggcgcagcagcgtattgatgaactggagaatgacgaagttcgtcaacggctggctaacgcagagcatcaactccagatggctgaactggctaagcataacctcaaagctagccgcaaagcccagttccgcaagcgtagagcggccgagaagcgcatcgccgagctggaatctcgcaccgtgaagctgccagaggtacgaatcactgtagccgaatctcgacgcagaaatatgacgtggcgtgaactgggggcttacaacgaaggtgccgatgttgctgctgagagaatcggtaaggtcctaaccgcgcagggcatcaaggtggaggctgagtga

SEQ ID NO: 197049 - DNA, 762 bp, Klebsiella oxytoca
atgagtaacgatcttgtattcgcattggctagagtgcagtttggcgaagtcacacatacgaagtttgcgcaagttggtgatgctattcaagaaaacttgcgcgcggaatatcctttttttcactcagcgcaagatgctgaaacttttgagatccagtttggtcctgatggtcagaaggttaaaaagattgaaataccaactttgacacttgtctctgccgagagagattggggaatcagagtaacgactaaagatttgtttttatacacaaatagatacgatagatttcaaagttttgaagtcagaatgagagaggctctaggcactctagcgaaaatattcccgatttatcatactggtttcttgggcatgaggtttttgaataaatttccttatgtgggcgaacgttcatttacgaaagtatataaaaaaccggagtttctacaaccaactattgaaaactacaacccggcgggttcaaatctttcggctaagtacaaaacggatgttggttggatgaatctcaacagcggtattactgtgggtggagcacttttacctccagacattgaacagttttccgccacattaaatcctaaagatgtaaacaaaatctgcgaagggccatgggcacatttggatatggattcccataagccaagcaactccctgattaagtatgatcttgacaagattgtcgagacgctatcagaattaagggagcgtgcaaatatcttttatagcgagattattaagatttaa

SEQ ID NO: 197050 - DNA, 600 bp, Klebsiella oxytoca
atggactatgttgattatgattatcatacagaggattacgcgcatgcctcatacatgcaaactgacaaaaaaacaggatggagtagcattgttttttttaaaactatgttgttctgtgctgctgcaaccgttttaaatagtggtgccacatcttcagttgatcaactggcgattgagtatcaaataaacaaaggaattcaaaataacgattctactttcgtttctgaagagattgataacaataaatctcaaatacactctctaagttctgacttgcaaaagaaatttggttttaagaaagcgcaatgggcaaacgtgcttagtgttgaaagaaaaactctctataactgggaaaataatcctgaatcgacgcctcatgctaaggtttgggataatttgaaaacactcagtaaattcgctgatgagattgataatgggcatgcaccttacatttcgaaaatgacttttggaaagggacgtaaggaagagtttactcaggctttcacaactcaaccgctttcgtttgagtcaatgatttctgtatatgaaaagtattatactgaaattgacggtttctacaaaagacaacttctttcttga

SEQ ID NO: 197051 - DNA, 903 bp, Klebsiella oxytoca
atggaacaaagtagaagtgattttataaaagctggctgggaaagagggtcttttgtcagtttgtccggcaatgactttttacttgcacacttaccctcagaacttgaaaagtgtatggcgtcatatgatgccgaggacatctattttgttcctgttttgtacgattgcgcattgatttctgatgactttgttcaagagccttgggtaaatttaattgtttgttggaaatgtagaaaaattggtggtgatggcaatttcaaatattgcaaaaacccgcggaagtaccatttccccttagaggttaaaggagaatcggttttttttgaaactaatgccgtatcaataattcatatgagacgggatgtttttctgaagtcatcaatcaatctaaatgttaaatggccagtttttggccttgagacaatgttaaattggttaactgaacgaatcagacagccagtattccctgacgaatggaacgagagattaaagagtaaaaagaaattgttagaaagattttactcagatcaaactcttgttgagaaatgtgcaggtgtgtttttccgtataactccatttagacaaatagataaaactgaacgctactctgtgtcagcacttattgtcacaccagctatagaaaatggtgctgaacacaggaagtttaatagggaaattaaacctaaactagatgaattgaaggagcaattacgtcaaatacttcaaagcattgaaaatgtagatgttgaaactgtttcggatttacaagaggatcaatttactcgtaaagaagaacgattgtataagcgataccagcttgaatttatgacatataaatcaggggaggtagatagtgtgacgttacctgctgatttacaatttccttttgtacagtctaagtaa

SEQ ID NO: 197052 - DNA, 306 bp, Klebsiella oxytoca
  misc_feature (214)..(223): n is a, c, g, or t
atgtctgttttgacaaatgctaagtggaatactttctctcagttttttaaaatgttggtccagcttgttaatgtaatttatcttgcaaaaataatcccaccagctgaatatggtcttatggccatggctttggttataattaatctaggcattcttttacgagatttagggacgtcggccgcaataattcaaaggaaaagtattacatttgaannnnnnnnnngttttttggctaaatgtttttatggggttagttttagcccttttaataatgatttctgctccatttatatcttccttttatga

SEQ ID NO: 197053 - DNA, 201 bp, Klebsiella oxytoca; identical to SEQ ID NO: 31751

SEQ ID NO: 197054 - DNA, 717 bp, Klebsiella oxytoca; identical to SEQ ID NO: 31752

SEQ ID NO: 197055 - DNA, 855 bp, Klebsiella oxytoca
atgatggagatggactttaaaatgcacaatgatctgggtctcggtttcatttgtaaaaatgcaagaacatcgtcaaagccaacgttaagaaaagttacttttccggtaagcgcatatgaaacgtctaagctttctttaaccggttttcaatgccccacagcctgccgatttcctttttttgtgctatgcatgataatccataaccatctttcgtctgcatgccctatcaaccaaaatgaatgttcaaatcatatatcgcaattttctatcgacattaaagtacaagattggcttagccgttcaagagtagcgtttattgatttccataatctaagaaatacagataaaaccacattaataacagtggaacatcttgaagctttacttactgttatgtcaactactcttgtcgcttacgctccatattcaaaaaagagacttaactttagctttctaaattcatttactttgtctaaaacttctcaaagttacacattaactttcccggtagttctcagtccgcttttagatgctcttggcggtttcattcaggaatgcataaccgaaaaattgttaaaacgacgaaattcgaatttcatggtttacgagtatcttaaacgttcaggccagagctctcataaagtggaggacattaataacgacttacagcttaaaactctaaatataagacttatgagcgtccttactgggctttctcagcaaggactcatttcatttatttgcgaaggaaagaggggcgaccggagaatagaagagcttcagtttataccttatgttcaacgaactcaccctgaggtattaacttttcaggaatggattagccccgttgattag

SEQ ID NO: 197056 - DNA, 774 bp, Klebsiella oxytoca; identical to SEQ ID NO: 118073

SEQ ID NO: 197057 - DNA, 1164 bp, Klebsiella oxytoca; identical to SEQ ID NO: 31753

SEQ ID NO: 197058 - DNA, 1692 bp, Klebsiella oxytoca; identical to SEQ ID NO: 105684

SEQ ID NO: 197059 - DNA, 177 bp, Klebsiella oxytoca; identical to SEQ ID NO: 105685

SEQ ID NO: 197060 - DNA, 282 bp, Klebsiella oxytoca; identical to SEQ ID NO: 105686

SEQ ID NO: 197061 - DNA, 627 bp, Klebsiella oxytoca; identical to SEQ ID NO: 105687

SEQ ID NO: 197062 - DNA, 2457 bp, Klebsiella oxytoca; identical to SEQ ID NO: 105688

SEQ ID NO: 197063 - DNA, 1089 bp, Klebsiella oxytoca; identical to SEQ ID NO: 105689

SEQ ID NO: 197064 - DNA, 657 bp, Klebsiella oxytoca; identical to SEQ ID NO: 105690

SEQ ID NO: 197065 - DNA, 2421 bp, Klebsiella oxytoca; identical to SEQ ID NO: 105691

SEQ ID NO: 197066 - DNA, 588 bp, Klebsiella oxytoca; identical to SEQ ID NO: 105692

SEQ ID NO: 197067 - DNA, 264 bp, Klebsiella oxytoca; identical to SEQ ID NO: 105693

SEQ ID NO: 197068 - DNA, 762 bp, Klebsiella oxytoca; identical to SEQ ID NO: 105694

SEQ ID NO: 197069 - DNA, 765 bp, Klebsiella oxytoca; identical to SEQ ID NO: 105695

SEQ ID NO: 197070 - DNA, 525 bp, Klebsiella oxytoca; identical to SEQ ID NO: 105696

SEQ ID NO: 197071 - DNA, 258 bp, Klebsiella oxytoca; identical to SEQ ID NO: 105698

SEQ ID NO: 197072 - DNA, 189 bp, Klebsiella oxytoca; identical to SEQ ID NO: 105699

SEQ ID NO: 197073 - DNA, 252 bp, Klebsiella oxytoca
atgagcgtaaacccagaatacaccagggttcagcatgtccagattattcgcgatcgagatgggcagaaggaagttgttcgagtctatgatgaagatggcgacgtggttctgtgtttacctgcctacattcaggatgaggaaataaatcttattctgcgccggttgaatgacgtatattcagtcggatatcgtgtaggtgatgcagcccgccgccgcgccatcaaaaaagcgctgggggatgatgaggagtaa

SEQ ID NO: 197074 - DNA, 2391 bp, Klebsiella oxytoca; identical to SEQ ID NO: 105701

SEQ ID NO: 197075 - DNA, 471 bp, Klebsiella oxytoca; identical to SEQ ID NO: 105702

SEQ ID NO: 197076 - DNA, 297 bp, Klebsiella oxytoca; identical to SEQ ID NO: 105703

SEQ ID NO: 197077 - DNA, 1146 bp, Klebsiella oxytoca; identical to SEQ ID NO: 118051

SEQ ID NO: 197078 - DNA, 378 bp, Klebsiella oxytoca; identical to SEQ ID NO: 118050

SEQ ID NO: 197079 - DNA, 429 bp, Klebsiella oxytoca; identical to SEQ ID NO: 31755

SEQ ID NO: 197080 - DNA, 258 bp, Klebsiella oxytoca; identical to SEQ ID NO: 118048

SEQ ID NO: 197081 - DNA, 609 bp, Klebsiella oxytoca; identical to SEQ ID NO: 118047

SEQ ID NO: 197082 - DNA, 1251 bp, Klebsiella oxytoca; identical to SEQ ID NO: 118046

SEQ ID NO: 197083 - DNA, 321 bp, Klebsiella oxytoca; identical to SEQ ID NO: 118045

SEQ ID NO: 197084 - DNA, 327 bp, Klebsiella oxytoca; identical to SEQ ID NO: 118044

SEQ ID NO: 197085 - DNA, 258 bp, Klebsiella oxytoca; identical to SEQ ID NO: 26624

SEQ ID NO: 197086 - DNA, 792 bp, Klebsiella oxytoca
gtggcagataattatactcaggcgtcgtttattattccctgcactcaggagcaggcaaaaatggcacaagaagcaatcacattcgttaccgaagcagaaattgcagaaggtgagcgtttgcttgataagccactgacagattgttctctgactgagaagctgatcctcagtattatcgagaaccaccctgagtatgacccttctgagccgagctttgggcaaccatcctgcccagactgcaattatgaactgttgttcgcaacagaagttaccagcagtgggctggcagtttttcatggagagaccattgatcttgaccatgcaatttgcctcacaactgccgtgctgtcggtattcgacctctcggaaatggtaacaattactgctgcatttacatgcagtaaaagccggacagatgaatttgggggtatgactattctggtcacaaaggatacccactattaccaggatggctgtcagttttctcgtctcatgaatgaggctcacaaagccggtatccagtatgctctgtgtaaagtgacgcattaccacggtgagagcagctatgtggcaagctatgtcctgagctgcgacgtagcggattcagcccaggaggtcgttaacaaacgactgaaggcatgtgccggaaaagagccagaagacggaatctatattctgtgtgaagaagacaacactagtctttcggtcgaactcgttacagaactgtctccgctcgattacgacaagctgagcaagcttctcccttcccttgacaccctttgcggcgcttaa

SEQ ID NO: 197087 - DNA, 201 bp, Klebsiella oxytoca; identical to SEQ ID NO: 118041

SEQ ID NO: 197088 - DNA, 1788 bp, Klebsiella oxytoca
atgatggatatcaccgtggctcgcgtgaggaacgtcgtagattttaaagtcgatcatgaatcattacgtaaagctaaagacagcattaaagggattaaagagtttgcagagagtcagaaaatagcaattaagccatttgtagaccagcgagcgtttaataagagtatgaagcaagctattaaacaggctaaggctaacaatgttattatgcagaacgcacagaataaagctaataatagggggaatggaacgaacacccctaataataatactcaagctaaacaacaagcaagagcacaggctgctgctaataaaagacaagaccaggctgatttaaaaatgagggctacacgcttacagctaggcggaatcattggaagaacagcagaggaggaagccagagtattacgagaagcacaggccattacagaccaatataaagctggcacaatatcaatggccagacagaaccaattaataaaagaacaaatcaccctgttacgtagagcagccagaacgagacaggctggagctaatgcacatactacaggtggatttggtaaacgcttaggaagcctcgccaatggcgctacaggcggattagctactggaggtgtcttaggtatggctggaggtatgttagggcctcttgctggcgctgctgtcgttgcagggggcttaactggcgtagctaacagtgctaaagaaactcgtatgattgttcaaggtgctaaagctgtaggggtcgatccgaacctccttcaagctatgactgcatggggacagagtaacggtgtagactctgcatcacctgataaaattcaggataatctcaaagatattagggaacgtttaggagatactgctgctaattccacttttgataaaaaatcaggaaaatggaaaggtggtgatcagggtgtgaatagcataatgaacgctactggtatgtcacttaatgaagtgaaacaatatcaagatagtcctgctgacttcttaaatgtcgctattaaaaaaatgcagactaaagggatgagcgatgctgaaatcggacaccagattgaagatttaggggatgaccttctctactacctcccattatttaaagataatgctaaagctctctcagaccagtttgcacagatgaaacaagatggctctttattaacagaagaacagaaaaactctgctgttgtattaggagacgctctgagtagagctagcggatcattagatggtgcatggcgtgaagctcttgtaggctttgtggatgctatgggtggccctgatggtatggctaaaacgattgaaggactcaccccattatttaagggcttaggcgctgtattagggcttctggtgaatattgtctcaagtgtcacacaagctatgacagcactagtgacatgggtagcgaacttattacacctccctgaactatccgctaatgtgaataagcaaactcaaatggcagattcacagcccaccccctcatattggggaattaacagagatagtgataataatagtgggtataagcctaatgttcctgtagcaaatgaccttgtatcaggtgccaaagccagtatcgttaatcagcctgtccaggtggcattagctccagtaattaatgttgctcctgctacagttcagcaaactatcgaactcaagcctgatacatccagcattggcccattcattgatttccaggtgacaaataagcttcaggctcaagctaatcaactagcaattgacattcaaggtgctacgagtgctggcggtaactaa

SEQ ID NO: 197089 - DNA, 192 bp, Klebsiella oxytoca
atgaaatttataatgaaaagtgctggcattaatttaaaaggaagtgatgctgagaaattaattaatgttagtgaactatgcagaacattcaatctcaatattaatagcttcaacactctacgttttcgttatggatatggaattgaagagacattggctattatgttagcagagaataaagaagaggagtaa

SEQ ID NO: 197090 - DNA, 1041 bp, Klebsiella oxytoca
atgtctgaattaatgaatctatttactggacaaaatgccagttttgcatctccttttgagtttgctaataaacaaaataaaatcatcacctctctcggtttattccgtagtgaaaaccacgatgtaaataaaattgcccttgaccgtatcgttgatgagaagatgctaaaaggtctggaacgtgcaatgcatgttcagagtgactggaacagtgcaagccttccagaatttggcacattcctctatcagatgaaatactctaactccctgaactctgtaacgagtcgtgaggtagaagaatatcgccgccgtggggctattgtagaagatagtattgctgctgttctctcagatttctctgatgcacaatatgatcagatggctaacactgtagaagccgatttgattagcgctctgctggctctgagggtggaatcgcaatatacaggacagggtgatttagatttcctagatatggtggaaaccactaaaaccggatttgctctggacacctccagctctgctaacgtattccagcaattgtctgcaatcaaccgtgtagtgaatgttaagctgggcacttctcttgcacagcaacgcacaggaacaattatcctcgctgctggcactgctgctgatgctctgcattatcacaccagtattaaagatttcctgctctacacaatgccaatgggaagcgatgcaaacttgtttactcaggttcagggtgctaatcctgcatatgaaagctggatgctgaaagggaacattgttattgatgtaactggctatactcagatcactgatgtaatcggtgagaatggctttgttgttattcctaagatgtcagatgcatctaatgcatatgttctacatcaagggattgggacacgtcatgccacgctgggtaaagaaagcggattgtatcaccagtatattactacagacccacagtggaactatccaagcattgcaactgaaacggcatacctaccgatcgtaaatattccagatgcaatcgtatttggtggagtggcctaa

SEQ ID NO: 197091 - DNA, 372 bp, Klebsiella oxytoca
atggcaaattttggtaaaatctatggtggggtgaaaacagatagctctgtaattgcatacaccgctgatcatgttctacaagatatgaaaattagcgtccctgatggcatccctgctgatttggtagctggctctgttgtctccttgagttctggtgcactggcaacctctacagataatattggcgtcgtcgtctctccttctgtagcaggtcagaaattcctccgtgtagctcgcaccccgttcgctatgctgattaaagaagctctcattgtagatagctctcttactctcgatgaagttgtagcagctcttacagcacagggctttgcattcactgattatgcagaagtagcactccgcaccacctaa

SEQ ID NO: 197092 - DNA, 243 bp, Klebsiella oxytoca
atgaaaacaatcaataacaaatctatgtcgctctctgattttacaagcacctgtgaacaggtagcagaggttatgaaatgtgacgtaaatactgttatgcgggaagccgctaaacgacttcttgatgaagagcaaactttagtgaaggggttaaattactctgaattagaaaatctctctcaagaggaaaagactaatgcattcattgaaaaaatgaagaaacataaaaacaggaataaataa

SEQ ID NO: 197093 - DNA, 450 bp, Klebsiella oxytoca
atgagtagcattaatagtatgagccgtgcagggcgcggtagagaagctgtagcagagtataatcaacaacaggctatcctggaaactcctgttagcaattcagaagaagcaaaagcctataatgaagtaaaaaacagtaaaatcacataccttgatatcttttctgcatacaatgatgaattaaatgggagtatcctggtaaacctcactacagccattgataacttctataacacccctacagctaataatttgaatactgtcagtgaagagattaagcttgctaacaaattcattagagaggcttctggagttatggaagtttgtattgctagctaccctgatagtgcagaattagctacagagattgacatttatcagagtgctacagagtgtattctaggtgaaattgaacaattagcagagaatatgacaggagaggaggcgtaa

SEQ ID NO: 197094 - DNA, 642 bp, Klebsiella oxytoca
atggctacaattaacgacacatccagcactaagagcgcctctaatactaaagcacagaatggcttctgtgttatcgcaagtatggctaacgagtcttctgcgagctacattcaggaatacagtgctctatcatttgatagtgtccctcagattggcgtaaagcgcaaagcagacgtttccagttacgcgatcgaatctggaagcgaggtgagtgatcatgttcagcttaaaaatgattcaatcaatatatccggctggattacagagagtcctattgaactacgaggcgatattatctcaagtgctggggccaacggcaccagggttaaacaggctattgattggttaaacaccacattcgaagcgcggcaaactatctcactggttacaagggacgctgtattagagagtgttgttttaacaggtgtcagttataactacgatgatgcactggatgcaatgaaatttgatttgacttttgaaataatccgattagttagtagtaaagaggtagatgtaatagccaccaaaacaaaatctactactaacaaaggtaagacggttaaaactaaagcgccaacaagcagcactcctaaaaaagacagcactgttagtaacctgtcctctcaatataattcctaa

SEQ ID NO: 197095 - DNA, 153 bp, Klebsiella oxytoca
atgcaggaatacgaatatacagaaaatgaaaaagcattatttagaagcatagctgaaggtttagagcttacgtatgaggaactcgaatccaaaattatcaaggaatatttggaaaatctccttgatagaatcaaatataacagaggggaataa

SEQ ID NO: 197096 - DNA, 204 bp, Klebsiella oxytoca
atgacgaatatcgatgctgtatacaagcatttattgtgctctcatacacgtaaactaaaacagattcaggaagatttaggtctaacacgcgaggatgtattatggagcatcaagagtctcattgaagagggcattctccacactaaatccccaaccttgaaaggctttaataaaaacctaatcagagaaatcactaaggagtaa

SEQ ID NO: 197097 - DNA, 957 bp, Klebsiella oxytoca
ttgtcatactcaacatataacgatatttattggaatagtgaagatttagaaaaagattcaacagcagatgaaaagtttctatctcgttatgaaccctcacagcaatacaccctcacagatttctcaaatagcaatgaacaattaactgtaattgacgggtatctttaccgggttgataaagaaactggcgagatacaccattatggtgatggttggcaagagtatttagttggtggtgatattgtaaaccacatttttcttcaatacagtatcgctgatacggctaaatctaaacaagcacaccgtgaatactctaacgagctgggagataaatcaacaaacgcagcacacaacggaattaaagagtatgctcacatattgaataaacgagactttgaaaaactgttcattctatgcaatgaggttgaccgtagaaatcttgtctttatcaaacgtaaaaaactctgtgacatcctgaacacctcatacgaccatttaaaacgagtcctaaatctacttgaagagaagcaatatatcaaggtagacaaggcagagcatgaaaaagatactttcaaaatctgggttaatccttcctttatatggaaaggtgattattctaatcgttggttatctgcttacatgcaaggatttgatattttacctcgtattaagcaacgtaaggagtcggtatcaatatttgctattaccgaaaaggcactgaatgattatgatgtctggtatgcagaacacggtgattatgcaccttcaccattatcaagagattggtatgaagaaattcaacgttatgacaatacatacggtgaatctcagaggaaagcaaaagaaacctacgataaaaaaatggcaatactcaactctgcaatatctgagaatgcttttattgaggcgtgcttgggggtagaacaatacagaaaaattcttaagaattttaaataa

SEQ ID NO: 197098 - DNA, 186 bp, Klebsiella oxytoca
atggcaaatacaaaataccccgatgttcaagcaattcttgatgcgctgcttagtggtgaacttagtcgagcacaggcacagcgaagtaagaatgttgcaaagagtttagggcataccgaacgatatgagcgctaccgccgctctgtggcactgtttgaccagattatgcatatcaaaaccatttag

SEQ ID NO: 197099 - DNA, 204 bp, Klebsiella oxytoca
atgaaagatcatgattatgtgaatttctcggaagattacgaactaaactatcacgcaaagaaagtagggaagagggagactgaagccaatagggcgaaactcagaacaatggggaccgaactgaaagctaaaacagggaaaacccgtcttactcatggtgaatttcatccctacgtgaatacgaacaagggacgattagaataa

SEQ ID NO: 197100 - DNA, 261 bp, Klebsiella oxytoca
atgagtatttactttactaaacatggcagcgcgattggataccaggtagaggggcgttggttaattaagggcgactatttgaaagttgagcatggccctaatattcctgggggggtatacaaaatcaatgataataaggttaaattccccttagattacaaggaagttgagggggtaattgatacggaaaaacttatcttcactgtgtgcggtatcgaacataagatgattaaaattaaaacagctccgtgggatatgtag

SEQ ID NO: 197101 - DNA, 291 bp, Klebsiella oxytoca
atgacagtaagtaaagaattaaaagttcgttacactcgaggcagggaacagttcgaaaagtcatttccatgggatggctgtgcgcctgttgatagtgcactaacatgtctcgttgaggagcataatctggtgactttaatacctgctcaagaacgggttgcgcttggtgggattagaaatcttcataagccagtaaatctccttgaacacggttttgacgatgttttcttttatgacgatgaaataaacaaatgggaaagaatccctgataaatggcttacagatgtttaa

SEQ ID NO: 197102 - DNA, 861 bp, Klebsiella oxytoca
atgcatgttttaggggatattcctgtggggagtatcaccaaacagcacatacgccaaactctggcagtgattgagaacctgccacgccgaaacgtgaaaccctactcagagatgacgttagaggagtgcatagactttgatgttcctgaagacgatttgatcagtagtgccaacgtcaaaaaacacctcaagatttattcctcgtttttcaaagttttccttaaagatgaaaaggacatattagaaaaggctcccactgaggggatcaaatatgaggtgacggagaacaagggcggacattactcgcggcctgagatgcaacggctcatagaacggttatctacgtttaccgattggcgtaaagactacttcctgactttgatctacacaggtgctcgccggggtgaaatggctgctatacgcaaagagcacatacgcaaggatgaggaaacggggcgttactacatcttcattgcggacggtaaaacggaacacgcacagagacaaatcccaatcagtaaaagtattgaggcgctgttgttagctcgaattaagccccttaaagatggtgatcttgtgtttaacgacttgccaacctacgaatataccgctattcaatggcgtagtttaatggatgattgcaatgttacgaaatacaacgaatttgggcagaagagggtgattcatgctttgcggcatacgttcatctctgaggctatagcgaaaacgggtaatgctgcgctcgttcaattcgttgtcggacatagcagaacgcaatcgctaggcataacagcaagatatactcataggccagcgcttagccaactgctaacagtggtagattatgttagttggggatag

SEQ ID NO: 197103 - DNA, 1275 bp, Klebsiella oxytoca
atgacgaacgcgatactttggtatgagattaagaatatcggtagctttgaagatgaaggagggttcgttgaccttactactacagctaaggataagaaaaaagaactgtgggtcgatgttgatggacacaaggtcaatttgatcactgctatcatgggggcgaatgcctctggtaagacaacactccttaagcctatgtcttttttgagttggtttttttggtctataccagcaaaagtaactgattatttgtatctaaatatcaatcgaccatatgttaatccagggatgattaaaatatgttttgttttagatggtaaagtatacacatatatagtcactgcctgcgatcattttgtaataaaagaagaactatatgtaaagaatgaaaataacaaaaatatatatgttttcaagaggaaattagacaaaaagaattataaaaaacaattagataaaagcagtgatgaattcagcactaaagaggttgaagagctattaaaaacaataaaatatgattatattgaaaaagctgaacttttccctttaggtatagaagagggtaaaagaacaccagctaatacaagtataatttctgctgctaggcgagtaggagttcccttagctatcaatatagctgaaaaaatgagcaataccaccaacgtaaatgcaatgggaaggtatagctatgattatgaagatttaggtacaacagcagaggagttatatgaaaatcctatagcgttcaaaagcgttaaaaatattctacgcaaatgggatttaggcttggatgatataactatagagaaagaagagaaggttgatataaatggtgagaaggatgtttattaccttttgaatggtgttcatgaaaaagaagatggtactaaatttgagttgccatttgcttttgaatctgctggaacacagagtgcatttatcaggttgcacaatataatgcaatgtctgaaaaaggggacggcatgttttattgatgaacttggtgatgacttacacccacatatggtcaaacccatattggaattattcatcagtaaagaaacaaatcctttacatgcacagttgatttttacttgccataaacctgaacttatcaattacttaggtaaatatagagtattgattaccgagaaaaagttcaataaaagtgaatgttatcggcttgatgatttcccatccagtgaagcgcgggtcgatgataatattgcagctaaatatttggcgggtgcatttggtggagtaccagatttatga

SEQ ID NO: 197104 - DNA, 534 bp, Klebsiella oxytoca
atgaccaagcctagacgtgcaagacgtggagttgaacgaactaagttattgatgtgtgaaggagtaactgataaaagatttgctgatagtttaaaacgccttttaacaactagggctgcaggatttagtgttagactagatgatgctggtggaggcgggcctaaatccgcgataatggcagctataaatcatgctggtggttttgataaaagagttgtctttattgattcagatcttgcaattcccaatgacgcattagctgcggctaggaatagggacataaaaatcattcaatcctcaccactatgtttggaggggtttttaatgagattaatgggccataatcaacaattcatcaattctcaggaagcgaaagattcatttcataggttttataatttgaggaatgttgtaactcaagaatggtatgaagagtatataacacttcaacgcataaactctgtgattagagacgatcgacatatttgccgagaggtactaaatgacttatgcaatgtattcactgtgttttaa

SEQ ID NO: 197105 - DNA, 768 bp, Klebsiella oxytoca
atgacgggattccgttgggagatcattgaggagtacggtccgctgtttatggacggtgccctgatgaccattaaatgtaccattatctgcgtgatcctcggcaccctgtgggggctgaccctcgggctggggcggatggcgaaagccgagcacggggtatggaaatacgttctgcgttacctggtgcagtttccggtgcgcttttacgtcagcgcgtttcgcggtacgccgctgttcgtgcaaattatggtggtgcacttcgcgctggtgccgctgtttatcaacccgcgcgacggactgctggtgaccagcggcatgatgagcgctgatttcgctcgcgagctgcgctcaaactacggcgcgtttctctcctgtatcgtggcgattacgctgaatgccggggcctacgtgtcggagatcttccgcgcagggatccagtcgatcgataaggggcagatggaagcttcccgcgcgctgggaatgccgtggtggaaaaccatgcgtcaggtgattctgccgcaggcgtttcgccgcattctgccgccgctgggcaacaacgctatcgccatcgttaaggactcctcgctggcgtcggccatcggtctggcggatctggcctacgccgcgcgcaccgtttccggcgcctacgccacctactgggaaccctacctgaccatctccctggtttactgggttattactttcctgctggcgcagctggttaaccgtctggaaaagaggtttggcaaaagtgattcacattcataa

SEQ ID NO: 197106 - DNA, 144 bp, Klebsiella oxytoca; identical to SEQ ID NO: 126359

SEQ ID NO: 197107 - DNA, 1059 bp, Klebsiella oxytoca; identical to SEQ ID NO: 118111

SEQ ID NO: 197108 - DNA, 978 bp, Klebsiella oxytoca; identical to SEQ ID NO: 118110

SEQ ID NO: 197109 - DNA, 378 bp, Klebsiella oxytoca; identical to SEQ ID NO: 105745

SEQ ID NO: 197110 - DNA, 873 bp, Klebsiella oxytoca; identical to SEQ ID NO: 31763

SEQ ID NO: 197111 - DNA, 1785 bp, Klebsiella oxytoca; identical to SEQ ID NO: 105747

SEQ ID NO: 197112 - DNA, 873 bp, Klebsiella oxytoca; identical to SEQ ID NO: 105748

SEQ ID NO: 197113 - DNA, 3189 bp, Klebsiella oxytoca; identical to SEQ ID NO: 105749

SEQ ID NO: 197114 - DNA, 1059 bp, Klebsiella oxytoca; identical to SEQ ID NO: 118104

SEQ ID NO: 197115 - DNA, 135 bp, Klebsiella oxytoca
atgaaactcggatttattataggcgctctctttgcaacatggctgacgctaaattatccggaccagatgagaagttattttaccaaagccgtcgactatatcgaaagtgttgcaacatttattacatccaagtga

SEQ ID NO: 197116 - DNA, 1512 bp, Klebsiella oxytoca; identical to SEQ ID NO: 118102

SEQ ID NO: 197117 - DNA, 513 bp, Klebsiella oxytoca; identical to SEQ ID NO: 118101

SEQ ID NO: 197118 - DNA, 4305 bp, Klebsiella oxytoca; identical to SEQ ID NO: 118100

SEQ ID NO: 197119 - DNA, 582 bp, Klebsiella oxytoca; identical to SEQ ID NO: 105773

SEQ ID NO: 197120 - DNA, 426 bp, Klebsiella oxytoca; identical to SEQ ID NO: 31762

SEQ ID NO: 197121 - DNA, 591 bp, Klebsiella oxytoca
atgttgtctgaagatcaggtacctgaatcgacctataacctgaccctggtaccgcttgatgttcccggtgcgatgatttcagttactacatctttaagcccatctatgcaagccaaacgtgaaacctcattggataagcaaaactatgaggaaatgttggcccgctcccagtcagaagaactggctccaacggatccaaaacaagacgatcataaacaaagaatcattgatttattgactcctgtggctcttggtgaggtcccttcaggattcagtttacaacaggaccgactttctcgtattcctgcgccagagcagtcaccatgtaactttaatatgtatgcaaagctcggtcagagactggttggctcacgtgaacttattgatgtaattcttgtgaaaaacgataaaccatacggtcaaatcgttgctgatcagcagtgtatggcagaaggcgttattgcaagtgctttatttgataaagcatacctgcaaccgggagaagaaacagagctttacatagtccgggataaattgttcaaggaacgcgaggcccgggttacaaccagaccaagtctaatcagaaaataa

SEQ ID NO: 197122 - DNA, 1356 bp, Klebsiella oxytoca; identical to SEQ ID NO: 118085

SEQ ID NO: 197123 - DNA, 483 bp, Klebsiella oxytoca; identical to SEQ ID NO: 105743

SEQ ID NO: 197124 - DNA, 858 bp, Klebsiella oxytoca; identical to SEQ ID NO: 118087

SEQ ID NO: 197125 - DNA, 951 bp, Klebsiella oxytoca; identical to SEQ ID NO: 118088

SEQ ID NO: 197126 - DNA, 2682 bp, Klebsiella oxytoca; identical to SEQ ID NO: 105740

SEQ ID NO: 197127 - DNA, 1179 bp, Klebsiella oxytoca; identical to SEQ ID NO: 118090

SEQ ID NO: 197128 - DNA, 1005 bp, Klebsiella oxytoca; identical to SEQ ID NO: 118091

SEQ ID NO: 197129 - DNA, 522 bp, Klebsiella oxytoca; identical to SEQ ID NO: 105772

SEQ ID NO: 197130 - DNA, 837 bp, Klebsiella oxytoca; identical to SEQ ID NO: 31787

SEQ ID NO: 197131 - DNA, 948 bp, Klebsiella oxytoca; identical to SEQ ID NO: 105770

SEQ ID NO: 197132 - DNA, 1038 bp, Klebsiella oxytoca; identical to SEQ ID NO: 105769

SEQ ID NO: 197133 - DNA, 639 bp, Klebsiella oxytoca; identical to SEQ ID NO: 31788

SEQ ID NO: 197134 - DNA, 216 bp, Klebsiella oxytoca
atgagtacagcgctttctgtccttgagtcttttgtttcgaacaccggtatcgaccacagcaaagagatgaacgtcatccatgacatcgttgccgagtgcgagaaagagatcgcgttcatgcaccaggttcacgacttcacttatggcgacgaacgtcactggaataagtgtttaagatttgcactacgtacattggaagtggaaattatttggtag

SEQ ID NO: 197135 - DNA, 3114 bp, Klebsiella oxytoca
atgactgattataagaccattgctgaatccaataattttatcgtccttgagaaatacactaatgttcaggataccagcgacagctaccagagcgaatcggaccttgagagggagctgattcaggaccttattaatcaaggttatgagtttatctccgttaagtcaccgacggcgatgctggcgaatgtgcgggaccagcttcagcgtcttaatggtgtggtgtttaacgaaagtgaatggcggcgcttcgcagagcagtatctggacagccccagtgacagcagcctggacaaaacccgtaaaatccatatcgactatatctgtgattttacgtttgatgatggtcgtctggaaaacatctatctgatagataaaaagaacctgctgcgcaataaggtgcaggtcattcagcagtttgaacagaccggctcacacgctaaccgttatgatgtaacagttctggtcaacggcctgccgctggtgcaaatcgaactcaaaaagcgcggcgtagcgattcgtgaagcctttaaccaaatacaccgttacagcaaggaaagctttaatagcgagaactccctgtttaaatacctgcaactcttcgtgatttccaacgggactgatacccggtactttgccagtaccactaaacgggataaaaatagctttgatttcaccatgaactgggcgaaatcggataacactttgattaaggacctgaaggactttaccgccactttcttccagaagcataccctgctgaatgttctgtttaattacagcgtgtttgacagcagccagactctgctcgtcatgcgtccctatcagattgccgccactgagcgaatcctctggaaaattaacagctcatttaaagcgaagaactggtcaaaacccgaaagcggcgggtttatctggcataccacagggtcaggaaaaaccctgaccagctttaaggccgcacgtctggctacggaactggactttattgataaagtcttcttcgtggtcgacaggaaagacctcgattaccagaccatgaaggagtaccagcgcttctctccggacagtgtcaatggttcggataatacagcaggcctcagaagaaacctggataaggacgataacaaaatcatcgtcacaaccattcagaaactcaataacctgatgaaagccgaagctgacctgcccgtctatcagcagcaggtggtgtttatctttgatgagtgtcaccgcagccagtttggtgaggcccagaaaaacctcaaaaagaaattcagacgcttttatcagtttggttttactggtacgcctattttcccggaaaatgcactgggggcagaaaccaccgccagcgtcttcgggcgtgaattacattcttacgtcattactgatgcgattcgtgatgaaaaagtgctgaagtttaaggtggactataacgatgtccgcccacagtttaagtctcttgaaacggaaactgatgagaaaaaactcagcgcggctgaaaaccaacaggcatttttacacccactgcgtatccaggaaataacgcaatacattctcaataacttccgtcagaaaacgcaccgaaccttcccgggagctaagggctttaacgccatgttagcagttagcagtgtggaagcggcaaaagcttattacacgacgtttaaaatgctacaggaagaagcagcaaaaaaatcaggcagctataaacgccttcgggttgcaaccatcttctcctttgctgcaaatgaagagcaaagcgccattggtgatattactgacgaaagttttgataccagcgcgatgaacagcagcgcaaaggaattcctggattcagctattgatgactataacaaccactttaaaaccaatttcagtaccgacagtaacggctttcagaactactaccgcgatttagctcaacgattgaaaaatcaggatattgaccttctcatcgtggtgggaatgttcttaaccggctttgatgccccgacgcttaacactctgttcgttgacaaaaacctgcgttatcacggcctgatgcaggcattttcccgcaccaaccgtatctatgatgcaaccaaaaccttcggcaatatcgtgactttcagggacctggagcgtccgaccattgatgccatcacactttttggcgacaaaaacaccaagaatgtggtgctggaaaaaagctacgaagagtacatgcagggctttaccgatgcggcaaccggtgaggctaaacgaggttttatggctgttgtttcggagctggagcagcgcttccctgaccctgccagtatcgacagtgaaaaagagaaaaaagccttcgtcaaactgtttggtgaatatctgcgggcagaaaacatcctgcaaaactatgatgaatttgccacgctgaaagccctgcagaaggttgatattaatgacccggaagcggtagaaacctttaaagcagagcactatgtggatgatgaaaaatttgctgaattacaaaccattcgtctcccggcagaacgtaaagttcaggactatcgctcagcatacaatgatatccgggactggcagcgacgcgaaaaagcagcaaacgacagggataaatcaaccacagactgggatgatgtggtgtttgaaattgacctgctgaagtcgcaggagattaacctggactacatccttggtctgattttcgaccacaatcgtcagaaaaaaggtaaagaagccctgactgaagaggtcagacgcttaatccgctcaagtctgggcaaccgtgccaaagaaggtctgattgttgactttattcagcaaactaaccttgatgacatgccggataaggccagtatcattgatgcattctttacctatgctcagcgtgaacagcaacgggaagcggaagcgttgattaaggaagaaaacctcaatgaagaggcggcaaggcgctatatccgtacatcactcaaacgggaatatgctatcgaaaatggaacggagttaaatgagacgctaccaaaactcagtccactgaatcctcagtacaaaacgaaaaagcagaccgtattccaaaaaattggggcgtttatcgaaaaatttaaaggggttggaggaaggatttaa

SEQ ID NO: 197136 - DNA, 1170 bp, Klebsiella oxytoca
atgagtgccttgagttatctggaaaagctgctgaatggggttgatgttgagtgggttgcactaggttcaatagcagatattggtacgggcagttcaaatcgccaagatgaaagtgataatggaacctacccattctttgttcgttcaaagaacatattaaagtcagatacttttgaatttgatgaagtagccatagtgattcccggtgagggcggagttggcgacatctttcactatgttgagggtaagtatgctctacatcagagggcgtataggattagtattcaatcgaactccttgattacgaagttcgtatatcacttcatgttatccagctttaagcagtacatcttgatgaagagtgtgggagcaacagccatttcgattagaaaacccatgctggaaggatttcaagtgccaataccctgcccagaccagccggaaaagtctctcgccatccagtctgaaatcgtccggattctggataagttcacagcccttacagctgagcttacagctgagcttaccatgcgtaaaaaacagtacaactactatcgcgaccagttgctgagcttggaagaggatgaaatagagtggaaggcacttgatgatgtttgtgcttttatatctgctggcggagatgtgcctgaaaatagtgtgaaaggtcaggtaaaaccaactaacgaatatccctatccaatctacgctaacgcaacagatgaaaaggggttatatggctacactgattcgtacaaaattgatagcgatgcggtgacaatttctgcgcgaggggctaaagtaggataccatacagtcagagacgcaaaattcacgcctattattcgcttaatagtattagtcgccaataagaatttagtcagaacacgatatcttaattatgttttagatatgacagctatcgggggtacagatgggggaatcccacaacttacagttccgatggttaagaaaattaccgtcccaattcctttcgcaagtaatcctaatagatcgcttgccgaacaagatcgtataatcgcaatcttagataagttcgaaatcctgactaattcaatcagcgaaggccttccgcgcgaaatcaacctgcgccaaaagcagtacgaatactaccgtgatttactgctcagtttccctaaatcaaatgtatag

SEQ ID NO: 197137 - DNA, 249 bp, Klebsiella oxytoca
atggtgccagaaagcaatatgcgctggtgttcagacggcttcgagttcggctgcgacaacggtgaaaaactgcgggtcacgttcgcgctggacttctgcgaccgtgggggcatagactgggcagcaatcacgggaggttatgacagttcgacggtgcgggatgtgattctgaaagcgcatcggcgacatgttgccggacacaccagtgcagtggctgacggacaacggttcagcgtatactacgtatga

SEQ ID NO: 197138 - DNA, 1116 bp, Klebsiella oxytoca; identical to SEQ ID NO: 31727

SEQ ID NO: 197139 - DNA, 273 bp, Klebsiella oxytoca; identical to SEQ ID NO: 31728

SEQ ID NO: 197140 - DNA, 168 bp, Klebsiella oxytoca; identical to SEQ ID NO: 31729

SEQ ID NO: 197141 - DNA, 819 bp, Klebsiella oxytoca; identical to SEQ ID NO: 105710

SEQ ID NO: 197142 - DNA, 1206 bp, Klebsiella oxytoca; identical to SEQ ID NO: 105711

SEQ ID NO: 197143 - DNA, 204 bp, Klebsiella oxytoca; identical to SEQ ID NO: 105712

SEQ ID NO: 197144 - DNA, 1320 bp, Klebsiella oxytoca; identical to SEQ ID NO: 105713

SEQ ID NO: 197145 - DNA, 168 bp, Klebsiella oxytoca; identical to SEQ ID NO: 105714

SEQ ID NO: 197146 - DNA, 1428 bp, Klebsiella oxytoca; identical to SEQ ID NO: 105715

SEQ ID NO: 197147 - DNA, 981 bp, Klebsiella oxytoca; identical to SEQ ID NO: 105716

SEQ ID NO: 197148 - DNA, 258 bp, Klebsiella oxytoca; identical to SEQ ID NO: 105717

SEQ ID NO: 197149 - DNA, 255 bp, Klebsiella oxytoca; identical to SEQ ID NO: 31731

SEQ ID NO: 197150 - DNA, 198 bp, Klebsiella oxytoca; identical to SEQ ID NO: 31733

SEQ ID NO: 197151 - DNA, 960 bp, Klebsiella oxytoca; identical to SEQ ID NO: 127108

SEQ ID NO: 197152 - DNA, 1233 bp, Klebsiella oxytoca; identical to SEQ ID NO: 127107

SEQ ID NO: 197153 - DNA, 423 bp, Klebsiella oxytoca; identical to SEQ ID NO: 127106

SEQ ID NO: 197154 - DNA, 1023 bp, Klebsiella oxytoca; identical to SEQ ID NO: 127105

SEQ ID NO: 197155 - DNA, 495 bp, Klebsiella oxytoca; identical to SEQ ID NO: 127104

SEQ ID NO: 197156 - DNA, 255 bp, Klebsiella oxytoca; identical to SEQ ID NO: 127103

SEQ ID NO: 197157 - DNA, 489 bp, Klebsiella oxytoca; identical to SEQ ID NO: 127102

SEQ ID NO: 197158 - DNA, 387 bp, Klebsiella oxytoca; identical to SEQ ID NO: 127101

SEQ ID NO: 197159 - DNA, 960 bp, Klebsiella oxytoca; identical to SEQ ID NO: 127100

SEQ ID NO: 197160 - DNA, 600 bp, Klebsiella oxytoca; identical to SEQ ID NO: 127099

SEQ ID NO: 197161 - DNA, 897 bp, Klebsiella oxytoca
atgcccgacctgactcttgatctccgatacctgaagtacgccgttcaggtcgccgaggccggcagcttccgccgagcggcggagcgcctatcgatatcgcaatccaccgtcagccgacgtgtgcagctgtttgagcgccaacttggcttttctctcttcaagcgtacgcgagcgggggcagggctgactccagaaggtgagcgcttccttcaacaagcggtggtgggagcgcgctaccttcgtaacgccgcaacggagatccgctccgcgcggaaactcaagaccgggctcgtgaggtttggaatgcttgaagcgttcccggcgtgcccgatcatcaacattctctcggcattcagaaatagacatccgacgatcgaggtaaagcttgaggaaggcacttcagaagaaaacactttgggggtgaagcgcggattactggacgcagcaatcagcctgagtgcgagcaagagccctcagttccaagttcgacgtctctgcgaaccagatctgttcgtggcattgtccccgcttcacgagttggcagcacggccacagctgtcgtgggaggacgtttgtgacgaagtcttcctcgttcgctcggatggcgctgggcgtgagctcgctggcatactccggcgcatggtgggcgccggagacggagcggttcaactctcgatccaacaagtcagccgagaaaccctgctgacgatggtcgaacagggcttcggcttgaccatcaccagcgtgatctaccggccggatatcgcgttgatcccgctcccatcggcgcgggcgccgacggccgctataatttcttccagtgacaacgacaacccgactctgccgctgctgctgaagtgtttcgacaccccctctagagcggggaccacggattaa

SEQ ID NO: 197162 - DNA, 1221 bp, Klebsiella oxytoca
gtgagcgagaacccgccccggattgaggaagtgccggacgacgatgcgcagcccctgaccggcgagccggtcgggcctgcgccgatgcggctgcgggccgaaccgccccgcgtcacccggttgtcgcggaaggttctcgccggcctcggtcttgtcgccagcgtcgggctcggaggtgcgctgatctacgcgcttcagacccgcgacgccggtcggccgaacgacgaactctattcgaccgagaaccgctcgaccgctgacggactggccggcctgccgcgagattacagtggcgtgccacagctcggtccccctcttcccggtgacctcggccggccgatccttagtacccaggatcgcggacagccggtgcccacacccgggacggccacgcccaatcccggcatcagcccggaagagcagcgccgccttcaggaaatcgagaccgcgcgcaccagccgtctcttctccggatcggaaagccggggcacacccgctgctgcgggagctgccccagcgctcgcgccggtgccggatttggcgagcattggcctcgctccgccgcccgccacgccctcggcgcaggaccggcagaacgcgtttctgaacgccgcggccgatcgcaggacggttgcgcccgatcgcgtcgctgcgccagtatcgccgaacgtccttcaggcgggagcagtgatatccgcggcgctgatcaccggcatccgatccgatctacccggccagatcaccgcgcaggtcaccgaaaacatctacgacagcccaaccggccgtatcttgcttgtgccgcaaggcactcgtgtggtcgggcagtacgacaacaacgtgcagttcggccagagccgagtcctgctcgtctggactcggctcgtcttcccgaacgggcgctcgatcgttctcgagcgccagcctggtgctgacgctgaagggttcgccgggctgcaggatggcgtcgattaccattggtgggatctggccaaggctgcgggattgtcgacactgctgagcgtcggcgccgaactcgcggtcgacaacgacgatcagctcgttcaggcgatccggaacggtgggcaggacaccatcaacgacgcagggcagcagattgtgaggcgtcagctcaacgtcgcgcccacgatcactattcggcccggatttcccgtgcgcgttctcgtgacgcgagacttggtactggagccatatggagggtga

SEQ ID NO: 197163 - DNA, 1050 bp, Klebsiella oxytoca
atgaagccgtatttccgtaaagccggaaacccggcttcacacacacacgtactcccggctctccgtagagccgcattcccggtcgttctgctagcggcgaccgcgctcgcgggctgcgcgaccaccaatccgccgccggagatttcctacgacaatgcggctccggcggtgcagaccgtcgatccacccgcgccggtcaccgtggtcgagctgccccggccgctgccgctgcctggccaattgcagcgtgtggaggagacgcggcgtgccccggagccttctaatccgaccgctcgcgtcaaccaggcaaacgaggcggcacgagtccagccggtgcgcgacggcttcattaactcgatgcaggtctacccgtggactcaaggggcgctttatcaagtctataccgccgtcgggcagatcaccgacatcgcgctccaacccggggagcagcttgtcggcgcaggcccggtggccgccggcgacacagtgcgctggatcatcggcgacaccgagagcggatcgggggcaacgcgccagatccacatcctagtaaagcccacccgcgccgacctgatgacaaacctcgtcatcaacaccaacatgcgcacctatcacatggagctgcgctcgacagagcgcacctatatggcgtcggtctcatggcagtatccgcaagaccagctcattgcgctgcgccgtcagaacgccgaggcgcaggcggcccagccggtggcgagcggcgtcgatctcgcgaacgtcaacttccgctatgcgatcgagggcgaccgtgcgccgtggcggccgctgcgcgccttcgacgacggacgccaggtctttatcgagtttccgcgcggcatcggtcagggcgagatgccgccactcttcgtcgtcggccccgagggcaacacctctgagctcgtgaactatcgcgttcgcggccaccacatgatcgttgatcgtctgttcgcggctgccgaacttcgcttcggctccggccgcgagcagaagcgcgtcaggatcgtccgcacagacgggaggccgacctcgtga

SEQ ID NO: 197164 - DNA, 360 bp, Klebsiella oxytoca; identical to SEQ ID NO: 105552

SEQ ID NO: 197165 - DNA, 309 bp, Klebsiella oxytoca; identical to SEQ ID NO: 105553

SEQ ID NO: 197166 - DNA, 858 bp, Klebsiella oxytoca; identical to SEQ ID NO: 105554

SEQ ID NO: 197167 - DNA, 204 bp, Klebsiella oxytoca; identical to SEQ ID NO: 105555

SEQ ID NO: 197168 - DNA, 405 bp, Klebsiella oxytoca; identical to SEQ ID NO: 105556

SEQ ID NO: 197169 - DNA, 666 bp, Klebsiella oxytoca; identical to SEQ ID NO: 105557

SEQ ID NO: 197170 - DNA, 381 bp, Klebsiella oxytoca; identical to SEQ ID NO: 105558

SEQ ID NO: 197171 - DNA, 2577 bp, Klebsiella oxytoca
atggaagctccattcgttatcaagtttatcgagaccaaatggcacgataagcaaaccttagtcagtgttagcgagtcggagtactcgctaaagcttgagcagacgggaaacaacgccttttccgcgcacaccaccatttacccaaaggtcgatgaactgcgttttgctcaacttgcgataaaaactaagcagggtgatcagtcaccgccctacattgccatgcccaatggtgagagaaggcagttagagtcgattaccgattccgcttctaatgaggagtggtgggttgagcctgcccattgggatgcaaaacagcgggtttggcgcagtgaagcgcgaaggactgctggccaaatcatgtttgtcattggcagctcaacactgaagcttgatattgatatttccgaacagactaaatcggatctttcacgttacctgtcagattttaaagcggacctgtgggagttgatcctcgatgagagtagtcatatcacgggcgacgctaaaaattcacaggttgcagccatcgaccaagaagcgctgtcattagtcgcatcaattcttagcaatgcacaaaccatcctcaaaaagcccaaagttgaactgaaagaaattcaagcgttaaagccagcaaaagaagtacgtcctgttccacgtacatttatggagatttgtaccaaaggttcgcgtaagcatttaacgagccgcgcatctgagccgagttacaacgtgccagaaaaccagtatgtgctgtatgtggtttcgagcacgctgagcattgtaaagcaattggttaaggtggctgagagcaaaaagagtcgtttttctggggctattgaaaagctcaatgagcgtttagacagtttaaaagactatcgtattatcaaccgtgacctagtagttaaagacttagaacgacttaaaaagcgctttgatacagaagtaatcaatgccgagttatcggaacagttagcgaaaatcaacgttaatctgtctcgaagttactctgaaaaaggttacctaagattggaaaaagcaacaggctctgagaatgagtggtgggctaaaattaaaccatcgcaaaatgatgactggcaacagtttgagccagatggatataccatttttagttctagagatcattacgccagcttgtttaaatcttatagcgactatgagatagaagcgaagatccctttaccgttaagaaggggaaaagcggtggtcttgtatccagaatacatctcacgaatttgcgtattaccagagtctcgttctattcaaagagagcaagaaaatttcactaaattgcgtgacaaaggcattgctctaagtaaaaaggattggcaagcgaagctgacaacagatgaactcgctgaacaggaaaaagaacgtgctaccatcaataagcgcttgggttatttcgcaactgaacatgaaaaggtgggaatcgtacacaaagcgcttgagccaaaactgaaacctttccagcaaatagaaaaagaatggcgtcaatgcaaagtcaaaagtaaaagcacctttcctaactctatgacttttgtgcaaaaccctgcctatcaagcggttcactcgggttttaaaaagttaaaagagcagattggcttggccgatgaggacattttgctttcgctggagaagatcgaagcgattgggttagtcaacatgccactactttatgaacgctggtgtttgctgcaaatcatcaaagtgctgactcaggcattccgctatcagccagaggacaactggaaacgaaaattgattgcgaatattcaaggcaatgaagaacaaatcagcattcagtttttcaacccaagtgtttcaagagctatcactctgcaatacgaaccgttcttagcaaatggtaagcgccctgattttgttttggatgtagaagcgattaccaaaagtggtaaccaaatttcaaagcggttagtcgtcgatgcaaagtactattctgctgcctatctcaagcaaagaggtgggatcggtggggttatccatgaactttacaacggcaaagattatagcgaatgccaagagaacagtgtgtttgttcttcaccccgtgttagatgcggttgagaaagtcgtctctccacaggaatgggcgaaagacagttatttgggcgaactatccatgtttgattgggaacctgcacaccatcaacgccaagctacaaactatggtgcagtatgtgcaaacccaatgaagtcgcaacgctatcttgatgaaatccaacgtatgctagggatgtttctacagtacggcattgaagacaatacatcttttcgaggagcatcggatgatactcatgcggtgaatttttgtgtttcttgcgggtctgaaaaagtagttgatgtaacgaaatcaatgagttcaaataatcaaaagcgttggtatcggtgcaatgagtgtacacactttaccgtgtatacccactgtggtacatgcaatacacgattaattaagaatggcgagtattggacctatttgtctttgatgcctatgtcttcaattaacataaagtgtccaaactgcgagtctcccgtatga

SEQ ID NO: 197172 - DNA, 2208 bp, Klebsiella oxytoca
atggctttagaacaagttatctacaaccttgaagaggttaaagggctctctgatgaagagctttaccaacgcctttatgatagttggggcttggaaaatcataaaattgatgtctggggtgaactgagtattaacgaggcagggaactgggctggtatccgtaacgcaaaaactcttagtggcaaccaaagcatagaataccctctggctgattcgcatgaattgcaatcaggtgtgtttttaaccccatcagtagcaaaaatagtgttaggcaatgacactaaagggatggttgcttgtgaactgatgttagcatccatcccgcaaagagctaaaaaaaacaacccatttctattagccgtcaatgataagacggttgagcgtttgacctatctgcccgatgcattacctaatttagatcggcaagccctaattcaaaatgaagatgaaacactgctacgcaaagttatttatgacgcagaagtaaagcgcgttaaacataaaatcgcctcagaaacagaagcgttagaggcagcgttgcaagaaaaacaacaggatatgactgacaagttggcggagttgtcagacgcattcaaaagtacacaggataaaatcacagcatcaacgacagagcttgaaagctcaatcaagagaaatgaagaactaaataatgataatcatcggctaaatctgaagattcaggaaagcaaatctgagttagacgtcattatcgaaaagagccgaaaagtagaggaaagtatggcaagaaaagtcgagaaactaacagatttcatcaaagagaaagccatcttcctgaagagttttgagtttttggatgaggaagatttcgacttttttgttggaagccccttgtctaataaggagcgtggtgaacatatctctttttcacaagccctttattcaaactacagcgatgcagtttcttacattcaagcgtacctcaaagaacgagacatcctgtaccctcgccatattatcgagaacttcctaacgcttattcgcaccaatgatctcatcattctggcgggggactcaggctcaggcaaaacaaacctggttcagtcgtttgccaaggctattggtggggtatctaagatcattccggttaagcctaactggactagttcagaagatttgctgggctattacaatcccctagagaagaaatatttggcgacaccatttcttgaggcattgatcgaggctaagcaaaacccagatatcccatacttcatctgtttagacgaaatgaaccttgcccgagtggaatattactttgccgactttctttctaagctagaggagcgtaacgagcaaccgaccattcaactttactcggatgatgaagctgcacacgttcttgccgagctaaaaggggttgtttctgtcatttctaacgcgcaagaaaagttcagcaaaaatggcatcgtggacttcgttgcgctcatgcaagatgaagaaattaacgctgaaatgaagcgcgcgtttggctttagcgataaagactcactgattaaataccacggtgatatcagacgtatgttggcaggtgttctcggcacgccttcgtcaatcacgattccagcgaacgtaagaattattggtgctatcaacatcgacgaaacaacccattacctctcaccaaaaatacttgatcgtgcacacgtgatgaagttcaagagtcctttgctgaccgactgggatgctatttttgatgagattgactcttacgggctcgacgacgttactttaccgctagtgtttgatattgaagagcttggtgagcgtaccccttatccgaaatttgaacgtttgaatgaattctgcgagttatttacgactttaaaccgcgatgttttcgacccgcttggcgtggaatttggtatgcgaactattcgacaagggcttaactatgtaagtttatttagcgatgtaaacgataataagtctctggccatcaacaactttatcgttcataaggtgctaccaaaattcacatttgatggcgataagcaagtgggtgattacagtaaagctgagcttgttagccgtgtattcttacctcgccttgagtcgctgctggacaaccaagtagaaatagcggcggagttttcatgcaccaaatcgatagagcgtttagttaaaacggctgaatcgaatgatggcgttgtgaactactgggcgtaa

SEQ ID NO: 197173 - DNA, 294 bp, Klebsiella oxytoca; identical to SEQ ID NO: 144502

SEQ ID NO: 197174 - DNA, 939 bp, Klebsiella oxytoca; identical to SEQ ID NO: 144501

SEQ ID NO: 197175 - DNA, 516 bp, Klebsiella oxytoca; identical to SEQ ID NO: 144500

SEQ ID NO: 197176 - DNA, 1428 bp, Klebsiella oxytoca; identical to SEQ ID NO: 144499

SEQ ID NO: 197177 - DNA, 168 bp, Klebsiella oxytoca; identical to SEQ ID NO: 144498

SEQ ID NO: 197178 - DNA, 1320 bp, Klebsiella oxytoca; identical to SEQ ID NO: 144497

SEQ ID NO: 197179 - DNA, 1221 bp, Klebsiella oxytoca; identical to SEQ ID NO: 144496

SEQ ID NO: 197180 - DNA, 813 bp, Klebsiella oxytoca
atgagcatgaattcgcagccggaactgaagttgagtacccgtaccgaacaactcgccagtagtcgtgatgccgctatgcaaaaatttctggacggcatgacgctgattgccgaagcctcagcaatttgcgggttttcactgtttaacagcaaaattatggcccctaatgcttttggccttcctgcgtccctggccgcaagcatcgaggaagggcgacagcaaatagaccgtaagacatggaacaatctttttgaagaaacgggtattgaccgattctggaatcacaaccagcgggcagagttccgtgagtctctccggaacgctccgccaattgcgtcgttaaccgtaatccgcagtacattgcgccaggcagttgccatgcgcagcattacacttgctgaagggtttgttgatctgctatgccagcttgatcgccggtataaaactaatgcccagcaatttgtgatgccaaaaaaactggtactacgcggcatttttcccgactcgaacatgctgagatataatggcttttctcaggataatctcttctatttaaacgactttgagaatatcgtttgcatctgctccaatgcagcaacaccgcctgtcggcagtggaatgaacatgtacgatcggcttgctgtcttacggaaaaccgattttacgggtgacattaccgacccgaagggctggaagtgccgattgttcgaaaatggtaacgtccatatctcagttgagtgtgaaagcctgcataacgcactgaatgacctgattagcatttattttgccaaccagatcccggccaaaggataa

SEQ ID NO: 197181 - DNA, 612 bp, Klebsiella oxytoca
atgtataatgggatagttgttcgggcctcctctttggtcgttatcacggatgaggggctgttacgactgatagacagtgattgcacacattgggctaagggcaacaaaatgacggcgtcgcgaattacacacctaataacgtcctgtaccaaaggtaagcacttccagtgcggctcccgtgcggaactgagcatccgggccggagagacacctgaagaggctatggccagttgggcagcgaccataagacggtcgcaaagtgcatcaccggtacccgccctatcgctctatactgggaatcactggtcaacggcaaaagagattttacggacgacggaaaacctggagttgtgggtgatctctgccgggttgggttttttgaatagtcgggacctcgtcgacgtatatgaagccacctttcataatttaccgttcagtcaccgccattggtggcgggaattaacaaatacattcgggaaggaaagatcggagaattccatagggacgttaatggaagccaggcctactgatgattacgtgatcgctgcctccccagtttatatcgctgcggttgaggacgatatcctggcaggagtaggtaaaggggtttga

SEQ ID NO: 197182 - DNA, 909 bp, Klebsiella oxytoca
atggatgtgcgaggcccctttgatctggaaagcaacgaattgctggtctgggagatcgaaaagcttcaggggctccggtttagccatcgcggtgatatttttttccatcaccctgctctcaagttacctgtcaggggagagaacacaggctgtgtatccgtgccatcgggagcgaaagagttggaggtggatgctgacgaagagccgactgctgccaaggagcagaggttgattcatcagcccgttgagggagtcacgtttgatgctcagctgcacaccaagatcgcctacaacggggagcgtgccaacggtcatggcaagaaggtcgacgacgagcaatgcccgagcagagaaagccaactcttcggcgtggctgatcctgtgagcgagggcagcatagcgtcaggagaattccaacaattgggtgagggagagggtgatggggacgagcatgaacggcttgcagatcgcttctcgctgctccgagagattcttgaacaaatcacccaagagtctggagttgcgctggtagcactggaagtgaggcctcagccgcccgttccacgttgcagctacctcatgattgagcacgaaaaatcacgctgttatctgctggcaaggttcaagctgcaaaacggcgatcaacgctaccttctagaaatagatacctcagacaaccggaagaccatgtcaacgaggatcatgggcttcaaagcaggtgttaaggcaggaaaatgcatagacaggatcttaagggagacagtgaaaagctcgttgcgttggccaggcaccatggcgaagtactgtgagcctttgcactctgcgcatcacccgaaagaaagctcatctggggccaaccatgcccgggtgttcgaccggaagcagcggatacacgcggctctaggctga

SEQ ID NO: 197183 - DNA, 231 bp, Klebsiella oxytoca
gtgaccaatgctgtcgttctctggaataccatctacatgcaggctgcactggatcatttacgtaacgaaggcgaaaccataaatgaagaggatgaagccagactttcgccactgagacacgcgcatttcaacatgctggggcattacacgttcacacttgcggagcaggtaacaaaaggccagctaaggccactgaagcaagcggaagaaacggacgaatggcctctgtaa

SEQ ID NO: 197184 - DNA, 195 bp, Klebsiella oxytoca
atgagtggcgtggatcaggcaccagcgcgaatccacgggaagatggttgtacagccactccaccgggcgctcgccggaccaggccaggcagtcatccacctctttttgctgttcagcaatatgaatatgaatcggctgctggccaggatggcaggccagaatggcgccaatctgctccggcgtaacggcccgtaa

SEQ ID NO: 197185 - DNA, 762 bp, Klebsiella oxytoca
atggcgcgtaacgacctgtcaaattcggattccatggatgagttacttgaacatcccgcccccttttatgaaagggtaaaggccatgatcaaaaccaagatccactgcggggcatggcccgctaattaccgtgttccttctgaaagcgagctggtcacgctgtttggctatagcagaatgacgattaaccgcgcgttgcgagaactgaccgcggagggcttgctggtgcggatgcagggggtcggtacttttgtcgccgaaatccgcggccagtcggcgctgctggacattaacaatatcgctgacgaaatcgccagccgtggccatcgccaccacgccagagtcttcagactgacggaaatcgaagccgatgcccagcaggcgttcagctttggcatgcagcagggttgcggtctgtaccattcgctgatttgccattatgaaaatggcgtaccggttatgctggaagaccgactggtgaatatgcaggttgtgcctgactacctgcagcaggattttacacgtatcacgccgaacgcctatctctcctcaattgcgccgattgttgaaggcgaacacgttattgaagcggtcaacgtcacgcgggccgagtgtgtttacctggaaattgatgaacatacgccttgtctgctggtcaatcgtcggacgtggaccggccgtcaggagaagaaaatcgtcaccagcgtgcgcctggtctatcccggtccgcgttaccgcctagaagggagcatgcgcaaatga

SEQ ID NO: 197186 - DNA, 558 bp, Klebsiella oxytoca
atgatccgtctgctccctgccgggttgtatacggaaatgccctggaaaaacggccagggcgtgacgcgcgaagtggcccgctatccggaagcgggggaatatgactggcgtatatccctggcgaccattcgccagcctggtccgttctccgcatttcccggctacctgcgcaatatcagcgtgctggaaggcggcgggatgtacctgacaatcgatgggcagcgcagcgcattgattgcgccattccaggcgctggggtttaacggcgcgagcggcgtatcctgtgagattgtcggcggcccgctgctggattttaatgtgatttaccgggaagcagctctgcgggcgacggtgagctggtgcggggcgggaacgtggtcgcatcagggcggactacggatattgtttaatgccgggcccgcgttgcgggtgcgcgtcggcgaccaacgctatttactggaacattacgacagcctgctggtggatgaagcggtggcgctggttatcccggactctccgggcgcgcgtctggcccgcatcacgctgattcccctttaa

SEQ ID NO: 197187 - DNA, 1533 bp, Klebsiella oxytoca
atgacaacgccactgaacgacagcattaccctcgggcaggcgccgggtactgtggatgagatagtgcggattgccgacggcgcgccgatcgcgctggagaaggccgcgctggataatatggcgcgggtcagcagccgtattcagcgcgccattgaacaaggccagacgatctacgggctgacgaccggcgtcggcgatctggtcaccacccggctttctccggacaggatgacggatactcagctgaatatgctgcgcagccacgcctgcggagtcggtccggacctgacggtgcgtgaagtgcgggccatgatggcggtgacgttaaaatccctgctgcagggatacagcggcgtcaccccggcgctggcgcagcgtatcgccgatatgttgaaccgtcaggtcacgccgtggtcacccgccggcggctccgtcggttacctgattgccaccgcccatataggccttgcggtcttcggcgagggcaaatgctggtatcagggagaactgctgccggcgcaacaggcgctgacgcgggcaggtatcccgccctatgttcccggccccagagagggtcacgcgttggtcggcggcacctatgagatcaccgcggtgggctgcctggccgtggcggatttccagcgtctgctccccgtcgccgatatggcgggcgggatgtgcctcgaggccatgcggggcaatacgcgcggctacgatgcccgcctgcacgccctgcgccctcatcccggacagcaggaaaccgcgcaaaacctgcgccgcctgctgaaaggcagcgagatcctggcgcgttatcgcgaccaccgggttcaggacgcgctgagtttacgctgtatcccccagatccacgacgcggtgcgcgaccagctggcccactgtcggcagattatgaccatcgaactcaattcggtgaccgataacccgctgtttctggtagaagaagacaggcttatcgtgatgccagggggcaacggtcacggtgcgccaacggcgctggcgctggatgcgctggccgttgcgattgcccagttgagcaccgcttcccaggcccgttgcgaccgaataaccaatacgcatctcagcgggctgccggcctttcttatctcgccggattcggggtactccgggatgatgatcccaccctacgtcgccgctgcgctggcgggcgataaccgcagtctggccggcccggccagtatccacacggtatccacctgcgccggtcaggaagatcatgtcagcatgggggttgccgccgcacgtaaagcgcttaaggcggtagaaaacgccgtggacatcgtcgccatcgaactgctgtgcgcctgtcaggcgctggagttccatcgcccgctgcgtgccgccgtgggcagcgaggcgacgctggagagagtgcgtcaggcggtgccgttccgggataaagatacgctgctctaccccgatatacatgcgctacgcgccctgattaatcagggcgaactcagcgcgatgctgcaggtattgtgcgaagaggagtga

SEQ ID NO: 197188 - DNA, 876 bp, Klebsiella oxytoca
atgaatatgaaaaaacgtattttgacgctgtgttcagcgctgctgctgtcggcgacctcatcggcctgggccgcgccgaaagtcattgtcggttctgcagacttcccggaaagccaactgctgggcaccatttatgcgggtgcgttagaagcgcaaaacatcccggtggagaaaaagctgaacatcggcagccgcgaagtgtatatcccggcgctgctggacggttccatcacgctgatcccggaatacagcggcgcgctgttgagctatctggatgcgaaaaatgcggcacacggtagtgaggacgtcgccagagagctggccgctaagctgccggagaaagttaaaatgctgcagatctcccaggctcaggatatcgacgttctggccgtgacgcagaaaaccgccgataaatataaactgaaaaccatcgccgatttacagcctgttgccagccagctggtgctgggcggcccggcggaatggaaaacccgccatgaggggctctccggcctgcgcgacgtgtacggcctgaactttaagaattttaaagtgctggacgtcggcgggccgctgacgctcagcgccatgaaaaataaccaggtccaggtcgccgatctgctttcaacctcgccagcaatcaaaaaagatcgccttgtcgtgctggaagacacaaaacatctgttcgcggcgcaaaatattgtgccaatcgtcgccagtgaagcgctgaatgacgccgtaaccaccacgctgaacaaagtctctgctcagctaacgactgaagatctgatcgacatgaacgagaaaattgccgaatttgtcagcatcgacgatatcgcgcatcagtggctggtaaaacacggatttagccaataa

SEQ ID NO: 197189 - DNA, 681 bp, Klebsiella oxytoca
atgcttacctggtttatggatcccatccactggtttggtgagggaggcattttcccccttctggcgcagcacatcagctatagcgctgtcgctctggcgatcgcctttatcatcgcgtttcccgtcggctgctacaccggccataccggcaaaggggaaggcctgctcatcggtaccaccaacgccctgcgctccctgccctcatttgggctgattattctgctggtgattttactttccggcgagtttgagtccgatatggcctttattctgccctgtattctggtgctggtggcgctggcgctcccgccgattgcgctgggtgtgcatgcgggtattcgcgcgctcgatccctatgtccttgatgccgctcgcggcatggggatgacgcggctgcagatcctgctacaggtggagttgccctgcgcgcttccgctgatcctctccggcgtgcgcagcgccacgttgcagattatttccaccgccaccatcgcagcctatgtctcgctggggggattcggacgtctgattattgacggacgcgcggcgaacgatttcagccagatgatcgccggcgccatgctggtggcgctactggctttactgatcgactgcttgttctctttctcgcaaaaaatagtcgtttcacccggtattacccggcgtattaaaaacccataa

SEQ ID NO: 197190 - DNA, 645 bp, Klebsiella oxytoca
atgagattcgattggctatgggcgcagagcgataaaatcttcaacctgtttctctggcacagctatctcgcaattgtgccggtagtgatagggttaattctggcgatccctgtcggctggggcattcaccacctgccatcggtcaagtcggcgatcgttaacctgtttggcctgctgtataccattccgtcactggcgctgtttgtgctgctgcccccgctgctccacacgcagattctggaccccattaatgttgtggtcgcactgaccatctacagctttgcgctactggttcgcacagtctgcgacgggctggactccgtatcggccgatacccgtcagtccgcggcagcgctcgggtataaacccgctcagcagtttttccagatcgacctgccgctggccgtgccggtgattggttccggcctgcgcgttgccgtggtgtctaacgtcagtatcgtttccgtcgcggcattaatcggcgcaccgcagctcggctcgctgtttaccctgggcttccagctgcaatttctgactcccgtcatcgccgggatcgcgctcagcatcattctggcgctgctgctggatatgctggtggtttacgtcactcgtcaactcagccgctggcaacctcagagaggataa

SEQ ID NO: 197191 - DNA, 1098 bp, Klebsiella oxytoca
atgattaccttccagaatgtgactaagcactacgacaacggttcggtcgtagtagatggccttagcctggtagcgccgggtggcaaaattacggtatttgtcggcccttcgggctgtggaaaaaccacctcattgcggatgattaaccggttagtggaaccgtcatcgggccggatcctgcttaacggcgaagccaccgagcaaatggatatcgtgcaactgcgccgccgtattggctatgtcattcaaaatgcaggtttattcccccacaaaaacattatcgataacattgccaccaccgcgattctcaacggcgccgccaaaagtaaagccagagccagagccggggaattactggaggtcgtcggtctggatccgcaaatcgccaaacgcttcccctggcagctttccggaggccagcagcagcgcgtgggcgttgcccgcgctctggcggcagacccggagtttatgttgatggacgaaccgttcagcgcggtcgacccggtagtccgcgaacagctgcaggaagagtttttgcgtattcagaaagaggtgagcaaaaccatcattatggtcactcacgatattgatgaagccatgaagctcggcgacctggtcgcagtacttaaacctggcggcaagctggcgcagatggcctctccaggcgaactgctcaatacgccgcaaaacgcctttgtggcggactttatcggcaaagacagaggctatcgcaaactgagtttccacgccgccgacacagaaaccgggttacgcaacgagccctatgccgagctggactgttccttcgagcaggccagagagatggccatcgaccgctggctgctggttacccaaaacggcaaagcgtttggctggttcgacacccaccagccggcaacagcgattacccacgacaacatcaatctgggggcgacgttccaccagcaggggagcccgttgcgccatttgctggacgctgcgctgagctctcccaaccaccgggccgtgatcgttgatgaacagcaaatcccgcaggggaccatccacctcgatcaagtactcgacatgtgtaaattcacgcgccaggagggagcatga

SEQ ID NO: 197192 - DNA, 288 bp, Klebsiella oxytoca; identical to SEQ ID NO: 182627

SEQ ID NO: 197193 - DNA, 606 bp, Klebsiella oxytoca; identical to SEQ ID NO: 105661

SEQ ID NO: 197194 - DNA, 282 bp, Klebsiella oxytoca; identical to SEQ ID NO: 31769

SEQ ID NO: 197195 - DNA, 177 bp, Klebsiella oxytoca; identical to SEQ ID NO: 105663

SEQ ID NO: 197196 - DNA, 312 bp, Klebsiella oxytoca; identical to SEQ ID NO: 105664

SEQ ID NO: 197197 - DNA, 201 bp, Klebsiella oxytoca; identical to SEQ ID NO: 105665

SEQ ID NO: 197198 - DNA, 225 bp, Klebsiella oxytoca; identical to SEQ ID NO: 105666

SEQ ID NO: 197199 - DNA, 204 bp, Klebsiella oxytoca; identical to SEQ ID NO: 105667

SEQ ID NO: 197200 - DNA, 492 bp, Klebsiella oxytoca; identical to SEQ ID NO: 105668

SEQ ID NO: 197201 - DNA, 312 bp, Klebsiella oxytoca; identical to SEQ ID NO: 105669

SEQ ID NO: 197202 - DNA, 321 bp, Klebsiella oxytoca; identical to SEQ ID NO: 31768

SEQ ID NO: 197203 - DNA, 228 bp, Klebsiella oxytoca; identical to SEQ ID NO: 105671

SEQ ID NO: 197204 - DNA, 891 bp, Klebsiella oxytoca; identical to SEQ ID NO: 105672

SEQ ID NO: 197205 - DNA, 219 bp, Klebsiella oxytoca; identical to SEQ ID NO: 105673

SEQ ID NO: 197206 - DNA, 1542 bp, Klebsiella oxytoca; identical to SEQ ID NO: 30088

SEQ ID NO: 197207 - DNA, 501 bp, Klebsiella oxytoca; identical to SEQ ID NO: 105788

SEQ ID NO: 197208 - DNA, 570 bp, Klebsiella oxytoca; identical to SEQ ID NO: 34949

SEQ ID NO: 197209 - DNA, 669 bp, Klebsiella oxytoca; identical to SEQ ID NO: 36186

SEQ ID NO: 197210 - DNA, 873 bp, Klebsiella oxytoca
atgcagcttcttttcgtgaaatctgagtctactttcacctattttgaagcgacccggggctatattgaaaaacatggcaagccgctggcactgtacagcgacaaagccagtgtattcaggatcaacaataaaaacgcaaccggcggcgacggcgatacccagtttggccgtgcgatgcatgaactgaacattcagaccatttgtgcagaaaccagtgctgccaaaggccgcgttgaacgggcgcacctaacgcttcaggaccgcctggtcaaggagctcaggctccagggtatcagttccatggaagctgcgaacgcatttgccgaagagttcatgaacgattacaaccgtcgtttcgcaaaagcgcctcgccaggcgtttgatgttcatcgggaactggatgtcgatgatgatcttgatatggtatttaactggcgtgaagctcgtaaagtgtcgaaatcactcacagtgcagtacgacaaagtcctttatctgattgaagacagcgaattcagtcgtcgggcgattggtaaatacatcgatgtctggcattacccggatggacataaagagctccggcttaatggcgtgtcacttccctactccacctatgacaagctttctgaaatcgatcagggggccattgtggacaacaaacgtctggggcgggccctggaaatggcgcagctggtccaggccgagcgggataataaccggtcgcagtccgttccatccggcgacggtccttcacgcaggcgtaaagcccccacaacgaagaaatctcagcgctcccttgatcaggacgatatgttcaatgccctggtgaaacttcagtcacgctctgaagagatatttggaaagaaaccgatttaa

SEQ ID NO: 197211 - DNA, 705 bp, Klebsiella oxytoca; identical to SEQ ID NO: 105724

SEQ ID NO: 197212 - DNA, 492 bp, Klebsiella oxytoca; identical to SEQ ID NO: 15993

SEQ ID NO: 197213 - DNA, 738 bp, Klebsiella oxytoca; identical to SEQ ID NO: 118601

SEQ ID NO: 197214 - DNA, 225 bp, Klebsiella oxytoca; identical to SEQ ID NO: 13704

SEQ ID NO: 197215 - DNA, 177 bp, Klebsiella oxytoca; identical to SEQ ID NO: 21678

SEQ ID NO: 197216 - DNA, 444 bp, Klebsiella oxytoca; identical to SEQ ID NO: 127110

SEQ ID NO: 197217 - DNA, 540 bp, Klebsiella oxytoca; identical to SEQ ID NO: 127111

SEQ ID NO: 197218 - DNA, 705 bp, Klebsiella oxytoca; identical to SEQ ID NO: 127112

SEQ ID NO: 197219 - DNA, 969 bp, Klebsiella oxytoca; identical to SEQ ID NO: 127113

SEQ ID NO: 197220 - DNA, 573 bp, Klebsiella oxytoca; identical to SEQ ID NO: 127114

SEQ ID NO: 197221 - DNA, 450 bp, Klebsiella oxytoca
atggactggaacaaggaccacatacgagaaactatgctcttgctggagacagcagcgttgcacagcgctcgcgaaaactacctggactatgtctctaccgctcggctcgatcggagcgaaccgatcgaaaacgacgaactagctcaggccgaggtcgcgagcgacttcgctgaagcgctcgatgacacgctccatgactacgccaataaactcgaaaagctcaggacgatcgatttcggccccaagttggccgtcaacgaaggcgctgtcgtcaagctgtccggccgccactttgtgatcgcggtgtcaacgagcaagtttacctgtcaggggcgtgagctcatgggcatttccacgatggcgccgatcttcgaagcgatcgagggtgcccgagccggggagaccgtgcagttcaacggccgggacctcaccgtagaagacgtggaataa

SEQ ID NO: 197222 - DNA, 402 bp, Klebsiella oxytoca; identical to SEQ ID NO: 130533

SEQ ID NO: 197223 - DNA, 828 bp, Klebsiella oxytoca
atgggctcatgggcaatcgggcaggcgttactcaacatcgcaccgcccgccgacgtgacattgttcctcatcgtgtcgctgctgatatcagcggcggtggttccgatcaccttgctgcccagtcatccgccggcccaggtggaacaggaatgggtcgcgttcagggacctcgtcctcgtatcacctctcgctgcggctggcgctttcctggccggcctggctatcggtggtttctggggcatgggcgcgaacttcgcccagagcatcggcctcgatgtgggcggtatctccgccttcatggctgcggttcttggtggaacgctcgccttccattggccactcggttggctttcggatcgagtgccccggaatcttgtcatcgccggtgcggcgctggcgtccgcagcgtctgccatcggcgtagcgttggcggtggaagcgcctctgccgctgctccttgcggcaggtgcgctgttcggcggctttggcatcccgatttattcgttgtgtctcgccgtcgcaaacgacgatcttccggccggtcggctactcggcaccgcgcgcgggcttctgttgctcaacgggatcgggacagccgctggccccctaataggagcagctgcaatgaatatcgtcggccctggcggcctgttcctttatgcggcggcgttgctcacgctcctggcagtgctggccatcgcccgcaggcagccgaggcgcgccaaccaggccaaggcggccccccgttctccgagcacgccgatgataaccggatctctcgatacgatgatatgcatggagaagcgggcgcagggcgtgcgggattag

SEQ ID NO: 197224 - DNA, 144 bp, Klebsiella oxytoca
atgtatatcggtttgccaaattcagacctgagtaaggaggcctataccttcactaatctggtcattaagccattgatggaatatacacgctggatacatcttttacctgcgtcggctttgttgaataaatcgaacttttgctga

SEQ ID NO: 197225 - DNA, 408 bp, Klebsiella oxytoca
atgtcagattctcttcgtccccgcagggttcgtgcgtcttactccatggactttaaactggaacttgtcgaaaaatcttatcagcctggagcctgcgtggcccaactggccagagaacacgggattaatgacaatctgttgtttacatggcgccagcgctacagccaccttttgcccgatgaaatacaacgttcagtcagtaaacctgatgctgtcatccctgttgtggtatctgacatgtccctgtcacatcatgcagtaccacactatgaaccatccggttccgcttacggtgaggtgatgacctgcgaagtggctgtcgggagcgccagtctgcgcctgacagggaacttatctcccgctatcctgaaaacactgcttcgcgaactgaccgggaggggacgatga

SEQ ID NO: 197226 - DNA, 330 bp, Klebsiella oxytoca
atgagcgaacagcctgaaatgcgcagcatccagccggttcacgtctgggataactaccgctttacccggtttgagtttccggccaatgcggagttaccgcaggtctacatgatctcggccagtggcaaagaaacgctgcctaactctcatgttgtgggtgagaaccgcaacatcatcgaggtggaaaccgtcgctaaagagtggcgtattcgtctgggcgataaagtcgttggcgttcgtaataataatttcgcgccgggcgccggtgcggtagcaaccggtacggcttccccggatgtgcgcagggttcaaattggggaggataactga

SEQ ID NO: 197227 - DNA, 861 bp, Klebsiella oxytoca; identical to SEQ ID NO: 49918

SEQ ID NO: 197228 - DNA, 762 bp, Klebsiella oxytoca; identical to SEQ ID NO: 49919

SEQ ID NO: 197229 - DNA, 903 bp, Klebsiella oxytoca; identical to SEQ ID NO: 30075

SEQ ID NO: 197230 - DNA, 633 bp, Klebsiella oxytoca; identical to SEQ ID NO: 30074

SEQ ID NO: 197231 - DNA, 342 bp, Klebsiella oxytoca; identical to SEQ ID NO: 16817

SEQ ID NO: 197232 - DNA, 792 bp, Klebsiella oxytoca; identical to SEQ ID NO: 118652

SEQ ID NO: 197233 - DNA, 267 bp, Klebsiella oxytoca; identical to SEQ ID NO: 180228

SEQ ID NO: 197234 - DNA, 195 bp, Klebsiella oxytoca; identical to SEQ ID NO: 118669

SEQ ID NO: 197235 - DNA, 312 bp, Klebsiella oxytoca; identical to SEQ ID NO: 118668

SEQ ID NO: 197236 - DNA, 240 bp, Klebsiella oxytoca; identical to SEQ ID NO: 118667

SEQ ID NO: 197237 - DNA, 1467 bp, Klebsiella oxytoca
atgatcagaattatagggtgctcattttgcacagcagtaggggttgaccattcaatggaaacgctccttcgaactgacccggagaaatacggttatcaggctggcctgagtcgtcttcagcgatttctttctaagatccagtacgactggagcctgcgggattatatcggtcgtaaagtgttcgaaggcggatatgtgcgtcttcaacccaatatcttttcttcgtccctgactgaacgtctttttcatgcctgttgcagccttgattatgttgaagcaagacgtgcggcagagcatcgcagaaagctactttccggcgaggttgacgatacggcttataaccgtcgtatggctgagccacaatttcggcttgtacaggaagcaaacgtgatccacgttgatttcctctggtcgttgcactgtttcaaccctcgcccgtttcgggcaattgagatctatcgcagggtctgggaagaggccgatctggaccttcttgaggatgagcctgacatgcagcctgtgccccgtacaccaatgccagctccactctggatgaaactgcccggaggccggttcggtacagcttatgatggactgactgatacgttgccgctgatgacctattttgacgggcaggctgaccccagggcttcacgtagcctaaagaccggagagagcagttctgtcgtcgtggcattcgaggaagaggatgagctgactgttgaagaagatacggcgtcctggattatctggcatgaatacgacgggttacgccagcgcatcgctgacggtgagtttactccaacgactgctgctcagtatcttcttcgttatggcgcggtccgaatttcaaaaggcaagggcgctgtctatcatcgtctcgcacagcggggacaaaccttttcccgcctggggataggcgacagagtgtcgcttccagagctggttgccagtcggcgttttaaaatactcagtgattctgcataccgtcaggttgtagcccggaaattgcgtggacagataaaaaagttcagattctgggcatgcgtagctgcctgtgttcagttgcacgtacacaacaagacggcactcggagaaagaattttaacgttactcgaaggtgagagggaacagcaacaaggtgcgatccaggcgaagctgaaggcgggaatgatggatgcagttctaactctgtgtaaccagcgactccgggtgaaagaaaatactaaccagccagaggagttccgctattaccgtgccgtaagagctcgtttcatgcgccatttatctgaatgccttaagccagaaaatggcggcgttatccgtgacgttatctgggaactgagggtgctgagcagtgctcacggtacgaccaaaacaggtttttactatgtcgatagcaatcgcccgacagcgaaaggactgttaaaccgccttctgatgaggatggtcaagcaggtcgtataa

SEQ ID NO: 197238 - DNA, 1110 bp, Klebsiella oxytoca; identical to SEQ ID NO: 95539

SEQ ID NO: 197239 - DNA, 1185 bp, Klebsiella oxytoca; identical to SEQ ID NO: 16006

SEQ ID NO: 197240 - DNA, 657 bp, Klebsiella oxytoca; identical to SEQ ID NO: 16007

SEQ ID NO: 197241 - DNA, 210 bp, Klebsiella oxytoca; identical to SEQ ID NO: 129780

SEQ ID NO: 197242 - DNA, 741 bp, Klebsiella oxytoca; identical to SEQ ID NO: 32313

SEQ ID NO: 197243 - DNA, 1524 bp, Klebsiella oxytoca; identical to SEQ ID NO: 32314

SEQ ID NO: 197244 - DNA, 129 bp, Klebsiella oxytoca
atgcgaacgacaagtatcaccctgtgtctggttttggcgagttttggtgtatccgcaaaatccttgcagacccagaccttacttaccaggcaaataaaacgtgtgctaaacgagatgtactggaactga

SEQ ID NO: 197245 - DNA, 318 bp, Klebsiella oxytoca; identical to SEQ ID NO: 31740

SEQ ID NO: 197246 - DNA, 306 bp, Klebsiella oxytoca; identical to SEQ ID NO: 105758

SEQ ID NO: 197247 - DNA, 672 bp, Klebsiella oxytoca; identical to SEQ ID NO: 105759

SEQ ID NO: 197248 - DNA, 177 bp, Klebsiella oxytoca; identical to SEQ ID NO: 31741

SEQ ID NO: 197249 - DNA, 408 bp, Klebsiella oxytoca; identical to SEQ ID NO: 105761

SEQ ID NO: 197250 - DNA, 414 bp, Klebsiella oxytoca
atgtcagacgaagtagtaaagccagggaatgaagaggctcttagtccaaaccagtctctgtcagaggcaataaaagataaaatttttaataaaatatatttttatattttagtttctttcctgttggtaaactggcaggagatattaatcctattcaaatcaagtgaagatattttttatacattgtctattatcttcacaagccaagtgtggttcggctacatgctcccgccttggtttgcacatttcggcgtgccaatcctatttggcacccttgcatcagctttaactccttatgtaacatattggatttctagggttacggcaaaagagtttgctaaaattaggcgtgcagatagaaaagccgatcttgaggttgaagatgaatttcaagacttgcgaaggctttgttga

SEQ ID NO: 197251 - DNA, 1620 bp, Klebsiella oxytoca; identical to SEQ ID NO: 105781

SEQ ID NO: 197252 - DNA, 477 bp, Klebsiella oxytoca; identical to SEQ ID NO: 32316

SEQ ID NO: 197253 - DNA, 789 bp, Klebsiella oxytoca; identical to SEQ ID NO: 118082

SEQ ID NO: 197254 - DNA, 261 bp, Klebsiella oxytoca; identical to SEQ ID NO: 31765

SEQ ID NO: 197255 - DNA, 354 bp, Klebsiella oxytoca; identical to SEQ ID NO: 118080

SEQ ID NO: 197256 - DNA, 159 bp, Klebsiella oxytoca
atggcgctgaccgtggcggctgaacgctatcagcgatacggatttaaaaagctttttcaggtcctttgcaggcagggcaacgcctggaaccataagcgcgttcaccggatttactgcctgctgaaactgaaagaagtgaaactctcaggattcgaatga

SEQ ID NO: 197257 - DNA, 801 bp, Klebsiella oxytoca
atggaagagtttctggaaggggcccaagagattgaacgagagtttcaggcaggtattcaaaacgttgtagacaattatgagatgcatattgaggctgaaaaaaatagaagcccaagaatgtcttctttgattgatcagttgaaattaactaaagatgatttcataaaatcctttagatttaatattgctcactttattccttttacgcctattagcgttgaaggtgatgaaacccaggactactatcaggaacaattgataacagatctggcagaagaagcaatgagggtttatgaaaaaattagtaaaaataataatttgcgctcaagtactattgaccgactgaagcaaatgcaaaataagatcattagcttcatgtttatacataaagaggcggcagtacttgcagaagctataaaacacataatgaataatttacctaaaggtgccatttctgaacctcgcgacgttgcggtgttacagcagtggttttatttcatgagtgatgcttcaatgttaaagcgtattatttcaggagagcaaaaggttactgactggttggaatctattaccagatcatttaatcaaagctcacaaacagaaccgaacgcgctacagaacacaggtattgaagctattttagattcaacaaatgtgtttcaggttgaacctgtcgtagagaacgatataaaaaacagcacgttttcaaacactgattctgtagctgaacctgagaaatcagtttcgcaacaggaagacaatgctgaaaatggttttgatatcgagctcaaaggctggtaa

SEQ ID NO: 197258 - DNA, 201 bp, Klebsiella oxytoca; identical to SEQ ID NO: 31764

SEQ ID NO: 197259 - DNA, 876 bp, Klebsiella oxytoca; identical to SEQ ID NO: 32315

SEQ ID NO: 197260 - DNA, 261 bp, Klebsiella oxytoca; identical to SEQ ID NO: 105801

SEQ ID NO: 197261 - DNA, 642 bp, Klebsiella oxytoca; identical to SEQ ID NO: 105789

SEQ ID NO: 197262 - DNA, 501 bp, Klebsiella oxytoca; identical to SEQ ID NO: 38943

SEQ ID NO: 197263 - DNA, 921 bp, Klebsiella oxytoca; identical to SEQ ID NO: 118119

SEQ ID NO: 197264 - DNA, 270 bp, Klebsiella oxytoca
atgtcccagcatgttgatatgaccgtgcatcagaggcgaaagccgcgcgatatgttcatcctctggcccttccccgatgctgcgcaggtgcgacaaggcttcctgcatataaagcgtattccacagcaccactgcgtttgtcaccagacccagcgcacccaactgatcttcctgcccctcgcggtaacgttttctgatctcgccacgctgaccgtagcagatggctcttgcaacggcatggcggccttcaccccggttcaactgtgttag

SEQ ID NO: 197265 - DNA, 363 bp, Klebsiella oxytoca
gtggaactgcgccgccgcgtgcatgccggcctgaacaagggcgaggcgcgcaatgcgctggccagggcagtgtttttcaaccgcctgggtgaaatccgcgaccgcagtttcgagcagcagcgctaccgggctagcggcctcaatctggtaacggctgccgtcgtgttgtggaacacggtctatctggaacgggctgcgcacgcgctgcgtggcaacggccatgccgttgatgacgcgctgttgcagtacctgtcgccgctcggttgggagcacatcaacctcaccggcgattacctctggcgcagcagcgccaagatcggcgcgggcaagttcaggccgctacgaccgctgcaaccggcttag

SEQ ID NO: 197266 - DNA, 345 bp, Klebsiella oxytoca
gtgcatgccgggctgaacaaaggcgaggcgcgcaacgcgctggcccgcgccgtgttcttcaaccgcctgggggaaatccgcgaccgcagcttcgagcagcagcgctaccgggccagcggcctcaacctggtgacggcggccatcgtgctatggaacacggtctatctggagcgggccgcgaacgccttgcgtggccacggtcaagccgtcgatgacggcctgttgcagtacctgtcgccgctcggctgggagcacatcaacctgaccggcgattacctctggcgcagcagcgccaagatcggcgcgggcaagttcaggccgctacggccgctgcaaccggcttag

SEQ ID NO: 197267 - DNA, 729 bp, Klebsiella oxytoca; identical to SEQ ID NO: 150328

SEQ ID NO: 197268 - DNA, 615 bp, Klebsiella oxytoca
atgaataacaattatgaagatagggccgctttaatcatgggccaacttttcgcggtgcatctgacaccagaccgtttgatgaaaattggagcgtttgtggttcagtatggattgtttgaaacgacacttgagcgagcgatttggacattaactgaaactgatgtgcaaggggtaaggccttttacagagaaattgaatgctgagagtatgttcagttcctttggtgctgggaatgcaaagttaagccaaaaatgcaatgcggtactacaggacgcttcactggctgctcttgatttgtcaaattatagaaatagccttatgcacggttattttatcccatctgaaacaaatccttgtttcttaagaaatccaggctggaacggtgaagtaagaaataaaaaatcaggagatgcttatgtgggcgagccgcttcttgatttggccattatttcagcacgcactttacatgaaatttctgttcatgcttctgctgtattctcagactctaaaaacgaaaaaagaatagaatcgttagagtcaaatgtccgagaggccagaagttttgcaagtgaattacgctatctcagaagtttgatgaacgaagagaagttttaa

SEQ ID NO: 197269 - DNA, 198 bp, Klebsiella oxytoca
atgaaacgcttacttgtgctgacgctggcgctactgccagccctggcgaatgccacacagataaccctgattctcagtgaagaacaggtgactgacaattataaggtgtgcatctacgaaaacgccaactttacggagacagtgacggttaagccgtcgcagcaatgccgctacactataacctttgaagaggagtaa

SEQ ID NO: 197270 - DNA, 315 bp, Klebsiella oxytoca
atgaaaaagattcttatggcggcagtattgattgcgacggcgactaacgcttacgcgttgagccacggggatagagccaccctaaaagaaggaacatttaactgtaagaagctgaccgatttttacgagatgatcagtaacattcaggacaaagaccagcaaggtatgattggtctcattacttccggtaaatgccgtctcctaaaagaatcgatgacagttgagattcagaacgtagacgaaaagggttttgtttccttcatcactccaggtggtcacggtggctgggctgttcaacagttttttgaagagtaa

SEQ ID NO: 197271 - DNA, 387 bp, Klebsiella oxytoca
atggcacgacgcagcaaagctgtatacgaagaatttttccaaaatgggcgcaaggcacagcgcatagaagaagttgagcgccagcttatgaacacagaccaccagcaccaccgtcagcttgaagcggaggaacgcagcacggaaaacatggaagacaatttccctcgtgttattccaaacacgccaatcatcgagtggttgccgggatactacatccatcgccttgagtgggaagcgtaccgcgacgggcgcagcgtgatagacgcgcaagaaccgcgccagacggttgacccggagctaatctcgtaccagtggaatcactttgtagttaactcacgctttacgtggaagctggaagatcacgccatcgtttacaccttcgtttag

SEQ ID NO: 197272 - DNA, 465 bp, Klebsiella oxytoca
gtgactaaactaccagccgcattaatgcgtgaagtaaaagcagaatttaaggcccagcgcgaaagttacatttcaggatacattgaagcccatctgtctgatgtgttcagcatctcagacttctaccctgtgatcctcaccacgctacagcaagctatcctcgacgggtacaccatagccgactatgaccgccagccgttctataacgccggggaacctgcaattcgcattgtgttgaaccgcaagcaagatgaaatcgaggctcaccgtactgccctcaccacagaggcagaagcccagcttatggcgtccctgatggctcaagcagaagaatattacacccaagccatagccgaagaggaacgccgtcaacgtgcagaagcagccgcgcaagccgcagcagcagccgaggcccagacgttcgccagccgtttacgtgtcgccctcgcggacactgcgaggtaa

SEQ ID NO: 197273 - DNA, 237 bp, Klebsiella oxytoca
atgcaacattgcttcaccttcgaggacttcgtaaacgagtggagcaatggcaacgatcaccgcgaaatcaacagatggttgcaatcctgctacatcggcatggagttttaccagggcaaaacgtattacgtaacgtcttacctcgtcggtgggaagagtccgttttattgcccacgctgcaaccgcatcaacatcaaacgactattagaaatcaaggagaaacaaaagcgtgactaa

SEQ ID NO: 197274 - DNA, 246 bp, Klebsiella oxytoca
atgtccaacacaaccacccagatcgggttctgggctaaggagaaaaacattcggcaacctggaggctttattctgcggagagtgtacgacgttgcgcacggtcatgcttgctactatgggaatagcgttaggggagtagattctataaaaggcggcgagatctcgcgtgtattccccgatggggtacgctcataccatgtgacgaatgagcaccgtttcatcattgcttccctatatgatttataa

SEQ ID NO: 197275 - DNA, 1179 bp, Klebsiella oxytoca
atgtctatcaaggcccaatcttatttatatcctactgctgacggcgtttggatgttccagatcttcattccggtgtacatgcgccacatcttcggagggaaacgcctgtaccggaaatctacaggcaccagggatctgacagcagcaaaacatttccgtaatcacatgctgatcgagtggaaaaccctgaaagaacagtattccccggatacggaggaaaggcgcatacaacacgccatcgcaggactgcataagcaagccacattacgcgccccactccaaacagtaccgacactaaccactatccgcgatcaatacgcggacaaatacagagacaagcgctcattctcgacgctggctaaatctgctcgcgccgtcgaggtgtttctcgcatcgctggatcgggtagatgttaaaatcactgagatcagacggtcacaagtgacgatgttcatcaaccagcagggcaagaaagcccctcaaaccgtccagaactggctaacgtgcctggggagcctgtacgagtatgctcggagaagtcatgacgacatagcgccggataacccgtttcacggcatgaacctcgaagcgagggcgacgattgaaagttatcagccgttcgatcctgaccagatgcaaaagctactggattcagcagagccagagatcaggaacattatcactatgggactcttttcaggatgccgccttgatgaactggcaagcctcaagaagtcagagatccaaacggtggaaggtgtacgctgtttctacatctcgaagtcaaagaccaaagcggggatcaggcatgtccctattcactcccggctatctgagattgtcgatgagtatttgagtcacgcttacggcgaatacctgtttccacaggctaacaggattaaccggaaggacggcaagaaaggccccttctactctcaagcgttcaccagactacgccgtcgtgtgcttcctacagccacagaccgccaatgcttccacagcttgcgcggtatgttcataacctgcttagaccgtgcaggagtaccagaacagcggatcggagccataacgggacacacagaccagaaatcgaagacggaagccttccgcacctattcccagggcgcgagcatggaggagctaaaaaaacatgtggaaatcgttaaatttttatggtaa

SEQ ID NO: 197276 - DNA, 489 bp, Klebsiella oxytoca; identical to SEQ ID NO: 119516

SEQ ID NO: 197277 - DNA, 255 bp, Klebsiella oxytoca
atgcacatcaaaacccttatccgccagactgacggcgatagccgcagccattgtggttttgcccacaccacctttgcccatcagcataatcaaaccgtgttcactgcgggcgatatcatcaaccaggacagacaacgacatattctctggcttgttctgtgggctttgttcaggaagcgatgttatctcagcgtgttcgttgagcaggcttttcaatgcggatacaccaaccatgttcagcggctgcaggtataa

SEQ ID NO: 197278 - DNA, 360 bp, Klebsiella oxytoca
  misc_feature (288)..(297): n is a, c, g, or t
atgaacgcgagattcctattgcccggcgcgacgcgagcagtactgccagctctgcccacggtgctggcagttgtcacctcaagcctgctgtttattctgttcctggcattacagggcaagcctgcgcttgaggccggccggctagtgttggaaggggccttcggttcgtcattcgcttgggagaataccctacagcgcgcggcaccgttgatgctcactgcgctatgtgtggcgctgccggcgcgggccgggctgattattatcggcggtgaaggggcattagtgctnnnnnnnnnngcgggctggcggcggcagtcaccccattgtggctgccggcctggccgccagtgcttatgctga

SEQ ID NO: 197279 - DNA, 276 bp, Klebsiella oxytoca; identical to SEQ ID NO: 120695

SEQ ID NO: 197280 - DNA, 396 bp, Klebsiella oxytoca
  misc_feature (331)..(340): n is a, c, g, or t
atgtataaagtcgatacgccgaccaatagcctgcactcgttgcaggaggtgtcttttagtagcctcggttttaccgagcgctatcatcttcaggagtggttggcgaagaaccctcaggcgttgacccgcgataatgatgatgaactgctgatcatccagaaagagttcgccggttttgacgacaccaaagagcgcctcgacctgctggctatcgataaacagcgcaacctggtgatcattgaaaacaagcttgatgactccgggcgcgatgtggtgtggcaggcgctgaaatatgccggttactgcgccaatctgcgcaaagaacagatcnnnnnnnnnnccagctctatctcgacaaatacgagccggaagagacccgtccggcggctgaagtga

SEQ ID NO: 197281 - DNA, 522 bp, Klebsiella oxytoca
gtgattcggatagtgacagcgattctgactctgacagcgattcggattccgacagcgatgccgattcagacagcgattcggactccgacagcgattcggactctgacagcgactcggactctgacagcgattcggattcagacagcgactcggattctgacagcgactccgactctgacagtgactccgattcagacagcgattcggatagtgacagcgactcggactctgatagtgactcggactccgacagcgactcggattctgacagtgattccgactcggacagcgactcggactctgacagcgactcggattcagacagtgattctgactcggacagtgactccgactctgacagcgattcggactccgactctgacagcgattcggattcggacagcgattcggactcggatagtgactcggattcggacagcgattcggactccgacagtgactccgactctgatagcgactcggatatcccgcaggccaatgcggataccaataccgcgctga

SEQ ID NO: 197282 - DNA, 303 bp, Klebsiella oxytoca
atgcgaacagcgcacggcgttaaagttgttctgcttcatcagcaggatatcctgcaccatcgtctgctcatccatgacctgaccatgcagaggatgatgctcgtgacggttaacaccgcgaatcaacaacggcttgccgttcagcagcagcaggccattttcaatccgcacctcgcggaaaccgacatcgcaggcttctgcttcaatcagcatgccgccggcggtgtgcagttcaatcaccgcacggtagagattcgggatttcggcgctccacagcgccgggttttcgacgttcagacgtag

SEQ ID NO: 197283 - DNA, 732 bp, Klebsiella oxytoca
atggaaggtatcggcaatcttcgcgatatcctcgcgggtgaaatcacgcagcacgcggtctttcatataaccaatctggcgggcgtcgataaacagcacctggcctttgcggtggactttaccgttgccgccggatttgtctttggtcaggaaccagatgcaggccgggatttgggtgttggtaaacagctgtcccggcagcgccaccatacactccaccagatcggcttcgatcagattgcggcggatctcgccttcgttgttggtgttggaactcatcgagccgttggccagcagcagcgccatcgagcctttcggcgccaggtggtggatcatgtgctgcatccatgcgaagttggcgttgccctgcggcggcgtgccgtatttccaacgcacgtcgttttccagcttcgcgctccaccactctttcatgttgaacggtgggttagccataacgaagtcggcgcgcagatccggatgctggtcgtccagcagggtatcggcatttttcgtaccaaaattaaagtcgatgccacggattgccatgttcatcgccgccagcttccaggtggtcgggttggattcctgaccgtaaacggagattttctgcttctgctcagcggcgttgtactgcttctcgcccgcgtgctcttcaataaaacggtcactggacacgaagaacccgccggaacccatcgccgggtcatacacacggccgttatacggctgtag

SEQ ID NO: 197284 - DNA, 519 bp, Klebsiella oxytoca
atgattgaatggattaagatgtttgtgagtgaattgaaatcacaaccagtactaaaaagtcggctaataatattgttgtatagattggcatctatttttttcagtaagtcgagaaacccccttaaatatatatttgttctgtttgttgtattttactatgtttttgtggaattcttatggggaatagaaataaagcctaaaaccaaaatcggctggggcctcaaaatctaccatcctacagcaatcattatcaatccaggcgcagttttgggtaggggggtcattttaagacatggtattacgattggtaataaatataatagtaagacagggcacgaaactaaatgtcctgtaataaaagataacgtcgaatttggagcatatgcctgtattattggcgaaatagtaataggtaaggattctattataggtgctatgagctatatagattttgatatcgcaccatgttcaatcatatcagctcatcgcggtattttgttaaggaagaaaaatgtctaa

SEQ ID NO: 197285 - DNA, 165 bp, Klebsiella oxytoca
atgaccaaaacaaaagcgacgcctgtcaaaagcttccagacaaaaggcatagcgccggatagccatgaggagattgtatcgatcccgatcgccgcgaagaccggccccagtaacgtggccctcccgccaagtgcggtccaaataagtagctccgtgcccagctga

SEQ ID NO: 197286 - DNA, 147 bp, Klebsiella oxytoca; identical to SEQ ID NO: 181129

SEQ ID NO: 197287 - DNA, 480 bp, Klebsiella oxytoca
gtgcgcaatacgcgacagcaggaagatatacggcagacgggcgttgatgcggctgttggcggtggcgtcggcggtgtcgtacagcgccggcttctgggcggagttggccgagaagaagcaggcgtagtcgcggtttttgtagtacgacagcgggataaagccgaggctggcgaactcaaactcgcgggtttccgggatcatcacctccgacgggatcttcacctggttgccggtgcccagatcgtagaggtggatcggcagatctttcaccgctccgcccgcctgcgggccacggatctgcacgcaccagccgttattaataaagcttttcaccatgttggacgcgaaggagaacgaggcgctggtccacaggtatttctcatggtccgggcctttcacctgctcgacgtagttgaagctgcgcaccggcacggtgtccggaccatacggcaggcggcccagcacgcgcggcatcactag

SEQ ID NO: 197288 - DNA, 231 bp, Klebsiella oxytoca
ttgaagcagcatccgcgcaagaacaaaacggccatcaacatcgaatacatgaaagccagcatccgtgccagggtggagcacccgtttcgcatcatcaagcggcagttcggcttcgtgaaagccagatacaaggggctgctgaaaaacgataaccaactggcgatgttattcaccctggccaacctgtttcgggtggaccaaatgatacgtcagtgggagagatctcagtaa

SEQ ID NO: 197289 - DNA, 654 bp, Klebsiella oxytoca
atggagaaaactgaggaagctgttgtaatacccttagatgctggctggaacgatgtcggatcatggtctgctctttgggatgtgaactccaagaataatgataataatgcattaattggagatgtcttcacatataatgcaaaggattgttatattaatacagatgaaaaactcgttgctgcaataggcgttgaaaacttggtgattgttaatacaaaggatgcaaccttagttattaataaagataaagtccaggatgttaaaaaagttgttgagtttttgaaacaagataatcgacaggaatataaaattcatcgtgaatcataccgaccatggggggtgcaggataaagttgttgatactgctcgctatcatgttaacaaagtaaccgttaaaccgggtggcaaattttcgttgcaaaagcacattcatcgagctgagcactgggtagttttatcaggaactgctgaagttacccttgatgaacaaacttatttgttaactgaaaaccaatcaacgtttatccctgttggaaaaacgcatatgttacataacccaggaaaaatacctcttgtcattcttgaaatagtttcgggagcttatttgggggatgatgatatcatccgtttaaaagaccattatggacatttttga

SEQ ID NO: 197290 - DNA, 435 bp, Klebsiella oxytoca
atgttcgatcccgtaaacctgcaattgtttgagttaattttccatctggaagttagcctgcatcaggcatcaacacgccgcagcgcgcagcttttgcagcagttgttgcatgacgaatttctggagataggccgtagcggagaacgttacgataaaacgcagaccgtagcagcattaattaacgaggacgtggaggccatcaacgcttacagctttcagttggctttactaaccaaagattgcgcgttgcttacgtaccgcagcgaggttatcgattcagacggacgcactgctaaaaaaacgcttcgttcgtcaatctggcagaggagccatatttgtgcaaatcatcaggaatgctggcagctcagatttcaccaggggacgccagtgaaagaagttcaggaagaagagcaggcgagcaagacggcgaattaa

SEQ ID NO: 197291 - DNA, 948 bp, Klebsiella oxytoca
atgacaagtatagcaattcttgaagcagttaacacttcttacgtgcctttcaacggtcagcaagtgataactgctgttgctgctggggtgacttacgtggcaatgcgtcagattgtagagaatatcggaatggactggactggtcagtcagtaaagctgcgcaaaatgaaggacagattcaactgtagagatatctctatggttgccgccgacggcaagctgcgcaagcttttgtgccttccattgaaaaaactcaatggatggctgttcagtatcaacccagaaaaagtgcgtgccgatatccgcgacaaactgatcaagtaccaggaggaatgctttaccgttctgcatgactactggactaaaggcgaggttaagaacccgcgcaaaaagaccacggtcgatgaaaggacgccacttcgtgatgccgttaacatgctggtaagcaaaaggcacatgatgtatccggaagcctacgcgatgattcatcagcgctttaatgtggagagtattgaggatttagaggcgactcagattcccgatgctatcgagtatgttcatcgtgttgcgctggaaggtgagtttctcggtaagcaggaagcactacccgctccgaagctggatattcactacccagcagactggtgggatcagttcccgctccttcagcgtgaaagaaaaattcagaaatccacagcggctggaggttatcagttccccgtaaggctgctttatggatttgaggatgaatcaccttcggcgatcagtagcctcataagcaaactggcgatgcagggatacgacgtgagtgcggtcaagatggaatacttggctcatcgtcattatgcagagcggatgtatcagaaactatccagaattgctgaaatcagtggctcggtattaggcagtagcattaccttgaatattcagacacctatgcgctcttag

SEQ ID NO: 197292 - DNA, 234 bp, Klebsiella oxytoca
atgaaacttttcatcgtttacaccccatcgttaaaaaacataaaaactggactgtcactgattcgggtcggcatgtcacttctcgtcggtataggggcggtggttgagcacgaaatgaaatcatcagaccttacagatgcgatcctgaaagatttgcggaaacagcaaatgaacggcgaaatcgacctcacaatgagcgagctcagggagtctctttctcgcatcctggtgtag

SEQ ID NO: 197293 - DNA, 351 bp, Klebsiella oxytoca
atgattaaaaagcccttactattaacaattctactaataacaacaactctttcacatgcagagacgcttgacgagtttttcaataaaaacaaatcgattaacgatgatattgaaattaggctggcgatcaaaaaggaagcttttcagcttgcctcatcagaagcatataccgagggatccagtgacataactggtagaagtagtagcctaatgcgcaaagatggtggaggttatgccagatatgcagtgaaaacgctcgtggatgcttgcaataataaaggaccataccaaagccaccttgacgacaatgcatgcaagagattagaggacaaagttggaagtataaaataa

SEQ ID NO: 197294 - DNA, 1959 bp, Klebsiella oxytoca
atggcagcaacggtaattgacgccctcctggttacgctgggcattgatacttctcagttccgcaaaggtcagcaggaagtcagtgatgacctgaaaaagcagcgcgaagacgccaaaaataccgccaaggaaatggcggagcagggcaagaaagccgcttcgttcttcagcagcataaagacggaacttctggcactgactggcgttaccgtcactgccggcggcctgatgggccttgttaaaaataccacttccagcctgatggacctttccattcagtcaaaggctcttggcatgacagccagagaacttgatggtttcggaaaagcggctgagtcagccggaagctcttttgagaggattacggccgccttgcagggttttcaggctgcaaagcaaggctctctatttggggataccagtagcccaatttttagcggcatgcggatgcttacggcgttaactggtgatacttttgacgtctattcaaaggatgccaagtcacttgcaaggtcttacctagagtcactcaggaaagtcaaagacccaaacattaggcgccagattggtgctatgggcgggttcgatgatgcgaccattcagcgaaaccaggagggaagatttctcccggacgttgaccgcttaaccaaaagttcaggcattacagatgcctcaaccaaaggcgccaaggagcttactgctgcatgggcggagcttggtcaaaatctagagacggtaaaaaaccagatttacgtgggcttgataccaactattcgcgatctgaatggtctcctcattgagtggtcgtctggtaatgcaaaatcctcttcattcttcaaagagctgaagcgggacattaacgacattacggggattgaccttggtagctggacgctctcaagcgatctgcgcaacctcaaagataacttttccatgctcgggaaagtgcttaaccacctgggtaatgctttaaacgagctcaataatggcaacttctctaaggctgccgatgagtttaaaaaggcgtggtacggcactgaagacggaaagcctacgggtaatgatgcgctgcccggagtgaccaaggcagccgagcaggcgctgaagaaaaacggcggaacgctggattttaaacccgatcaggattctgcgtatttaagcccgcagcagcaggcaacgcagaaaatgctggatgctgttaagtttcagccacttcctgaacagcgtcggcagcagcaggacgagagaaactactgggaaagcaccaaaaatctcctgtcaaaaattgctgacgctctgatctctccagcgggcgcagcaacaatgcagcctgacacctcgggataccagccaaacgtcccgcttaacgcgcaagccgcgcgtcttggcgctaaaggaaaggcatttattcaggcaatggctggtgagttcggggcgctggaaggtaaatatggacttccctccggcctactgtcttcggtagctgctactgaatctggaggcgacccctacgcagtatcacccaaaggagcaaaaggcccattccagtttatggatggaacggccagggatttgggcttgaaaggcatggatgtttatgacccccataagtcagccgatgccgctgcaagatacctgcgttacctactggatgctactggaggagacctggaaggtgccttaatggcatacaacggggggatcggcaaactgcagcgtaatggtaaggggggaatgccacttgaatctaggcagtatgcgcccaaagtcatggctggtatgcgtcccggcgccggtatggctgtagaccgcgcgatgcccgggcaggctggcggtgtttataacttttatggcaccaaaatcactacccaggcccagaacgtgcaacagcttaccagcgacatcaaaaagcacggtgacaaccgcgtcatgctaatggctggctactcaggacaataa

SEQ ID NO: 197295 - DNA, 684 bp, Klebsiella oxytoca
atgacagctcaatacttggaatttgttcgccagcagctgatagtggccaccgccgatctgagcggtgcgacgaaggggcaactggtagcctttgcagagaacgcgcaattcaccgctacggcgcgcagccggggaaggaagaaggtgtatagcgaggcgaagcaaaaaatggttaacccggatgggccgcctatgagcggaagccagtcccgtgccaaaggttcctcaatcgctctcgttctgcctgttgagtactcgacagccagctggcgccgcgctctgctgtctctggaagaccaccagaaagcgtggctgctgtggaactacagcgacaatatccgctgggagtaccaggagacgatcacccagtgggcatggcagcaattcagcgagaggctggccggcgcgcgcattgcaaagaaaacagtcgatcgcctgcgtcagcttatctggttggccgctcaaaatacaaagcaggaaataaccggaagagggcatcattacgctcctgcctctatggtgggaataaagccagacaattggtgccacaattattcggattattggcagattatgatggacatctttcaggggcttgatagtcaggcgttactctccgtttctcgatcacgttcacaacaaaaagcgactttttcgcagcagggtcttgcaaaagtcaattaa

SEQ ID NO: 197296 - DNA, 642 bp, Klebsiella oxytoca
atgaaatgtaaggtagagggttgtgatagggagtgtaagcactatccaggcaagggcgtttgtcaaaagcactatttccgaatgatgcgctacggaacctatgagttgacgaagagtggaaagagaaaggataggactaaaaactccaaaggttatcagatgattaaatgtccagatcatcccttagtcatggcaaatggatttgtgtacgagcatcgaaaagttatttatgaccgatatggcgacactctccctccatgtgagatatgtggcaaggaagtgacttggaaaactgcgcacatcgatcacatcgacgaagttgtcgataacaactctgattcaaatttgagggtgctttgccgtgcatgcaatgtgatgcgctctcgcgtacacattcctgagcatacaaaaaaatctcgtatggcaattaccttcaatggcgaaacgaaaacccctaccgaatgggccagagacccgcgggttttgatatcagttactgccatcaagcatcggctgaaaaatggtatgagcgttgaagatgctttgttttctccaaaagctacccatcggcataccagaccaagatccagaacaccgcaatacggcgagtatcggggacctaagaaagtggaggccgcatga

SEQ ID NO: 197297 - DNA, 261 bp, Klebsiella oxytoca
gtgaatgacgtaaaatccaaaatcatgcaggtgatgaaagagggagcggaccagcagaagcaatgggcacatggagattacccatttcgcttggctacctggaatatccgctgcgcgatggagcgcaaattccccggggtagagtggaagagcgcagacctgcgtaaagagcttgtcgaactggcgaaagaggggctggtatcgaaagatgaataccatagccgcattggtcaggctgtctggcgcctggaggtgaagtga

SEQ ID NO: 197298 - DNA, 783 bp, Klebsiella oxytoca
atgaccaaatcaaccataaccagagagctgctggaagaatgggttgcacaatttgaggaagatggcggctgcgatgccactgacaggcaattagaggctctcattcgtcaatcgctggaagcaatggacagcgagccggcagcgccggtggcagaagtggtttcaatttatggagaccacgaagcctttggggagcgagagattagaccgcttgtcggcattcagcaaatgccatacgggacgaagctctatcgccacgcgcagcagccggtagttgagagcgagccggtggcagaagttttatctaaccgcccaggcaatgacacgtcgacaattgacagggcgcttcctgttggcacccagctctatcgccacgcgcagccagcgccggtagtgccggaagaagccactccggacagtatcgagattcttgccagtgccaggcgtcgtgaccacgctgtattccagtgggatgaagaccaacgaaatgcggccgctgattcctggaacgcctgccgcgccgccatgctccaggctgaacctgtaacgacggctaacaagttgggcaactctccggtaattggcattgacccggcatccggcccagaccgcaccgttgaggttagctacgttgcgcctcctggttacgtgatggtgccgaaggagccgactggtaaacaatgggccgctggcgtgcaagcctttgattctgggatggacaaggtcacacgaatctacaaggccatgctcgcagccgccccgcaggaggtgaaaggtgaatga

SEQ ID NO: 197299 - DNA, 384 bp, Klebsiella oxytoca; identical to SEQ ID NO: 96499

SEQ ID NO: 197300 - DNA, 324 bp, Klebsiella oxytoca
atggaagacatacagaatccaaaaagtgaagttagagatccttcagaaattaaaaaggtcactttcgacttatttaaattctatcttgatgaattagaaaaagaatgtggggatataaaatgttccgagtgtgggaatcacttatggaacattttccgagctcccggtcctgaagaaaaaccaaatgtcgtaactttccccatgccactctcaccaggtatgggcatgtgggcattccctatctcatgctcaaagtgtggcagcatgcgatttttcgaagcgtctacagttgttgactccttgcgaaccaatggaaagctatga

SEQ ID NO: 197301 - DNA, 468 bp, Klebsiella oxytoca
atgattgcagccacctccccatactatccagcatttgtaggaaatgtcgttccgcatcccctttttgatggtatcattgagaacatggatggtggcatgatgtacgccgctgaagttataacattagatcttggggaggcagaaatgagcaatagtaactcttatatcgatgagctgcttcgagcgctgaagattacttggccactactggttgtagtcattgcgtcctcctacggattcttctcccttactcaatcgagaattgattcccaaatggcagaagtcagggctcagattgcttctgatagaaaagatgcctcttctgacaacgctactctaagatcagatttaaacaacggcttcaatagagttgctgacaagcttgatgaattgaacaaaaccatttcaagcattcaagttgagcaagcgactcaaaaagcaaaagctgaaacatcaagtcataactga

SEQ ID NO: 197302 - DNA, 1125 bp, Klebsiella oxytoca; identical to SEQ ID NO: 103727

SEQ ID NO: 197303 - DNA, 225 bp, Klebsiella oxytoca
atgaagctgaaaatgtataccccatccgggtctgtgatcgtcgaaaccaacgacgtcgcgcagttttacccagacgctgaaagcggcggagagctgaccacaatcgaactggtttcgccaaccggcgatcatgggaaggtggcagtaaaacatagcttccaccaggtggctggcgctctcgccacggcctggaaaatggatgaagacaaggcaggtgcagcatga

SEQ ID NO: 197304 - DNA, 486 bp, Klebsiella oxytoca
atgaaattctccaaattcactgagttggtagcccgcatctggtcaaacacaactacgcagcgtcgcgacccggagattaccatcgtcgtccactcacctggcagcatcgggccgtcgccatccgtcgaggtagaggctattcacgcaggcttcgactgggatgcgggacaggtgatgatctacccggctcaacctctggcggtgctaactcctgagcaggtagcggaaatcagcgagagcgttcgaaaaggccagagctggcacgcatacgaggcttacaagaagcacaaatcgcagctggaaaacgctgcgcttgagcatgcgaaagtcgccgggcagcgcgacgagctgctggcagcactcgaagaaatgaccgatatcgttagcaaacatacctacccacaaccagataaacctaactctacgtggggtcgattagaggctgccaaagaagttatttcccggacaaaaggcggtgaagtatga

SEQ ID NO: 197305 - DNA, 834 bp, Klebsiella oxytoca; identical to SEQ ID NO: 142253

SEQ ID NO: 197306 - DNA, 204 bp, Klebsiella oxytoca; identical to SEQ ID NO: 142252

SEQ ID NO: 197307 - DNA, 492 bp, Klebsiella oxytoca; identical to SEQ ID NO: 142251

SEQ ID NO: 197308 - DNA, 360 bp, Klebsiella oxytoca; identical to SEQ ID NO: 142249

SEQ ID NO: 197309 - DNA, 480 bp, Klebsiella oxytoca; identical to SEQ ID NO: 142248

SEQ ID NO: 197310 - DNA, 444 bp, Klebsiella oxytoca; identical to SEQ ID NO: 142247

SEQ ID NO: 197311 - DNA, 636 bp, Klebsiella oxytoca; identical to SEQ ID NO: 142286

SEQ ID NO: 197312 - DNA, 2787 bp, Klebsiella oxytoca; identical to SEQ ID NO: 142282

SEQ ID NO: 197313 - DNA, 2046 bp, Klebsiella oxytoca
atgagcgtcaagatcaattcagtaccatccgtttccgttacttatgcacgcaacggagcatcgaccaaggctaatgcccttgggatgcgccctatgcaagaacgggcctatgagaagcgcggagaacaatatcttctcataaagtcgccgcccgcctctggcaagagtcgtgcgctgatgttcgtcgcactcgataaactcgcaaaccaggggatcaaacaggcaatcattgtcgtgccggaaaaatctattggcgcgagcttcaacgatgaaccactatcgcagtttggattctgggctgattggcatgtcgaacctaagtggaacctatgcaacgcgcccggtaacgacaacggtggcaaggtaagagctttcggctcttttcttgaaagtagcgacaaggtgcttgtttgcacacacgcaacctttcgcttcgcggtcgatgcctacggcgtagaagcgtttgacgatcgcctgatcgccgtcgatgaattccaccatgtgtcagctaacccggataacaagcttggtcagcatctggggcagttcatcgcgcgtgacaagacacacatcgttgccatgaccggctcctacttccggggtgatgcggaggccgttttggctcctcaggatgagtccaggttcgataccgtcacctatacctactacgaacaactcaacggttacgaatacctcaagcaacttgacatcggctacttcttctacagtggctcctacgtcgatgacatccttaatgtcctcgatcctgacaagaagaccattatccatatacccaacgtcaattcgcgcgagagcacgaaggataaaattaaggaagtggaacatattcttggcgcgcttggcgattggcaaggtgcggatcctgcgacaggtttccagttagtcaaatgccgcgatggccgaatgttgcgtatcgctgatctggtggacccaactagccaaggcaagattcaggaaagccttcgagctgtagaaatgaagacagaccgtgattatgtggacatcattattgcacttggtatggcgaaggaaggtttcgactggatctggtgcgaacatgcgctgactgtgggctaccgtgctagcctgactgagatcgtgcagattatcggtcgcgccactcgtgacgctccgggtaaaacccgcgcgagatttactaacttgatcgccgagccggacgctgtagagggcgcagttactgaggcagtcaacgataccttgaaagctatcgcggcgagcttgttgatggagcaggtactggctccgcgcttcgagtttaagcccaagaatccagaaagcggcccgactccaggctttgattatggtgatggaggatatgacccggatagctgcaattttggtgttaatgagcagacagggacgtatcaaatcgagattaagggacttgccgagcccaagagcaaagaagcggcacgcatctgccaggaagatttaaacgaagtgatcgcggcctttgtgcaggataagcccgccatcgaacgaggtctgttcgatgaagagctgatccctgaagagttaacacaggttcgtatgggtaagatcatcaaagaaaagtatcctgaacttgatgctgaagatcaggaggctgtacgtcagcatgctatcgccgcccttaacctcacgcagcaggccaagcgtattgtcaacggcgagaacgatgggacgctcaatactgcccttattgacggagtgcgtcgctttgcgatggacgtacgcgatttagacatagaccttatcgaccgcatcaatccctttggtgaagcctacgccatacttgctaagacaatgagcgaagatagcttgaagcaggtcgcggcggccatctcggccaagcgtacctcgatcacgcctgaagatgccaaagtgatcgccaagcgtgctgctgaatttaaacgtgaacgtgggcgactcccatcgttaacttcggcggatgcctgggaaaagcaccttgcagaaggtgcagccgcgtttatgcgttttagggcggagggacgttatgagtaa

SEQ ID NO: 197314 - DNA, 1179 bp, Klebsiella oxytoca
atgagtaattctgatttagacgatttggcggcagaacttgctgaatttgcaccaccggagaagaaaaaaggacgtccagccagcgaggaacgcatcatcgcaggttttgaggaaatccagcgcttcgctgaccaacatggacgtgcgccgcaacacggcgaagagcgtgagatctttgagcgcctctatgcagtgcggctcgaccggctacgcagtctcccagactgccgtgccttgctagagccgctggattatcagggcttgttggccggagggggggatggagcggagtcagcggacgaatttatcgatatcgataatttggctgccgaactggcggatgttaccagcgaggacgatatcacagtcttgcgtcatgttcgtgctagcgccgaaaagcgtgctgtacaagggatcgcggatcgcaagccgtgcgaggattttgatacattcaaaccgctatttgaacaggtgcgcagtgatctaagttcagggttaagagtgacccgaccttttggacagtatgcaacgattgaagtgggccattggttcatcctggatggtcaaacggcttatgtggctgaggaaggtgaagagttcgattcgccacaggggaagaaagatgctcggctgcgtgtcatttactcgaatggtacggaaagcaacctacttcggctgtcactggttcgtgctttgtataaagacgaaacagcacgccgaattaccgatccagacatggggcctttattcagcgatgctctagaagagagcgatctagaaagtggcaccatttatgtgttgcgttcgctatctgataacccttatgtagctgaacatcgtgatgtcattcacaagattggagttactggcggcaaagttgaggcgcgtattgccaatgcggaacacgattccacctatctgttagcgaaggtcgaggtggtagcttcatacaagcttgcaggcatcaaccgcacccggatggaaaacctgtttcacaggttgtttgcacccgcaaggcttaacattaccattaacgaccgtttcggccatccagtacagcccgaggaatggtttctcgttccgttattcgttatcgatgaggctgttgcacgtattaaggatggtagcatcattgggtatgtttatgaccccatgtctgcgaaactggtgaaggcatag

SEQ ID NO: 197315 - DNA, 258 bp, Klebsiella oxytoca
atgcagcagccatatttttttaacccgggcatgaccacccaacagcttgaagactggcttggacaacagaaaactcatctcgcccacttcaaccgtctggtggcagaaaaagccgctctagaagaacggctaaaagagatcgacaagtctattgggttgctttcatcatcaggtttcgtaggaacgctgagttttccctatagttccagtcctcttctggaaagtcctcaaacagaaaagcagctaaaggcagattga

SEQ ID NO: 197316 - DNA, 459 bp, Klebsiella oxytoca
gtgtctgactaccacaacctgttacatgtaatcaaatcgcgcgtgtgtgaaaacaggagtatgtctcactccgcgtattatccgggtagcatgcaggacaatcagatcagaaacagaacagcgctgatttatgtccttgaaatgattctccatcagcacagacaacaatatggcactatttttaatccgcttgaggaaaaagctgcgttgcatcacctcatctttatgaaaacaaaatggcggccgtcagaaatcagggaactgaagctggaagatgctctatttgttatccaggatgagctaaggatcgagaacataagcgacgaggctcaggaggctttaagttcgttcaatctgcctttagctgcttttctgtttgaggactttccagaagaggactggaactatagggaaaactcagcgttcctacgaaacctgatgatgaaagcaacccaatag

SEQ ID NO: 197317 - DNA, 345 bp, Klebsiella oxytoca
atgaagatgcctaacacaccgcatggctgggcggacatcagcgagatccttgcgtcctggtggcgcggtgacgtgcccatcggtggcgtcattatggcaatcgtgatggctgtcctgagaatggcctactcaggtagtagctggaaggaaaccttatttgaaggattgatgtgcggcgctctggcgctgacaacttactctgcgcttgattactttgatgtaccaaaagccctgactgtagggatcggtggcttcattggctttattggcgtgaagaagctcagtacattcctgtccggttacgtcggcaatcgtttcggaggcggtaatgcagacaagcaataa

SEQ ID NO: 197318 - DNA, 462 bp, Klebsiella oxytoca
atgagtcgcgccgcagagattgcatgtgccgtggtaattgtcgccctgtccactatgggatggctggcgaatcactaccacggcaagtaccagcaggagcagaaacgcgctgataccgccgagcacagtctaaagctggcgaacgcgacaattaccgacatgcaggtacgccagcgcgacgttgctgctctggatgccaaatacaccggagaactggctgatgcgaaagaaaccattgagcgcctgcatagcgatgtcattgctggccgtaagcggctgcagctcaacgccagatgtaccgcgaacggagcgaccgcaaccagcggcatgggcgatgcttccggcccccgacttaatgacaccgctcaacgggattatttcaccctcagagaacgaatcaccatcattaccgggcaagtgaactacttgcagaactacattcgaactcaatgtctgaaatga

SEQ ID NO: 197319 - DNA, 228 bp, Klebsiella oxytoca
atgaaaatagttgttttcttggatgatggaattcatctcgttgatgcggaagatggaaccttgcattggaatgtgattaattctgatgggagctgttcccaaaggcccgttgaaatgtacgtttatagagaactatcagttcataaatttgcgtacattgctaaattcagagatgcatcatcagccgaaatcaatgaagccgtagttaagcacggatacgacgtatag

SEQ ID NO: 197320 - DNA, 1479 bp, Klebsiella oxytoca
atgtcccgtaagaaacgccagaacggcgcacaacagcccgttaggaccgctgacgggtacaacaatttcccggctaagctcggggctcagacaaaaaatatccagactggcggtacgtatctaccaggctatctgacgcgtaatcgtgttgagcttgaatttgcgtatcgttcatcgtttttggtgggtgcagccgttgacacaatggctgatgacatgacccgcaaaggcgtcaacatcagctctaaacttgaccccggacaaaaaggaaaggttgagacgttctgggatgaggtcgctatctgggatggcctgaacgatacgctgaaatggtctcgtttatacggtggtgcaattctggtggtgttgatcgaagggcaggacatgtccacgccattaaagcttgaccgtatcaaacaggggcagtttaaaggcgttatagcactcgatcgttggatggttgcaccgtcctacgtcaatcttgtcactgattatggccctgagttcggcaagccaaagttttataaagtcactactaaccagcagggaatccccccctggaaaatccatcacagccgaataatccgcatggaaggcgattctctaccattccagcaagcccagacggaaaacggttgggggatgtcggtagttgagcgcatttttgagcgcatccaggcattcgatactgcaactgtcggaacaacacagctgattcataaggcacacctcagaacctacagcatagaagggctgcgtaagattctggcgatgggtgatgacaaccctatggttactggcttgatgaaacacctggatatgatccgcgagttccagaccatcgaagggatgaccctcatggactctaaagacctttttgcaacccacagttactcgtttgcaggtatcgccgacgtcattctgcgatttgctgaacaggtttccggtgcaaccggtattccgctggttcggttgttcggacagtctccagcaggtttcagcactggtgacggtgacctggaaaactactacagccgcgttaactccctccaggagcgccgtttgcgccgtcatatccgctggttgatggatatcagctggcgttcattgtttggtgaaccgctgcctgatgacttcacatttgagttcaataagctctgggagatgtcagacaccgatcgggcaacaatggcgagcaacttcaccactgcgttggctacggctgtacgtgatttggaaatgccgacttccgcagcacttagcgacctgcgcaacatgtctgatgtgatcggtatcggcggctctatcaccgacgaggatattgaaaatgcgaagtcccagtggtcggaggatgaacctgaaaccagccctccgtcgccgttcggagatccagtaccgaaaaagcctgttggcgatagcgaaccagataggggaaatagtaaatggtatttacgatggttcgcaggagtcagcaaataa

SEQ ID NO: 197321 - DNA, 534 bp, Klebsiella oxytoca
atgtttctgcaggttgagcgtgaagagtggcagcagtggcgatcggtatctgaggaaatcggcgcgggcctgcgtgatgtggtaggtaatacgccagttggtcaggtggcgcaggatatcgtttatcggcaaattcagttgatgaaatcgcttccgctggagtccgccgacagggtgcgcgatatccagacccgtgccattgaagcgatggtaaacggtgagcgcccggatcagctctacgagatgatcatgcagactggaggcgttgctgccagcagagcaaaaatgattgcccgtactgagataggcagagctaccggagcattgacgcaagcgcgagctctggctgtcggttcagaggggtattggtggagaattgaaggtgcaggtaccagaccatcacaccgcaaaatgaaggataaatttgtgcgctgggataaccctcccactcttgacggcatgaccggacacgctggatgcctgcctaactgtaaatgctggcaggatgtgcagattccggagcctagaaagtaa

SEQ ID NO: 197322 - DNA, 198 bp, Klebsiella oxytoca
atgataatcgccgggcgggatatagatagcggcgccgggttttccaccattattcatgtcggttgcggtttgccgatttttaatatcgagaataatactgttgataacttcgccgatatccttatacggattaccgatatgctactgcgtcacgtcataataattattatgcgtcatgaagaacctcctctgctatga

SEQ ID NO: 197323 - DNA, 261 bp, Klebsiella oxytoca; identical to SEQ ID NO: 195195

SEQ ID NO: 197324 - DNA, 1707 bp, Klebsiella oxytoca
atggatacatttttcccttttaatacatcgccaaaatataagatagaaaacaataaagaattagctgaattattgggtgttactactgctaagttaacttattatgcctattatttacgtgatgatgataagtatcattcattcaaaattcgtaagcgaattaatggggaaagattaattgaagctccaaatagagggcttaaagatatccaaaaaacaatttctcattttctggagagaaactatacacctcgttcttgcgtatttgcatatgttaaagaaagagacatagttgaacatgcctcaattcatgttgggcaacgatggctattacgcttggatttaaaggatttcttccattcaataagttcggctcgagtttcaggggtgttaaggcgcgctccattttgctttgctaaatccccggcaaatactgtagcacgtctttgcacaaaggatgggcgcttaccacaaggttcaccagctagtccagtgattagtaacatcctttgcaagggattagattataaacttaagcaactagcttcttcaaacaagtgttactacactcggtatgctgatgatatatttatctctaataatggaagtgtattcccttcggcgatagcaataagaggcgacgatggtaatgtagagcttagtgaagaaataaaaaatattattatcaattctggttttgaagtgaatgctggtaagacgactcttcgtaaaaaatctgagaggcaacttgttactggagttgtagttaacaaaaaaaccaatataccaaaggagtatataaaatctatccgtgcaggactttatgcatgggaaaagtttggcttggtcgctgctgaagaatattggaagaaagaaatagaaagatctaataaattcgatggtcaaccgccacaaatgaaattggtcatacgtggtaaaataatccatgttggtcatgtaaaaggatataccgatgcaacttttctaacacttgttaaacgattacaagcccttgatagcgaatttaaaattgatgagcagaaattccgacgagagataaccgacgaaattcatatttataccgaaggtgtgacggatacaaaacatttccaagctgcgctgaatgcatttcaaaagcgtgatgaattccttgatttgaaaataatattcaaaaactcaagcaaacctggaagcgcaagtcttaaaacgctttgtgaaaacctgcgagaaacatcacaaaaacatctcactttatgcatctttgatagagatgaaaaaaatatagtaaatgagatgagtggttctccgggtaattacagagatcacgggaataacgtatttagtctaattatccctattcctgaatttagaaaggggaatgactcaatatgtattgagcatctttatcgagactcgttactttttacttatgatagcgagggaaggcgtttgtattttaaggatgaatttgacagccttaattgtcataaaactgatcctaatctcttctgccgcattagcaagagttctcttgtgtatgacgataatgtgattaatctatcagagaggaaaaatgtagcattgcctaaaaacaaatttgcagattatgtttgcagcggccaaccaccttttaataaagtcgattatggtggtttttatgaggtcttcaaacaaatacttgaaatagcctctacgtataataagtag

SEQ ID NO: 197325 - DNA, 1269 bp, Klebsiella oxytoca; identical to SEQ ID NO: 195189

SEQ ID NO: 197326 - DNA, 249 bp, Klebsiella oxytoca
atgtcacaggtcgtaaacgcagttacttcctcatcgaaacgttcttaccgaaaaggaaatccggtatccccaaaagaccgccagaaggcatctttggccagacgtagcgatacacataagtcgatacacgcattgatcatgattccattgaaagagaaactcgctcaattcgcggcagaggaaggaataacccaggcacaaatgattgaaaaattaattgaacgtgaagccatacgccgtgagaaataa

SEQ ID NO: 197327 - DNA, 537 bp, Klebsiella oxytoca
atgaaaaattcagccatttcaggggttctgtcggtatgtttactggtttccggcgtcgcggttgcccagccaaccgttcaggctggattttccccggaaggttcggcgctgcagttggtactgaacaccatcgataccgcacagaagagtatcaggttgatgggatacagctttacgtccccggaagtgtcccgttcgctgattcaggcgaagcagcggggtgtcgacgtgaaagtggtactcgactggaaagcgaataatgcgaaagggagcgccggtgcggcagcgatgaatttgctggtcaacgccggcatcccagtgcgtacggtcagccagtttaaaatcatgcatgacaaggtcatcatcaccgacggtcgaaacgtggaaaccgggtcatttaatttctcccgcgcagccgcgcgcagtaactcagaaaatgcactggtcatccgggattatcccgtcctggctgatacctacctgcagcactggcaatcccggtgggagatgggggaggactggcgttcgtcgtactaa

SEQ ID NO: 197328 - DNA, 789 bp, Klebsiella oxytoca
atgaaacttaaatcggtattactgatgtcggctgtatttgccagtgaaataacaaatggtttcgcacaagaaaataggccgccagctttatttactccggcacaggaggaacgaatcggtgaattagccgctgattatatgcgtgcgcatcccgacattctgattcagatgagtgagaaactgcaggaacagcagcaggagaaacaaaccgccagtctgaaaacggcagcattagcctatgcgtcgatcattcaggggaaccacagtatcccgtcttatggtcctgctgacgcaacagtgatggtcgccgagttcttcgattatcagtgtatctggtgtagtcggctggcgccggagctggagaaagtgatgaagaacaatgcgcatgttcgctactacttcatggaatggcccgtgtttggtagtcgctggtctgaatcgctgctggctgcaaagacaggtctccaggtctggaaagaaaaaggggctgatgcctatctgaaatatcataacggtatttatgctaccggccttaatgaagggaagctaacgaaagatgtcatcaataaagtatctgaaggcgccaggtttgaatctaaaacaatcgatacaattaacagcacgctggaagatattaataaaatagccacagatattggcctgacgggaacgccaggcatcattattatgcctgttaatggtgctacggaagaaaatacgaccgtattttcaggcatgacagaggctgagaatctccagcaggcaataaataaagcgaaagggaaataa

SEQ ID NO: 197329 - DNA, 591 bp, Klebsiella oxytoca
atgactgaagaaaaacgccctgtactgagtctgaaaagaaagccggcagcggaaaccgcagcgaccgggtccgttgacacgccaggtgtgatacggcgaaaaaaagtggtggtcgtcacgacgcctccggcctggaagctgaagaaagaaaagctggcacaagctaaacaggctgctgaagccgccgccagccagcccgcaccggaagtcgttaaatcgctcaaaacgcccggtccggttcgctatcttcgtttactgccgccggatcaagccatcatgaccctgaaagcgttctggccacagctgtttgacggtgattctccgcgtctgctggccacagggatgcgtgagcagttgtttgcagacattgagacacgggatctccctttgtcacacaagcaggtgattaaatgcctgaaaagcctgacacggtcagacctttatctgtccgttatgcaacccggcgcgccgcggtatgatattcatgggcaaatcgtcgcgacagtctctgaagaagaggcggaatatgcccgtgaacgtatgatccgtcagcaccgacagatggcccgaaaacagaataacgttgtttaa

SEQ ID NO: 197330 - DNA, 5259 bp, Klebsiella oxytoca
atgctcagtttcagtcaggtgaaatcggcgggcagtgccggtaactactacacagagaaagacaattattacgtcaccggcagcatggaggagcgctggcagggaaagggggcagaagcgctggggctggaaggaaaggtggacaagcaggtctttacggatctgctgcagggaaaaatcccggatggcagcgacctgacccggatgcaggacggcgtcaataagcaccggcccggttatgacctaaccttttcggccccgaaaagtgtctcgatgctggcgatgctgggtggcgataagcgcctgattgacgcgcataaccgcgcggtgacggtggcgcttaatcaggtggagtcccttgcctctacgcgggtacagaaagatggcgtgtctgaaacggtcctgaccgggaatctgattattgcccgctttaaccacgatacatcgcgcgctcaggagccacagatacacacgcacagcgtggtcatcaatgcgactcggaacggcgataaatggcagacgctgggcagtgataccgtcggcaaaaccgggttttccgaaaacatactggccaaccacatcgctttcggaaaaatataccagaactctctcagggccgatgttgagtctatgggttacaagacagtggatgcgggtaagcatggtatgtgggagatggaaggcgtgccggttgagtcgttttccacgcgcagtcaggagctcagggaggccgccggacccgatgcctccctgaagtcgcgggatgtcgccgcgctcgatacccgaaagtcgaaagaagccatcgacccggcagagaagatggtggagtggatgaacacgctgaaggagaccgggtttgacatccgggggtaccgcgaggatgccgataagcgcgcgacagacatcgccagtgcgcccgtcagtccggtgaaaacggacgtccccgatatcagcgatgtggtgacgaagacgattgccggtctcagcgaccgcaaggtgcagttcacgtatgccgacctgctggcccgcacggtcagccagctggaagccaaacccggcgtgttcgagcaggcgaggaacggtatcgatgcggcaatcgagcgcgagcagttgatcccgctcgaccgcgagaaaggcctctttacctcaaatatccacgttctggatgagctctccgtgaaagcgctgagccaggaggtaaagcgccaaaaccacgtctctgtcacgccggatgcgtcagtagtgcgcgaggccccgttcagtgatgcggtcagcgtactggcacaggaccggccaacaatggggattgtctccggtcagggcggcgcggctggccagcgcgagcgggtggctgaactgacactgatggcccgggagcaggggcgcgacgtgcatatcctcgctgccgataaccgctccagggattttctcgccggggatgcgcgactggccggagaaaccgtaacaggcaaatccgccctgcaggacgggacggcgtttatcccgggcgggacgctcattgtggaccaggcggagaagctgagcctgaaggagacgctgtccctgctggatggcgccatgcgtcataacgttcaggtcctgctctccgacagcgggaagcgcagcggtaccggcagcgcgctgacagtactgaaagagaacggggtaaatacttatcgctggcagggcggaaagcaggcgactgcggacatcatcagtgagccggaaaagggcgcgcgttacagccgcctggcgcaggagtttgccgccagcgtacgcgaagggcaggaaagcgtggcgcaaatcagcgggagccgtgaacagggcatactgaacgggctcatccgggaaacgcttaaaggtgagggcgtactgggtgagaaggagttgacggtcaccgcgctgacgccggtctggctggacagcaaaagtcgcggtgttcgggactactaccgggaagggatggtgatggagcgctgggacccggaaaaccgacagcatgaccgctttgtgatcgatcgggtgaccgccagcagcaatatgctgaccctcagggacaaagagggggaacgtctggatatgaaggtttctgccgtcgacagccagtggacgctgtttcgggccgataagctaccggtagcggaaggtgaacgtctggcggtgctggggaaaattcctgagacgcggctgaaagggggcgagggtgtcacggtactgaaagcggagggcgggcagctgacagtgcagcgccccgggcagaaaaccacccagaccctggccgtgggcgccggaccgttcgacggtatcaaggttgggcacggttgggtggaaagccccggcaggtcggtcagcgagacggcaacggtctttgcctcggtgacgcagcgtgagctggataatgccacactgaaccagctggcgcagagcggcagccatatccggctttactccgcacaggatgcggcccgcacgacagaaaagctggcgcgtcataccgccttcagcgtggtttcagagcagctgaaggcccgttccggcgagacagaactggatgcggccattgcgcagcaaaaagcaggccttcactccccggcagaacaggccattcacctttccattcccttactggaaagcaacaacctgaccttcacgcgtccgcagctgctgtccacagcaatggaattcgacgggggaggtaaggtcccgatggcggatattgaccggtccattcaggcgcagattaaggccggcagtctgctgagtgtgccggtggcgcccggtcacggcaacgacctgctgatttcccgccagacctgggacgcagaaaagagtgtgctgacccgggtactcgaagggaaagcggcgatgcagccgctgatggaccgcgtgccggccagcctgatgacggacctgacctccgggcaacgtgcggcgacccgcatgatcctggagacctctgaccgcttcacggtcgttcagggctatgccggcgtggggaaaacgacccagttccgggcggtgacgggtgctatcgacctgctgccggaagagacccgcccgcgcgttatcggtctcggtccgacgcaccgtgcggtcggggaaatgcagagggccggcgtggatgcgcagaccaccgcctcgtttctgcacgacacgcagctcctgcagcgtaatggccagacaccggatttcagcaacaccctgtttctgctcgatgagagctcaatggtggggctggcagacaccgcgaaagccctctccctgattgcggccggcggaggacgcgcggtactcagcggcgataccgaccagctgcagtccattgcgccggggcagccgttcaggctgatgcagcagcgcagcgccgcggatgtggccattatgaaagaaatcgtgcgccaggtaccggaactgcgaccggcggtctacagcctcattgaccgggacgtgaacagcgcgctgacgacgattgaacaggtcaccccggaacaggtgccgagaaaagcggatgcctgggtgccggagaattccgtcacgcaattcacccccgcgcaggagaaagcgatagtggacgcgctgaaaaagggagaaagcgtgccggcagaccagcccaccacactgtacggggcgctggtgatggattataccggccgtaccccggaggcgcagtcacagacgctgattatcacccatctcaataatgaccgccgggcgctgaacagcctgatccatgatgagagggtggcgagtggcgaagtcggcaaagatgaaatcaccctgccggtgctggtcacgaccaacattcgcgacggtgaactgcgcagactgtcgacctgggccgctcacaatggggccgtggccctggttgacaatgcctaccaccgtatcgggagcgtggataaagaaaatcagcttatcaccctgacagacagtgaaggaaaggagcggtttatctctcctcgtgaggcgtcggcggagggtgtgacgctatatcgccgggaagacatcaccgtgtctcagggcgaccgtatgcgcttcagtaagagtgacccggaacggggttacgtcgccaacagcgtatgggaggtgaaatctgtttctggtgacagtgtcacgctctcagacggaaaaactacccgcacactgaatccgatggaggatgaagcccagcgacacatcgatctcgcgtacgccatcacggcccacggcgcgcagggcgccagcgagccgtatgcgatagcgctggaaggcgtggcgggtgggcggaagcagatggccagtttcgaatccgcctatgtcgggttatcgcgtatgaaacagcacgtccaggtctacaccgacaatcgggaagggtggatcaaagccattcaggcctcccggtcgaaagccacggcccacgatattcttgagccacgtaacgaccgggcagtgaaaaccgcggaccagttgctcagccgagctcgccccctggatgaaagcgcggcgggacgggccgccctgcagcagtcggggctggcgcgcggacagtcgccgggaaaattcatttcgccgggcaaaaagtacccccagccgcacgtggcgttgccggcattcgacaaaaacgggaaagaagccggtatctggctcagtccgctgacggacagcgacggacgtctgcaggtgatcggcggtgaagggcgcgtcatgggtaacgaagacgcccggtttgtggcgctgcagggtagccggaacggggagagtctgctggcagagaatatgggtgagggcgtcagggtggctcgcgagcatccggacagcggcgtggtggttcgccttgccggcgatgaccgcccctggaatccgggggctatcaccgggggaagtctctgggcagacaagataactcaggcgccgggggctgatcccgttgagatcccgctcccgccggaggtgctggcgcagaaagtggcggatgaggcacaacggcaggaagtggagaaacaggcggagcgaacggcccgggaagtcgccggagaagacgataaacagcggggacctgagggccaggttaaggcggtgattgatgatgtgatccggggggtggcggggcaaaaaatgcagggggaacggctgaccctgccggacgatctggagggaagggagaaagctcaggcggtacagcaggtggtgtcagaaaacctccagcgagaccgcctgcagcagatggaacgagatatggtccgggatttgaatcgagagaaaacactcggaggcgactga

SEQ ID NO: 197331 - DNA, 528 bp, Klebsiella oxytoca
atgagctttattcaaacctttgcaggtaaacattttaactatctcgatatccagcaagatgccatcgagatagaagatatcgctaatgccctctcgaatatctgccgtttcgctggccacctgcctgagttttatagcgttgggcagcacagtgttttaacgagctatctggtgcctcaggaatttgcgcttgaagcgctgctgcatgacgccgccgaggcatatttgcaagatatccctgccccattgaaacgcctccttcctgactaccgcgccattgaagatcaggttgatgcagctattcgccaaaaattcggcctgccggctgagcagcacccgaccgttaaatatgccgacctggtgatgctggccagcgaacgtcgcgactttgagatcgacgacggcacccactggccgatgctcgacggcgttattcctaccgaccagtttgtgattaatcccgtccgcccgggccagtcttacggcatgttcatgaatcgctttaaccagctaatggagcggcgttaa

SEQ ID NO: 197332 - DNA, 198 bp, Klebsiella oxytoca
atgacgatgttgatcgcgagctgcgcgaaagatttacccgccccggtggtggttgataccgcctgcagctgggtgcggatcatctacctgaccgaccacgatattgacgtgctggataagcagaccaaacgcgacattctgacgtacaacaagtctgtgcaagctaactgcccaaggtttaaatctatgaaagtataa

SEQ ID NO: 197333 - DNA, 318 bp, Klebsiella oxytoca
atgcgtatgtcagtcatgtttgctgtcgttgctctgtttaccgggattaaccttttgtataacccgtttcagcctgtccccgcattatggggggcaaccctggccgttgcttttgtcctgataaacgtagtggcagataaaatgcgtctctggactggcgtggcatggattatcgttgccggcatcgtcatgacgatgatgctgaaggggaaagaaccgggtaacgaattaagaatggtgattaacgtttttgctttcctgagttcagcctggtacagcgttgcgctgtacagaaaagaaaaacattttcgttcctga

SEQ ID NO: 197334 - DNA, 192 bp, Klebsiella oxytoca
atgaatattgcgccagaatcccgcgaaatactgcgacagtacaaagccctgatcaatgcccgccgccgtgattccggccagcgggaactgacaaccgcgcaggtcatggatgaaatctgcgaatatatgacctgtcagtgtgccgtgtatctcggcggtcatttcatcttacagggtggaaaagaacagtag

SEQ ID NO: 197335 - DNA, 222 bp, Klebsiella oxytoca
atgaactacggcggacacgaaactctgcgccgcgatatggccgggctggcgaacaacctgtgcgacctgaaaaccaccctcactgtgctggaagaaaagtatcactaccggcatgacgggctgcctgaacggctggctggcatgagtctgcggcgtatcagcgaactgctggacaaggcattcaatatcgccctgatgctggatgaaagttttcaggactga

SEQ ID NO: 197336 - DNA, 267 bp, Klebsiella oxytoca
atgataactttggtaactctggccatcatctccatacctgtgatctatattctatgggataagtatattcgaatatacccactctcctacttcggcatcggagacgtgcagcgtgttgccaactgggaaaatcctgaatggcgagtgcgggttttttctcgaggcggtatgaccagccatgagtggataaaaatcaacacctgtcagcttgaggcgttcaaatcagagctgcaacgcagaaaagctaagtttccctcctcagattga

SEQ ID NO: 197337 - DNA, 972 bp, Klebsiella oxytoca
atgaaacgcgcccccgtcattccaaaacattctgcgagtaccgcacctgcggaagtggcaacgtcccccgctccggccgcgccaatggttgattcgttgattgctcgtgttggggcaatggcccgtggaaatgcaatcgctctgcctgtatgtgggcgagaagtcaaatttacactggaagttatcccaggtagctcggttgaaggtaactccagagtctggtcaggtaatgaacgtgatcaggagcttctgacagaagacgctctggacgacctgataccatccttcttactggcaggccagcaaacacctgctttcgggcgtcgggtttcaggtgttattgagattgcggatggtagtcgtcgacgaaaagctgccatcctgacatccagtgactatcggatccttgtcggcgaccttgatgatgaacaaatggcggcgctgtcacggctaggtaatgactatcgtccaaccagcgcctatgaacgagggcatcgttatgcaactcgcctgcagaatgaatttgccggcaatatctctgcgcttgccgatgccgaaaacatctcgcgcaagattatcagtcgctgtatcaatacatccagattgccaaaatcggttgttgccctcttctctcatcctggggaactttcagcccgggcaggtgaaaccctctttaaagcttttgccgataaagaggaattactgataaaacaggctgctaacctgcatgggcaaaagaaagcgggagtgatttttgaagccgatgaggttattactttactgaccgctgttctgaaaaatacacctgcggttagatctaatctgagctcgcggcatcaatacgcaccaggtgcatctgctctctacaagggggataaagttatactgaacctcgacagaacgcgcttgcctgcagaatgtattgaaagaattgaagccattttaaaagaactgggatctacagcttcataa

SEQ ID NO: 197338 - DNA, 393 bp, Klebsiella oxytoca
atggacagaatcagtgaagaaagacagacaggcacagacgtgatgaacgtcgccttccacaccatgcgcaagtacggcatgaatatcatcaccgccacgcagcatatggatattaatgcttacgtgaaatccgacccgcggatgccgagaacgcggctgcgccgctacctggggcagtatggcctgcgcggtgaggcgctgagcagggaggtcagacgtatcgttgcgggacctgagcgacgcgacagcacgctgaaggacgggatttactatacctggccttatggctgggagccctgtgattttacgccgatgatgcggcgcatttttcgcgggaagcggacccgccatgtgatgatgtttgatgaaatgccagcgctgtttggcaaataa

SEQ ID NO: 197339 - DNA, 939 bp, Klebsiella oxytoca
atggcgaagatccaggccagaaatgttgacgatgcgctgtttgcgcgcattgagcagtcagcaatgaaaaatgaacgttccctcgagggggagatccggattgccctccgggagtattatcagcccgtggttcaggccgggcccgcgatgtctgacagggagcgctggcagcatgaaacgggcaagcggctgaagtggttgttcaaccggctcatggcggacaattacttccgggaatttgccggagccagaccgccggacacgtttgacctggtccgcttcggcaggcaactggatacctcgccgggtgtgctgatggatatcatggaaggacgccaggagctgtcctttacgctggcagatacgatcgcccggaattttgatgcctcggcggactggcttctgggtgaaagcgggcaaccttttccgtttgtccgcctgggctctgcggggtacagggagtttttctttcccgtcggcagtacaggcgaccacacgtttgagtttctcagaatagccggcggcaggcatgacggcaccctgatcatcctgcgtcaggatatacagacgaagcgggtcacacccggcgttgtcacggagagtttttacctgcgcagcggcatgggaagcggcggatacggcaacctcaaaaggtttctcctctttctcaaaacagaaggtgcacggctgtccatcaacacttatgactggacgccggagcacccggattttgatttctggacggtcatcggccagcatcatcacgtctatttccaggactcgccccgccgttcatcggcccgctggctgcagcaggtactcaacggtgaagatccgggagaatggtttcagggcggctggacaccgatactgaaggaagtggctgcggccaccgggccggatacggcttccggacatactgaccaccaggatgaatga

SEQ ID NO: 197340 - DNA, 1011 bp, Klebsiella oxytoca; identical to SEQ ID NO: 142260

SEQ ID NO: 197341 - DNA, 1416 bp, Klebsiella oxytoca
atgcttattagtcgtccgttccctgtacaagtactgccattgattatcagaaatgcggtttatgaggtaactcaaaatacacaggcaccattagcgctagttgccgcatctgcccttggtgctatttcccttgccagtcaaaacgggattgatgtttgccggtttaatcatttgcgtagtcccgtatctttatttttgctgacactggctgattctggagaaaggaaaagcagtgtggataaagcattaatgaagccgctgtacgatttggaggaacaaaagtttatacaatacatgagggattatgaaacctgggaaaataacatgcaagtgtttaatacccaacaaaaggcgttaacatcaaagctgaaatcggagatcaggcgaaataaagattcttccgcgactgaagcacaattaaaagctcttatggaaaaccgcccggaagagccagtaaggtacaagttgatgtttaatgatgccactccggcggcgattaaacagtttctctgtggtcaatggcgggctattggcataacttccgatgaagcaggcaccatatttaaaggtcatacactaaatgatctgcctttcatcaacaaaatgtgggatggctcaacattttcagtggaaaggaaatgtagcccggaacaatttattaaggatgccagagttactctgtctgcaatgctacaacctgttatttttagagcatatcaggagtctaatggagagatggctaaagggataggtttttttgcccgcgccttgctctgtcagccagactcaacccagggttacaggaaaattaccagcccagtgacttcaaccgaacatttgccagtattccaccaacgattgatggagatcatcactgaaaatatgatacgacatgatgaaaataaacgggaatgcctctttttttgtcctgaggcggaacaacgaatgattgagttttataataaagttgaatctgagatggggatgcttggttttctttctgacttcaaagactatgcttctaaggtcacagagaatatggcgagagtagctgctttactgcactacttcgaggggagtggcggagatatttcactcattgctgttgaagcagccatacagataatttcatggtacgtggacgagtatgtaaggcttttctcaaaacagcaagaatcgacacttgtaggctcagaggctcacgatctttactgttggataaaagaatattgcgtgagaaatacgatcccttatctcagaaaaaacacgatattgcagtatggccccaatcggttcagaaacaaagcgacagtgagcgaattactaagcactctttactcacagcgtaagataatggctgcgaagcgaggtaaaactatatttatccagcctgtggagaccactgatttggtttga

SEQ ID NO: 197342 - DNA, 165 bp, Klebsiella oxytoca
atgtctgacggttttgaggaaaatgccgagtttttcactctgacctacgaagctgagaagtcggttagccacaacttggcctttgttcgcattgcgccgttgctatggctacgcgcgggtgcgcgcggcgaacgtattgaaaaaataccgggtatacggatttaa

SEQ ID NO: 197343 - DNA, 285 bp, Klebsiella oxytoca
atgcaaaaccatcatgaaggttgctgtaaacatacagagcaccaacacgaaggctgctgcaagggtgaaggacatcaccacgaaagccgccacagtgagcaccatgcaggctgctgcaaaagtgaagagcatcgccacgcaggctgtcaccagaaacatcaccacgaacagggtgcggacgccgccacggtcgcggcggaggtggtggtcgtcgccagtgcatctccgtcactaacaacgaagtcgctgccgacgaacagaaaaaattgcgcgaacagggcttaa

SEQ ID NO: 197344 - DNA, 360 bp, Klebsiella oxytoca; identical to SEQ ID NO: 142263

SEQ ID NO: 197345 - DNA, 318 bp, Klebsiella oxytoca
atgccggcgctgcgccgtcgcctgctgggattacgtcagctgccggtgacgccgcaggtgacggccatcgtcaccgtcgcggatgcttcgtataaagattatctggcggatctcgacggctttaatatcgaatgggtggtaggccacaacccggcgttcgtcgccgagcggctggctcaggtcaaggtgccgtcagaagattattttatctggctgaccggagaaggcggcgtggtgaaatcgctgctggcgcgctttgaggagccgagtatcgatcagcaactggtgcgttcgcaggcgtactggcatagcaaataa

SEQ ID NO: 197346 - DNA, 1650 bp, Klebsiella oxytoca
atgtctcaattcttttttaaccagcgcgccagcctcgttaacgacgtgatcgagggaaccattattgccagcccgtggaacaacctcgcccgcctggagagcgacccggcgatccgtgtagtggtacgccgcgatctgaataaaaacaacgtggcggtgatttccggcggcggctccggccatgaaccggcgcacgtcggctttattggtaaaggcatgctgaccgccgcggtctgcggcgatctgttcgcctcgccgagcgtcgatgcggtactcaccgcgattcaggcggtgaccggcgaggcgggctgtctgctgatcgttaaaaactacaccggcgatcggcttaacttcggcctcgcggcggagaaagcgcgccgtcttggctataacgtagagatgctgatcgtcggcgacgatatttcgctgccggataacaaacagccgcgcggtatcgccgggactattcttgtgcataaggtggcgggctatttcgccgagcgcggcttcaacctcgccaccgtcctgcgtgaagcgcagtacgcagccaacaacaccttcagcctgggtgttgcgctttccagctgtcatctgccgcaggaagcggaaagcgcgccgcgccatcagcccggccacgccgagctggggatgggcatccacggcgaaccgggagcctcgacgatcgcgacccataacagcgcggaaatcatgcagattatggtagagaagctgaccgccgccctacctgaaaccggccgcctggcggtgatgctcaataatctcggcggcgtgtcggtggccgagatggcgattctgacccgcgagctggccaacaccccactccatgcgcgcgttgactggttgattggcccggcttcgctggtaacggcgctggatatgaaaggcttctcgctgaccactatcgtgctggaagagagcattgaaaaggcgctgctgtcggatgtcgaaaccgccagttggcagaagccggtgcagccgcgggctgttaatatcatgccgtccgcgctcgccagcgcacgcgtcgcctttacgccatcggccaacccgcaggtgggcgattacgtggcgcaggtgaccagcaccctctccggcctcgaaacccatctcaacgcgcttgacgccaaagtgggcgacggcgataccggctccactttcgccgctggcgcgcgtgcgattgccgctctattgcaacgccagcaactgccgctcaatgatttacccacgctgttcgcgctaattggcgaacgcctgacggtggtgatgggcggctccagcggcgtattgatgtcgattttcttcaccgccgccgggcagaagctggagcaaggcgccagcatggcggaagcgctgaacgccggtctggggcagatgaaattttacggcggcgccgatgagggcgaccggacgatgattgacgctctacagccggcgctggcggcgctgctggccgaaccggataatctgcaggccgctttcgccgcggcgcaggccggcgcggatcgcacctgccagtcgagcaaagccggcgccggacgcgcctcctatctcaatagcgagagcctgctcggcaatatggaccccggcgcccacgcggtggcgatggtgtttaaggcgctggcggaacgctaa

SEQ ID NO: 197347 - DNA, 1419 bp, Klebsiella oxytoca
atggtaaacctggttattgtttctcatagcgcccggctgggcgaaggtgtcggagaactggcccggcagatgttaatgaacgatggctgtaagctggcgatcgccgccgggatcgacgatcccgacagcccgatcggcaccgatccgattaaagtcatggaggcgatcgaatccgtcgccgataccgaccatgttctggtgatgatggatatcggcagcgccctgctcagcgccgaaaccgccctcgatctgctcgatccggcgatggcggcaaaggtgcggctgtgcgccgcgccgctggtcgaagggacgctggcggccaccgtcagcgccgcctccggcgccgggatcgacaaagttatcgccgatgccatgaacgccctggaagccaagcgggttcagctgggtttaccttcgcacacgcctgacgccgccgccccaacgcttgctgacgacggcgatgctaaatcggtttcagtcattattaacaatcacaacggcctgcacgtgcgtccggcatcaaagctggtcgccgcgctggcgggttttaacgccgacctggtgctggagaaaaacggcaaatgcgtcaccccggacagtctgaatcaaatcgctctgctacaggtgcgccgccacgataagctgcgcctgctggcccgcggtccggacgccgatgcggcgctggcggcgtttcaggcgctggccgccgataacttcggcgagtcaccggaggcgcagccgacagcggaacccgccatacctgcgcgtgttgaaggcgccgcgatgctttatccgctggcgccgatccaaccggcgctccccgccgccgccgacatcgcccgcgagcagcagcgcctgcgccaggcgatcgaccagacgctggccgatctcaatgcgctcaccgagctggcggaacacaaatttaacgccgatatcgcggcgatcttcgccggtcatcacaccttgctcgacgatgaagatctgtttgatgccgccaacgatcgcctgctcaccgaacagtgctcggcggaatgggcgtggcatcaagtgctgatggagctcagccagcagtatcgtcagctggatgacgcctatctgcaggcccgttatatcgatgtcgacgatattctgcagcgcacgctgcgccatctgcagggtattaaggagacgctgccattcgccagtgagccgacgattattatcgccgacaatatttatccctcgactgtactccaactggatgccagcaaggtcaccggcctgtgcctgcgcgacggcagcgaacagtcccacggcgcgattatcgcccgcgcggcggggatcgcctggctatgccagcagggcgaagcgctgaatgatattcagcctggcgaagccatcacgctcgatatgcgtctgcaacgtcttattcgtcgctaa

SEQ ID NO: 197348 - DNA, 633 bp, Klebsiella oxytoca
atgtcactgaacagaacgcaaatcgtcgactggctgtaccgctgtggcgacattttcaccaaacagagcgattttctcaccggccttgataaagagatcggcgacgccgaccacggcctcaatatgcatcgcggcttcagcaaagtggtcgaaaagctgccgtcgatcgccgataaagacatcggttttattctcaagaataccgggatgacgctgctttccaacgtcggcggcgccagcggcccgctgttcggcaccttctttatccgcgccgcccaggtcacccaggcgcatcagagcctgaccctcgacgagctttatcagatgatccgcgaaggcgcggacggcgtcgtcaaccgtggtaaagcggagccgggcgataagacgatgtgcgacgtctggctgccggtggtggaatccctgcgtcattccagcgagcaacatctgtctatccctgccgcgctggatgccgcctgcgaagtggccgagcgcgccgcccacgccaccatcaccatgcaggcgcgtaaaggccgcgccagctatctcggcgagcgcagcatcgggcatcaggatcccggcgcgacctcggtgctgtttatggttcagatgctggctgccgccgccaaagagtaa

SEQ ID NO: 197349 - DNA, 1071 bp, Klebsiella oxytoca; identical to SEQ ID NO: 78944

SEQ ID NO: 197350 - DNA, 327 bp, Klebsiella oxytoca; identical to SEQ ID NO: 95810

SEQ ID NO: 197351 - DNA, 276 bp, Klebsiella oxytoca
atgctgcatgcagtgaatacgcagcatggtctccagcggatagggccgccggccattaccagccttgggataaaacggctcgatgacttccaccatattctgccatggcaaaatctgctccatgcgggagaggaaaatctcttttcgggtctgacggcgcttactgctgaattcactgtcggcgaaggtaagttgatgactcatgatgaaccctgttccatggctccagatgacaaacatgatctcatatcagggacttgttcgcaccttccctaa

SEQ ID NO: 197352 - DNA, 684 bp, Klebsiella oxytoca; identical to SEQ ID NO: 142278

SEQ ID NO: 197353 - DNA, 1689 bp, Klebsiella oxytoca; identical to SEQ ID NO: 142279

SEQ ID NO: 197354 - DNA, 1038 bp, Klebsiella oxytoca; identical to SEQ ID NO: 142280

SEQ ID NO: 197355 - DNA, 843 bp, Klebsiella oxytoca; identical to SEQ ID NO: 142281

SEQ ID NO: 197356 - DNA, 141 bp, Klebsiella oxytoca
atgcacacacaaaacgtcaacaccgccactcgagaatcagccgaacaatttaaaacaggtaaatatcatcgctactgtgtgactgacagtgaagagcgagaggattttatccagtcactttttttaccccgtctgcaataa

SEQ ID NO: 197357 - DNA, 387 bp, Klebsiella oxytoca
atggcagccagctggttacgccagtattcggattacagtaacggcgcatgggattactggattattccgcagggtgtcggtgggaatgtggcaccgaaccggattcagttcattacaacacagacgggatatattgcgccggcaggtgaacagtattacagaatggtgatacccgaaaataattttgatagcgacgtgagtgcagatgctgccgggatcatctccacgctgatgataatgaactggttgtcctggcaggttgcggatatgggggcgggatatacccatgtatgtaaacatctcattgcccgacaggatgcgctgagaagttatctcagcattattcatcatccggagagtcatttaatcttgcgagcaattgattga

SEQ ID NO: 197358 - DNA, 477 bp, Klebsiella oxytoca
atgcggaacatcatcattgccgttttttttgtattctcgtttaccgcccacgctgctgattgttttacccttgccggacgcgattacaaaatcgacccggatctgctcagggctatatcctggcaggaatcaaaattcaaaattgacgctatcggaaagaatcctgtctccggctacggttcaggactgatgcaaattgactcacagcattttgaaaaactgtcgagctttggaataaaaccggatcacctgttgacggacgcctgcctgaacatttacaccggcgcctattacctggcactggcgtttaaaaaatggggagtgagctgggaggctgtcggagcttacaatgcggggtttagcagaacggacaagcaggccatgagacgtctgcagtatgccaggaagatcgaggccatttaccgggctattaaggcgaataacaaagcgggccaggttcagccgacacaacgataa

SEQ ID NO: 197359 - DNA, 150 bp, Klebsiella oxytoca
atgaaattaataatgtgcagtacattatttaaatgtgtagaaacgattcgtgtacgaatccaaagagagtcgttagtgaattgtacgcaattcagtagtgactatttttttgaaaaacatttatttgcaagtgccatgaatctatattag

SEQ ID NO: 197360 - DNA, 705 bp, Klebsiella oxytoca
atgtgtgcgatggatcgtagtagcgatgacagcttaagtcaatcagtaagggatgctcttaatcacataaaagagttgtatcattcttcgcctgtctcagtttgtgtcagaaatgaccgccatgaagtattatatgctaattcctcctttcaacaggtgtacgatttttttcagcttgaaagtaataaatctattttttcaggtaattcagttaagcttgagtacattctttctcagtttgagtttgattgtatgtccctgggaaaaggttgtgttctttgtaaaaatttttcctgtggagactattacttccaggttcgcatggaatgcatgttcatttcagatgaatgtctatatgttttgtggcaaataaacctattaattcaacttccattagtcgggcgtaaaattgagttccccgataatccgaatgcggatgttagttttgaatttgtgatttctaagattccagttagaaacctggcggtattgtcgttttctattttagggttcacatatgcggaaacggcattttacgttgatcttccggtatcaacagttagaaaaagagttgagaaatcacgggagatcattaaagagtccttttcatcttacagtatttttataatgcatatttataaaacgaaaaggatattcttttttgtcgacttcgtttcagaactttttgatgttaaacatttgtga

SEQ ID NO: 197361 - DNA, 567 bp, Klebsiella oxytoca
atggaacacggcgcacgactcagtactacccgtgttatcgcaataggatatgtgtgcctgggagcggtcgccgctcttagcctgacgacgaatatcattcaggggattaataactaccgcctgcagaacgaacagaaggtggctattactcccatgctgttcaatgcgcctttcgctgtttctcagaaccaggcggacgcatcctatcttgaacaactgtccctcagctttattgctttacgcctgaacgttacacctgaaactgtggatgcgcagcatgcacagctgatgaaatacgtttatcccgcctcacagaacagcctgaaagttcagctggctgaagatgcgaaacggataaaagataacaatgtgaacgccaccttttatatgacgtcaattcgatcgtaccctgccgaaaatcgtgtcgatatccggggggaactgaaaacatggatcggcgattcatccccatatactgaaatccgtcactatgttctgcagttttaccgtatggatggcatcagctggttatcccgcttcggggagataaataatgaaaaaaattaa

SEQ ID NO: 197362 - DNA, 942 bp, Klebsiella oxytoca
atggctgagaataattttaagccgtttgccgttggtgcaggtgcaaatgtgtcttcgcagacagactgggaaaaactggtggcgctatctactggtttcactgcgggtatagcccgttcagaccaggtcaacaaagcattacgtcaggcaacagttattgccagcgttctggctcagtttattgcgaataaaacaaactcagatgtacttgatgatggtgatactgatgcgttgctcatcaaattagttcaggctttaaatcttagtggtgacgagcgctttctgaagactgcaaacaacttatctgaaatatcaaataatggaagcgcagccaaagcgagtgcaagaacgaatctgggtctggggtcagcagccacccgcaatacgggaactgatggtgatgctatccccttgttgtccggcgtaaacgtatggtccgccactcagtctatggctggttccggagaggtagataacggagaggttcgttccgcggctgatatgttttatccctatggaaccagcggaacaatgtggtctgaattctatagctcagacatttcagaagaccattttgaacaccgtatcgtggttagtaagagcggtgcccgtaagtactttcgttttaaagaaagcggagagttatctgccgaaggagatatcaaggccggaggtggcgtttatgataaaggtggtcgtgtatacagtcctgataataaacaaccgcccaattatattgatgaaataggagcgtacgcttttgcctggtatgatggggtagttgaatataacgctacggtaagtggaacagcgctgtttccatcaaccggcgatggaaaccattcctcatcggcgctaagcggaacatggcgctgcatggggcgcactgaaacaataaatgatcagcacagaacgaccctctggcagaagattgctaattaa

SEQ ID NO: 197363 - DNA, 654 bp, Klebsiella oxytoca
atgccttcttctaacgaaacccgcagcggctcccttgatgaaactttcgagtcagaacgaaaagttttaaaggagcaaatccgcgtcgcgctgcccggcattattcagtcatttgaccccgactcagtaactgcagttgtgcagccggcgatccgctatgttgagcgtgataacgatggcgctactgaaacacaggattacccactgcttaccgatgttccggtgattttccctcgtgggggcggctgtacgctgacattcccagtcaaagagggggatgaatgtctggtgatttttggtgaccgctgtatcgatttctggtggcaaagcggcggtattcaggagccagtagacgacaggatgcacgatttatctgatgcgttctgcattgtcggcccacaatcacaggcaaaaaaaatcagtggcatcagtaccagctcggtagaactgcgtaccgatgatggcggtacaaagctgagccttaatccttcgagtggtgaaatcaacggtaccgcgccgggtggttttaatctgaatggcctgaaaatctacccggatggtcgcctgcagctggtggatggttcctatgttgataaacatacgcatggtggtgtcgagcctggaggcagcaatacagacccattagggggataa

SEQ ID NO: 197364 - DNA, 534 bp, Klebsiella oxytoca
atgaccaaacaagtgcaggaacagaatgaaaaacaagatccactcgatgaatttaaagaacctgactttgcaaaattaaggttagggctggatgagaaacttgtatattcattttttaactacttttctagatttgaacatgcgttaaaaaggaataatttctctaaattaagtaaaaatggggaatatgttgttggggttaagtgggaagattattcaaaaacagtgcatattccactcccaactgaaagccataaggttaatgctgctataaaatatatttgcaataaccctgtgaaaaaattgaaagcagatggaacctgggacccacagccgcaaatacaaccagaaaatactagcgaggtaattcttgaaatacctaagattaggaataatctctttcatggcagtaaatatttgaaagttgatccggtaagggataatgaacttctaaatcatgccataactatgctgaaattttgtttggatgtgaatccagatttgcgtagagagtttgatgaaacagggcagtaa

SEQ ID NO: 197365 - DNA, 336 bp, Klebsiella oxytoca
atgaaacgactctgtttggcgttagcaatgatggttactgctccggcgatgtctgccattcagtgcggtagttacacaatgaccggcgacgggatgactgtcattaacggagaaactgttacatctcagaaagtaaaatttctgggaaaagatggtgactactcaaacatgaaaatggaaatggggctgatgccagcgcgagacggtaacaattatggcttcgagtttgttaagcgtaacggaaaagctttcctgaacgtccaactgctgcagaacagcatggatgcgccgaagctgattggttcatttccgtgccagaaggtaactaatcgatga

SEQ ID NO: 197366 - DNA, 486 bp, Klebsiella oxytoca
atggaatgcaagattaaaggcgtgaattaccgcgccaataagctgggcgtatttgaacagttgaaggtatcccgcaaattattaccgatcctggctggcctgatggctgattttagcagcatcaaaaatcttcttccggctggtggcgtaaaagagctatttccggaaggcggcgaggaaggtggcgaagccgttaatttggaacggttggagccagttttcaacacgctgctaccgcgtatcgctgacgaactgtcaaaactcaccgaagaagacacgaacgctatcatccatccctgtctcgctatggtggtgcgtgaaaacggcaaacaatggacgccagtcttccgcagtggtgaattgatgtttgatgacattgatctgttcagcatgctgcaactggtggcgcgggtggtcgccgatagcctgggaaattttttgccagaactccccgacaacgcgacgcctaccccgaaagcggactga

SEQ ID NO: 197367 - DNA, 441 bp, Klebsiella oxytoca
atgtctgcttattcgtttcttgatatctcggcttccctggctggacctacgggagctattgaactcggtgctggttcagcgaactccgaagaggggatcgtggttgcgatgaccgaggcaaaaaacaccatgaccatcggcgcagatggtgagggtatgcacagccttcacggcggcaagagcgggacgattaccgttacgttgctgaaaacttccccggtaaataaaaagctttcgctgatgtacaacgcgcagagccagtcctcttccacctgggggaacaacgtcattgtcgtccgtaacaaagcaagtggtgatatcgccacggcacgcggtgtggccttccagaaacaaccagactggaacaaccctaaagtcgccggaacggtcgcatgggtatttgactgcatcaaaattgatgaactgcttggggagttttaa

SEQ ID NO: 197368 - DNA, 408 bp, Klebsiella oxytoca
atgccaaaaaacagtcttcttccaacaagtgatcagtttcgcgccgatttccctgaattctccgataaaacccgctacccagattcatcggtaaatttctacctcaaccaggctgattttcttctcaatcaggacgtctacggttgccagttcgtatatctcgcagagctattcacagcccattataccgagcttcgaggtcgcgcacttgctggcgcggctgcaggtggggtgagtagttctggcggcggcgttttgacctctaagtcggtggacaaagtcagtgccagctatgacgtttcagggattatcgatcctgatgccgggttctggaataacacggcctatggtcgtgaattctactggtggtggtcaatggctggcgcgggagggagacagttgctatga

SEQ ID NO: 197369 - DNA, 369 bp, Klebsiella oxytoca
atgaagtatctcgttaattctggcgcgacgttgagcctggctgatggttcaaaatttgaaattaccaaaggtgttcacagtggcgcagatttcccggaaagcgtgaaatctcactgggcattcgcatcttatgcgaagcagatcaacgatgcggaagcggataagctggaagcagccaatgctgacctgaaagcctatgtagcctctctggagactgccaatgcctcactgttggcacagattggggaaaaggataaggaaattgcagatctgaaggcggcagcagcaaagcctgaagagaagcctgccactggcgaagaaaagcaggagactggcaatgccaaaaaacagtcttcttccaacaagtga

SEQ ID NO: 197370 - DNA, 1287 bp, Klebsiella oxytoca
atgaaatatttcttcactacgcgcctgggggaaacgcggtatatccaggcggatggctcgttgttgtgtaaagacgtcccgatcgccagaacgggaacgcaggtttatctacctgaagaaatagaccttgaaccagacgccagcggcaccgttacggtatggcgaactgaggatgaagtcttttctcctgagacgatggcgagctttgaaggtgttgctgtcacgctgggccacccagaagacgggcagggcaatatcgtattcgttaacccatccaactactcagaactggctcacgggcacatacagaacgtcaggcgcggtacaggtgagcaattcgacttattgatcgccgatgttctgattaagcgtcaggaggccattgatgcggttaacgctggtcttcgcgacgtcagttgcggctatgacgcccagtacaaacaactgtccccggggcggggtaagcaatatcagatcaccggaaatcacctggctgttggcattgaccgtggccgggctgggggccgatgtgcaataggggactccatcccatcacccaaaggaaaaaaaatgaaacaaccaacgttactgcagaaactggtagcggccattcgtacgcgtgatgacgatgcgttggctcgcctggctgatgaggctgcggcagaagatttaccctctgatgcgatgggctctatccctgggccaacaatcaatatcaacgtgccatctcaggctaccgctttgccgacagagaaccggacaactacggatgaaaatccgggagataatccggataagaaagagaagactggcgatgatgatatccctgcctgggctgttgcgctgattgcccgtctggacaagctcgaaggtaaaacaggtgatgatcttcctgatgatgtcaccaccacggctgacgaagacaaagaagaggattcgaaggtcactggtgatgcggcgtttaagcgcaacatcatcgccgatgccgaaattatttgtccgggcttccagcctaatggcgataaagggctcaagcgtcagattctgaaccacgctctacgcactggtgacagcctgaaagcatttggcgttagtgatttcgctacagctcctaaatcgacggtagatgccgtttttaaggcggcagtcgaaatcagtaaagcaaaaaatcacctgcaaccgctgagcaacctcgtcaggaccactgatagcagcactagcaccaaacacatgtccccggctgagctgaacaagatcaacgccgatttctggaaaaatcgcaaataa

SEQ ID NO: 197371 - DNA, 348 bp, Klebsiella oxytoca
atgtacttacacctgaccgaatcctctgcagtcctgggaatgcaggccactgcagagacagagcgcacgtactggctgagtcgtcgtaacgatgcgctgaaagcaccggaagaaatcgatgttcatgcctttcatgaggcgctcggactgatgtacccgctgaactggtcaacgagcgaaaacaatgaatgggagtccttcatgatggctgaaatgtactgctgtgatgtaaccgaaatttacgcccggaacggagcacattactaccgtctgcgggacgtgtgtcaaatgagccatgcgcagattaagacgcgcattaaggaggcgctgaaactggcccagaaatga

SEQ ID NO: 197372 - DNA, 279 bp, Klebsiella oxytoca
atgaaatataaaacccttagccagatacatgccgaatcgatgagcgatcctgaatacagtgcggcatatgaggccgaagaatcctcagagcagcttcaggaaacattagcaacatggcgaaaagaggccgggctgacgtcggcacaggttgcagagcgtatgggtatcaaagcacccactatctcgcgtatagagaagaacgcttcacggatgagcatccagacgctgattcgttatgccagagcctgcggcgttaacttcaaaattcagcaggtttaa

SEQ ID NO: 197373 - DNA, 321 bp, Klebsiella oxytoca
atgtttactatcatttttcatgatgaagctgaaaaagagtttgttgccctgcctgctgcgatccgtgcaaaaatgtcgcgcatactcatgaagctggaagcaaaccctcgccagcttcgtgagccagacacaaagccgcttgggaacggtcttttcgaaatacggacaatgggtactgatatcgcgcgtggactttgggtgtatcagagcggagaacgcatttttctgctccggattttcatcaaaaaatcgcccaaaactcctccgggagagatagagcaggcacttcgcagattagaggagatgcagaatgaaatataa

SEQ ID NO: 197374 - DNA, 210 bp, Klebsiella oxytoca
atgagtacacgaaacaccaacatcaaacccgccgcaccagaatcttcccggaagttggggaaaaaaattgcacggattatcgatcgtggacactacaacatggcctgttcgcaggaagctcatgcacactacggcgagaagttcacacgtaccgatgcctttctgtgcttcattcgtagcgtactgtctgaattttttaaaaaattctga

SEQ ID NO: 197375 - DNA, 315 bp, Klebsiella oxytoca
atgcacacacgaaacgtcaacgtcaaaaccgccgctcaagaatcttccaggaagatggggggaaaacccgtgtcatacacgatcctcattgctgagacgaaaaaaaacgtagaggaagaacatgatgtcatggaattcagcagcctgatggcgctgaaaaaatatcggagaagctatccagaaaaaatgggcttcagctatttctacgcgctcagcagcggcattgataagcagttccgtcatatcaacgtggcagaagctgatcacttcaaacagtttgtgcgcctgattgagcgaacaggcttcgatatctag

SEQ ID NO: 197376 - DNA, 486 bp, Klebsiella oxytoca
gtggcaaatgactcatcaacagagctggcacgcgcccattttttcagtcatttttcttacacacgtaacgacctggccggagattatgacaccgagttgctccgctatcgtgacgatatctgggactacccgcagcgtgcagcccgcctgagtgcagcagtgaagcgatacaaaacttaccggatgctgtccttcatttttgagattgcggagagtgtcgatctggacttcacgccccttgtggtgaaacgcctgtgtaccgccctttttggtcgttcaggaagtcagaatattattgtggcgacctttggccagaaaggtcgcattcaccgcagccgtgacagttcgccctctgtcataagtgaagtggcagagcgctaccgactggcagcacactcctgctgggcctctaccctcagcgatattgaaagcgtcaggaagcactatcaggccggtattcgcacggccagaaagcaggaggactaa

SEQ ID NO: 197377 - DNA, 195 bp, Klebsiella oxytoca
gtgtttcgccatgcggtatcaggaaaactgttatgccggcttgatgcaaagctgacgcgggatgactggatgctcttacacggtttgctcagtctggtgtaccgggcaggcatgagtaccggcagtgaacagcgggctgcagagataagggacgctctggggtatacggcggagaacgaacagaaaaaagtatga

SEQ ID NO: 197378 - DNA, 732 bp, Klebsiella oxytoca
atgatcccctcatcccatgccattgtgaccctaaaaccggcacgacaggctgctttgcaggccatcatgttcgtggaagacgctcagttacggggggcgcgtttgccctcaatgccccatgtccggacatttttgcgaattttgaccaggaacagccgcatgaacacggcagtggcgcagcgcattcccggcctgaactgggacccgaagcatcgcctgagcagcctcaaacaggtggaggaggcgctcgatgaactgattgccagccacggggaatgctgcccgctgccgctgccggtggatgttcaggccgaattgtttccggaggtgcagcacacacggacagaacgccggttgcaacgcagaaacatcgcgtttacccgtaagatgcgccgggaagaacgggcgctggcgcatcactggcggttacggcagaacctgttgggacaggcagtcacggagctgaattttcagtcgccggagacggtcagcaactggtatcgccggtggaccgacgagtttgacgcgcgggagctggagcctgctttctggcactggcggtcgcggtttgcctcgctggactccctggactggctgcgtgacgcgaaggagccactgtacggggtcattcatgaaatcggcttcatcgtgagtgactccccggaggctgtccgtcaggcggaacgctggcaggtacccaacaaactggcgctgcagaggcgagcggtatga

SEQ ID NO: 197379 - DNA, 1995 bp, Klebsiella oxytoca
atgtcagtcaccgagtctaaagcaaaaacaccggcaaaaaccagcaaaaaagcggctcaggctgcagccgctgaaacccttaaagccgcactggaagccgctacgcttgaatatgtgcccctgtccggcctggtcaaatcgccgctgaatgtccgtgtgatcccttacccggaggccagcgtacgcagcatggccacctccatcaaagctgtggggctgttgcaaaatctggttgtccacacgttgccggacggaaaatctggcgtagcggcaggaggtcgtcggcgcgaagggctcaacctgctcgccagcgaaaaggaaattgacagcgagtatctggtgccggttaagcgtgtcagcgacgaggtggcgcggcttgtttcttttatcgagaacgatgaacacctcgcgatgcatccggctgagcaaatctacgcctttcgcgacctttcagctcaggggatgacacctgagcagatcggtgcccagctgggttacggtggccgccacgttaagcgcatgctcaaactcgccgggctggcaccggagcttttggctcaactggcaaaggatgaagtcacgattgagcagtgtcaggcgctggctctggaaaatgatccgacccgtcagctgcaggtctatgaaaacgtcaaatccgcctatggccataccgcgccatatctgctgaaaagtgcggtgacagatcgggaaatttcattaaccagtcctgattttgagtatgtcgggcgtgaaacctacgaagctgcgggcggtatcgtacgtgaggatctgttcagtgcggaagagggggagggtacagcggacaaggtgctgattgagcgcctgatccagacaaaattgacctcgctggccgtcgaaatacagcaaagcgaaggctgggcgtggtcacaggcccgtagcgctcccctgcgggcatggggagatgacacgaagcatttccagctgagctccgtccccgaagcaaatttcaccactgatgagcagcagcgtctcgatgagctttatgccacacaggcggcgaccgaaacacacgatgatgaatacgctattcaggcactgattgacgaaatggagagcgcggccatcaaccgtgaatggacgccggaccagaaagcagaatgtggcgtggtggtcagcttctggggcgcggaagtgaacattcagcgcggtgtccgccagattgccccggagcgggaggaggatgaacaggctgaccggaaaaaaaacaccgtcatcactaaaaaaattgaggaacccgtggacagcatcagcgaaccactgctgaaaaaaatgtcttccgagcgcacccttgccgttcaggctgcgctgatgctgcaaccacaaaaagccgtggcgatgatggtctggcgactgtgttcctgcgtgtttgactacggtggcatgtcagccagtcatcccttcgacatgaaagtcactgagcatcatacatcccttgtcagcgaatctcctgccggaaaaaccggaaaagcctggcagacgctgatgcaggaaaaagcacgcctgcaggcactgttaccggagggctggtcgaaggatttcaccacgtttttcaccctcgacggggaaaccctgatgtccctgatggcgttctgtaccgccagttcagtgtatggcgtgcagacccgaacaatggggcataccacccgtagttaccttgatggtgtggaaacagcgatcggcttcgatatgagggactggtggacaccgaccgcagacaatttcctcagtatgctcagcaaacagcagattgttaatgcgcttaacgaggcaggaagaacaggtgcagcagctgatgccgggaaaatgaagaaaaaagatgctgctgagcatgcagagcatgccctcgcggagacccgatgggttcctgaatggatgctgccaccggccacagtgaaacccgtcatcactgatgatgcagcagacgctgatgatcatacggctcacgcagcctga

SEQ ID NO: 197380 - DNA, 243 bp, Klebsiella oxytoca
atgaaccacaacgttatgccccctctgaaatccctgccagacggcacgttcacccgtgaacaggcgtcagaggtggcatcgcagtatcagaatgtggcgattgaagacgatgagggtacccactttcgtctggttgttcgtcgggacggcgagatgatctggcgcgtctggaattttgaacccggcggtgagtactggatgaatcgttatatccagaactacgggaaacgtaaaacgcaataa

SEQ ID NO: 197381 - DNA, 558 bp, Klebsiella oxytoca
atggcagctcgaggcgtgaataaagtcattctggttgggcatctggggcaggacccggacgtgcgttatatgcccaacggcggcgcggtggcaaacctgacgctggccacgtctgaaacatggcgtgacaaacagagcggggaactgcgcgaaaacaccgaatggcatcgtgttgtcatattcggcaagctcgcggaagtggcgggcgaatacctgcgtaaaggcgcgcaggtctacatcgagggccagctgcgtacccgccactggcaggacgatgccgggatcacccgctatgtcaccgaggtgctggtcgggcagaacggcaccctgcagatgctgggtggccgtcgtgagggtaatccgtctgagagcaccgcccctcagcaacccgagcagccgcagagtcctgccgccccggcacaacctgctgaggctcctgttaaatccccgaaaacgaagggcggtaaaaaagccccacagagtgccgcaccgtctcagcaacccccgcagccgtccccggatgattacccgccgatggatgacaatgcccccttctga

SEQ ID NO: 197382 - DNA, 204 bp, Klebsiella oxytoca
atgaatctccttaatccattgtttgcttttaaaaaccatcacccgttgagtttcgggagccgcggttttgacgtttgcgggaacctgctgttttgttcccgatggtatgaccttcacccgtttgagaaccttcgccgcaagggcgtaaacgagcacggcccggtgcagatgtccggggtgagcgggaaatttttatcggtctaa

SEQ ID NO: 197383 - DNA, 564 bp, Klebsiella oxytoca
atgcgcagcgaactcagggatcgcattaaggggatgcgggccaggctggatggccgaacaccggtgacagaaatccgtgcaggctctcagctgtttgtctcgcccgatccggtttgccgtcgtctggtcagtctggcggaggttgtggattctgatcacattctcgagccggaagcgggaaccggcgccattctgcgggcggtcagggaagccgcgccacgggcacagtgtgacgccgtggagctgaacgcggatttggtccgctatctgcgggaaaatttcccgggcgtcagcgtctggcagggggattttctggcgtaccggccggaaaaccactacagcaaaattatcatgaatccaccgtttaaccatgcgcaggatatccggcatatacagcgagcagtgacgctgctggcgtccggcggcgttgtgtcggcggtctgtctgaacgggccgcggcaacaatccatactgaagccgctttctgatgcctgggagccattgccgcggggcacattcacgtataccgacgtttcaactgtgctgctcaggatcgccgtctga

SEQ ID NO: 197384 - DNA, 609 bp, Klebsiella oxytoca
atgctgttgaaaacgtctcgacgaactttcctgaaggggttaaccctctctggcgtagccggaagtcttggcgtatggagtttcaatgcgcgttccagtctgagcctgccagttgccgcatccctgcagggtactcagtttgacctgaccattggtgaaacggccgtcaatatcacgggcagtgagcgtcaggccaaaacaatcaatggaggcctgccggggcccgttcttcgctggaaagaaggtgacaccattaccctgaaggtcaaaaaccgtcttaatgaacagacgtccattcactggcacggcattattcttccggccaatatggatggtgttccggggctgagttttatgggcatagagcctgatgatacctacgtttacacctttaaggttaagcagaacgggacttactggtaccacagccattccggtctgcaggaacaggagggggtatacggtgccattatcatcgatgccagggagccagaaccgtttgcttacgatcgtgagcatgtggtcatgttgtctgactggaccgatgaaaatcctcacagcctgctgaaaaaattaaaaaaaacagtcggattactacaatttcaataa

SEQ ID NO: 197385 - DNA, 1377 bp, Klebsiella oxytoca; identical to SEQ ID NO: 177934

SEQ ID NO: 197386 - DNA, 441 bp, Klebsiella oxytoca
atgcccgccagcctgcaggcgatgagtggtgtctataacgccgggcaggcaattgtctgtcttgataatgacagtgtcgctgaatatgtcagttttctgaaccgcagaatcagtaacagtatcaccaaccagaatctggcggccgccgcgaaaattgtcggcagttctgaagttacggttgaggtaaaacgtctcggccaggtacgaaacggccatcagtcctttatcagttcatttatcaacggcgatatgcgtgtatttgacggcattaacagatacagcggaacgccactggtatcaacacaactgaaccgactgatgatcgggcgagcaagaacgacaccgtcagcggtttccaatacatatctcaaacgcctggtgtattacccggtcacgttagtggaagctgaattagtatctcagtttaattcactctcctag

SEQ ID NO: 197387 - DNA, 1713 bp, Klebsiella oxytoca
ttggtatccgcgttggcttgcgggatatccgagtcgctatccgaatccgaatcgctgtcagagtcggaatcactgtcagagtcagaatcgctgtcggagtcggaatcgctgtcggagtccgaatcgctgtcggagtccgaatcgctgtcggaatccgagtcactgtcagagtccgaatcgctgtccgaatccgagtcgctgtcggaatccgaatcgctgtcagaatccgagtcgctgtcagagtccgagtcgctgtcagagtccgaatcgctgtcggagtccgaatcgctgtcggagtcagagtcactgtccgaatcggaatcgctgtccgaatccgagtcactgtcagagtccgagtcgctgtcgctatccgagtcactgtcggagtccgagtcgctgtcggagtcggaatcgctgtcgctatccgagtcgctgtcggaatcggagtcactgtcggaatcggagtcgctgtcgctgtcgctatccgagtcgctgtccgaatcggcatcgctgtcagagtcagaatcgctgtcgctatccgaatcgctgtcagagtccgagtcgctgtcgctatccgagtcactgtcggaatcggaatcgctgtcggagtcagagtcagaatcggaatcgctgtcggaatccgagtcgctgtctgaatccgaatcgctgtccgaatccgagtcgctgtcagagtccgaatcgctgtcggaatccgagtcgctgtcggaatccgagtcgctgtcggaatccgagtcactgtcagaatcggaatcgctgtcagagtccgagtcgctgtcggagtcggaatcgctgtcagagtccgagtcactatcagaatcggaatcgctgtcagaatccgagtcactgtcagaatcggaatcgctgtcagagtcagaatcactgtcagaatccgagtcgctgtcagagtcggaatcgctgtcggagtccgaatcgctgtcggaatcggagtcgctgtccgaatccgaatcgctgtcggaatccgagtcgctgtcggaatccgagtcactgtcggaatccgagtcgctgtcggaatccgagtcgctgtcagaatccgagtcgctgtcagaatccgaatcgctgtcggaatccgaatcgctgtcggaatccgagtcactgtcggagtcggcatcgctgtctgaatcggagtcgctgtccgaatccgagtcactgtcagagtccgaatcactgtccgaatccgagtcgctgtcagagtccgagtcgctgtcagagtccgagtcgctgtcggaatcggagtcgctgtcggagtccgagtcgctgtcggagtccgagtcactgtcagagtcagaatcgctgtcggaatccgagtcactgtcggagtcggcatcgctgtcgctatccgaatcgctgtcggagtcggagtcactgtcagagtccgagtcgctgtccgaatccgagtcactgtcggagtcggaatcgctgtcggagtcagagtcgctgtcggagtcagagtcactgtcagaatcagaatcgctgtccgaatccgagtcactgtcggagtcggagtcgctgtcgctatccgagtcgctgtcggagtccgaatcgctgtcggagtcagagtcactgtcagaatcggaatcgctgtccgaatccgagtcactgtcagagtccgaatcgctgtccgaatccgagtcgctgtcagagtccgaatcgctgtctagactggccccctga

SEQ ID NO: 197388 - DNA, 192 bp, Klebsiella oxytoca
atgaatattaaacgtattggtctcgacctggcaaaaaatgtcttccagatacatgccgtggatcaccgtgagcatgttgtccttcgtaaaaccctgcgccgtgaccgcatggcggcctttttcactcggctctcagcttgccttatagtattgaagcatgcggctctgcccgctactgggcctgtgagctga

SEQ ID NO: 197389 - DNA, 582 bp, Klebsiella oxytoca; identical to SEQ ID NO: 195254

SEQ ID NO: 197390 - DNA, 366 bp, Klebsiella oxytoca; identical to SEQ ID NO: 195231

SEQ ID NO: 197391 - DNA, 183 bp, Klebsiella oxytoca
atgaaagccagcatccgggccaaggtggagcacccgtttcgcatcatcaagcgacagttcggcttcgtgaaagccagatacaaggggttgctgaaaaacgataaccaactggcgatgttattcacgctggccaacctgtttcgggcggaccaaatgatacgtcagtgggagagatctcactaa

SEQ ID NO: 197392 - DNA, 246 bp, Klebsiella oxytoca
atgccgtccaccgacgcgttcgacaggcaggatgcggcttaccgtgaagcggtgctgccgaaagcggtctctgcgcgcgtggccatcgaagcgggtatctccgactactggttcaaatacgtgggcctgaacggcgcgatcgttggcatgaccaccttcggtgagtcagcgccggcggagcagctgtttgaagagtttggcttcaccgtggacaacgttgtcgcgaaagcgaaagcgctgctgtag

SEQ ID NO: 197393 - DNA, 1329 bp, Klebsiella oxytoca
atgccgaaactggccagcctttacctggactttgagaaggagctgtatattgccctcggcaggacaacgggaaatgccgttcgcagccggcgcctggccgatctagtgacgttcactcgcgcgtcagaaaccacgcgggtaaacaaaagcggattaatcgagtatctcgcatccggcgaggctgctatcgagtatgacccgatcacgggtgattgcctggggctgcgcgttgctgcgggaacaaccaaccaggtggcaaacagcgaaaacttttccgggtctacctggacaaaaacgaacgtttctaccgttgcggcgaaaaccacggcaccagacggaaacccgacagcatcgccattcaatgagacgacggatagcagtgacctcattcactcaatgctcgaaaatgccacaccagcggcaacgataggctccccggtaacgtttagtatttatgcgaaggccaatactgccagcattattcagctcgttgcccagggtgctgttgcaacccctcagtatgcaaactttgacctggtaaatggcgttcgtacacgcagctctacaggtatcctgcagaccagtgtccggaaatttaaaaatggctggtatcgcatcagcataacgataaccccgaccgtagctgcttctccacagtttactctggcgttgatcaatgatgtgacatcagcagccgccttgccagcatacaccggcacggggaagggaatttacatttggggggcgcagattgaaaactgggatggagtgacaccatatattccaacgtcaggagccgcagtgacgcgcccggacgaagtttgcactgttcgccaggacctggattttatggctacagatcgcggcgctatttttgctgattacaacatgcccgccagcctgcaggcgatgagcggggtttataatgccgggcaagccattgtttgccttgacaatgattctgtggctgagtatgtgaactttatgaaccgtcgcatcagtaacagcatcaccaatcagaacctgactgcagcagctaaaattgtcggtagttcagagataaccgtggaagttaaacgtttagggcaagtgagaaacggccatcaggccttcatcagttcgtttatcaacgacgatatgcgtgtatttgatggcatcaacaaatacagcggtgctccgttggtctcaacacagctgaaccggcttatgattggtcgagcaagaacgacacccgcagcggtttccaatgcatatctcaaacgcctggtttattacccggttacgctagttgatacagatttagtgtctcagtttaatgcgttgtcgtag

SEQ ID NO: 197394 - DNA, 318 bp, Klebsiella oxytoca; identical to SEQ ID NO: 197345

SEQ ID NO: 197395 - DNA, 246 bp, Klebsiella oxytoca
atgccgtccaccgacgcgttcgacaggcaggatgcggcttaccgtgaaacggtgctgccgaaagcggtctctgcgcgcgtggccatcgaagcgggtatcgccgactactggttcaaatacgtgggcctgaacggcgcgatcgttggcatgaccaccttcggtgagtcagcgccggcggagcagctgtttgaagagtttggcttcaccgtggacaacgttgtcgcgaaagcgaaagcgctgctgtag

SEQ ID NO: 197396 - DNA, 609 bp, Klebsiella oxytoca; identical to SEQ ID NO: 197384

SEQ ID NO: 197397 - DNA, 519 bp, Klebsiella oxytoca
atgccgattcggacagcgactcggatagcgacagcgacagcgactccgattccgacagtgactccgattccgacagcgactcggatagcgacagcgattccgactccgacagcgactcggactccgacagtgactcggatagcgacagcgactcggactctgacagtgactcggattcggacagcgattccgattcggacagtgactctgactccgacagcgattcggactccgacagcgattcggactctgacagcgactcggactctgacagcgactcggattctgacagcgattcggattccgacagcgactcggattcggacagcgattcggactctgacagtgactcggattccgacagcgattcggactccgacagcgattcggactccgacagcgattccgactccgacagcgattctgactctgacagtgattccgactctgacagcgattcggattcggatagcgactcggatatcccgcaagccaacgcggataccaataccgctctga

SEQ ID NO: 197398 - DNA, 159 bp, Klebsiella oxytoca; identical to SEQ ID NO: 95564

SEQ ID NO: 197399 - DNA, 945 bp, Klebsiella oxytoca
gtggctgccttcgcccagcgcatcaggggtgaagctccagcgtccgtcctcaccggcaaccaccgtacccagcaccgtgtcaccgtcatagatcgtgaccgtggcccccgcctcggcggtaccgctcagggtcggtgtggcgtcgttggtcagatcgccgctggccagcgggccggtatgcccggccacatcgtcggtcacctccggcgcactggcagacggcgcggtggtatcaaccgtcagctcaaacgccggggaacgatcgctgacgttcccggccttgtcggttacggtggtgctcaggctgtggctgccttcgtccagcgcatcaggggtgtagctccagcgtccgtcctccccggcaaccaccgtacccagtacggtatcgccgtcgtagatcgtgaccgtggcccccgcctccgccgtgccgctcagggtcggcgtggcgtcgttggtcagatcgccgctggccagcgggccggtgtgtccggccacgtcgtcggtcacctccggcgcactggcagacggcgcggtggtatcaatcgtcagctcaaacgccggggaacgctcgctgacgttcccggccttgtcggttacggtggtgctcaggctgtggctgccttcgtccagcgcatcaggggtgtagctccagcgtccgtcctcgccggcaaccaccgtacccagcaccgtgtcgccgtcgtagatcgtgaccgtggcccccgcctccgccgtgccgctcagggttggtgtggcgtcgttggtcagatcgccgctggtcagcgggccggtgtgtccggccacgtcgtcggtcacctccggcgcactggcagacggcgcggtggtatcaattgtcagctcaaacaccggagagcgctcgctgacgttcccggccttgtcggtcaccgtagcgctcaggctatgaggaccttcgctaagctccggtaa

SEQ ID NO: 197400 - DNA, 243 bp, Klebsiella oxytoca
atggctccgcgacgccttgaccggcacgcatcgcggctggccaagtacatccaactgactggcaaactgactttcgagacttccgagcagcggcagcgccagcgacaagacgtagccttccgtacccggggaaaaacgaaaaccatgaatacacagcgccggaacgatctgaatacaggactccctcatcacggtcgtcgtaccttcgatttcaatttccgcctgccctttgtgcagatatag

SEQ ID NO: 197401 - DNA, 1377 bp, Klebsiella oxytoca; identical to SEQ ID NO: 177934

SEQ ID NO: 197402 - DNA, 378 bp, Klebsiella oxytoca; identical to SEQ ID NO: 101384

SEQ ID NO: 197403 - DNA, 273 bp, Klebsiella oxytoca
atggatgtggtaaacaaccgcttctggaataacggcctgaccgcttccgggaacggaattaatctggcctcagaagttaagatcagctcgttcagcgcaaataaaattcgcgacatccagtctacgcctactcagcaatatcctgtttatgccagcggtacgcttaccgatgtcgatatttcatttaaccactgcgtgggtaacgcgcagaacacactaaatctgaccggtacgcaaacccgcgtcaccactctgaacaatccaggaatctga

SEQ ID NO: 197404 - DNA, 474 bp, Klebsiella oxytoca; identical to SEQ ID NO: 111848

SEQ ID NO: 197405 - DNA, 711 bp, Klebsiella oxytoca
atgtcagcattgtacgaacgcgcccaaaaaacggtagtaatgattacatcagtgccggtcactgcggaagagctggcatcggcgacctggctcaacctgagttgtaccattaaacaggccagctttaccgctggtcagaaaaacgatattgacgttacaacgctatgctccgaagaaacggagaatatcaacgggctcccggcaccgtctgagatgtctctctccggtaacttctaccgcaacccggcgcaggatacgctgcgtactgcttacgataatgacggcgtatacggctttaaggttgtgttcccttccgggaatggcttcctgttccgcgccgaagttcgtcagcatacctgggattcacagaccaacggtgttgttgctgcaacgttctctctgcgtctgaaaggtaagcccagcaatattgattcgacaggtattctgtcattcatcaacgatctttcaccttcgctatcagtagcggcaggaagcgccctgacaatgggtgtggtcatccagggtggcactgcaccttatacctacgtctggaaaaaaggttcgtcaaccgtcagcgggcagaccagcgcaacgtttaataaggccagtgcagtttctggtgatgccggtgtttactcctgtgtagtcactgactctgccactccggcgaacgttatcacctcatctgactgcaccgtcaccatcagttaa

SEQ ID NO: 197406 - DNA, 441 bp, Klebsiella oxytoca
atgcccgccagcttgcaggcgatgagcggggcttataatgccgggcaagccattgtttgccttgacaatgattctgtggctgagtatgtgaactttatgaaccgtcgcatcagtaacagcatcaccaatcagaacctgactgcagcagctaaaattgtcggtagttcagagataaccgtggaagttaaacgtttagggcaagtgagaaacggccatcaggccttcatcagttcgtttatcaacgacgatatgcgtgtatttgatggcatcaacaaatacagcggtgctccgttggtctcaacacagctgaaccggcttatgattggtcgagcaagaacgacacccgcagcggtttccaatgcatatctcaaacgcctggtttattacccggttacgctagttgatacagatttagtgtctcagtttaatgcgttgtcgtag

SEQ ID NO: 197407 - DNA, 651 bp, Klebsiella oxytoca
atgtccacaatgaagcctgatgcagtctggtatcctccgcagtttccgaagcaggtacgatggttgacgcgccttgtttttatcgctgtggcgatgttgctggctggttgtgacaggtctgccagagaagagagtgtcagcggcggcagcggcaccatagaagcggttaaccatacccactgggcgataaaccatttcagcgtagacgggcagtcagggctggatattatcggcccctggcaggggggcggtggcggctgctgttacggcgtgccaacgaaatggaaaccgggaatgacggtgaaagttgagtgggaaacgggtgtggcttttgccgatgatgtacctgaaattcctgagccgaaacgacctgatacctccgggatgaacgagaaaaattattatcaagtatggcaagtgtattttgatgaaaaacaagaatggtataggaaaattaaggcactgaataaagcgcatacaaaaatagtccctgttcccgattataccgggcaaaaaacctgcggaataaaggttcactttttaccctgcgatcaaataaaagtcaccaccagctgctacgactacggcaacccaaattatccgattaaagatccgatcaaaatggaggaacccaaagtatgtccacaatga

SEQ ID NO: 197408 - DNA, 1128 bp, Klebsiella oxytoca
atgtatcctacttatgttcctatactgaaagcaaagcctggtgaatttgcagcattagaaaaacttaaaactgcatattcacaaaggataacacctttcttcgagatcccaaaattcacacaaaaaatgcgtgaacaggcttattatcgtgactccacccaacctaagaaacattacctcgataagatttcgcatgaaatttcaaaatcatgcaaaagttcggcaatcttttttgatcattttgaatggaagcctaatgaatataccgaaacaggagagcatgtatacagttacatgtttcgcaaactctcagaaagtggcctgaaagttcacccagtcgtgggatttgaccgatgggatgatgttgattatcagaacgcgttatgtaatttatctattacagacgacacatatttttgtttgcgtattgactcagaaacaatagaagatgcttatgatgaagattatttcaaagatagcattgacagcattgttcagggattgaatctcacaaacaagcaaatcatcattttgtttgattttggtgatgttaccaaaaaatctatcgtttcattacttacagacatgcaacatcttctaaagattgtcagtgaatataaatttggttcagtgatgatggctggtgcttcatttccaatgattattaacgaagccgttaaggatgaagactctactgactacgtcgaacgtcgtgaaatggttgtttggaaaacacttctggaagatagtaatcacaacctcatatttgcagattatgggatacgaaatccttcagcagcagatgatattattgcaacacatgcaaatgggaaaattcgttacactatttctaatagatattttgttgctcgagggcattctaagcaaaaaggcaataaaggcgagcaaatttatgacctcgccaaggttattgtcagttcgtctcattacttaggaccggagttttcgtggggcgatgagaaaatacttgattgtagtatgaaaaaattgaaaggtaggcctcaggactggatcggatttgatacgaatcatcacatcagctatgttgttgaagaagtattagagttcaatcgtatcaaagcagcaaaacgtgcagaagaaatttaa

SEQ ID NO: 197409 - DNA, 1209 bp, Klebsiella oxytoca
atggatattaaagttataaagacagagcaacagcatcaggactacctggagcgaatccattctttgatgcttatgatgccaccgactcgctcggaagagcatgaagaactcgagcttttaatcacgatcgtagaagcctatgaaaactcgaagtatccgattgagccacctgaccctattgatgcaattttgtttaggatgcatgaaaagggtttaaaacaggttgatctagttccctatctgggaacaaggagccgtgtttctgaaattctttcccggaagcgccccttaacagtttcaatgattaaagccctgtccattggattggggatttctactgatacactgataggtataaattcagatgataatcaatctcatgaggaaggggtagattggtcaaaatttccattaaaagaaatgatcaaccgtggatggatttctgaaaatggaaatgctctaaaaagttctgctgaagacattatcaaaggttttataaaccgattaggctggcaaagcggaagcctttctttcaaaagaacattgtctggtgatgcttactcgccttcaacacaatatgcactgtatgcgtgggttagtagagtcgtgcagcaagcgcgaaagaaaaaaagctctctcgggattttcgatccaaatgtgttatcggcaagttttctacgagatctcgcacaattaagctggttcgaaaaaggcccacttcttgcgatagaatttcttgagaaacatgggatagcaataattatagagccaagtttaaaaggtactcgtattgatggtgctgcattaaaagatattgatggacaacctatcattggccttagcctgagatatgatcgtcttgataacttttggtttactttgcttcatgaagtcgctcatatatggaagcatgttcataatgaagaaacatttctggatgatttagatgcatcttcggatgataaaaaagaatcagaagcaaataggttggcaagggaagcatttataccaagagccgtttggaaaagaagcgatgcatatatatccccaacgaaagaaaatatagacatattatcaagggagttaaaaataacgccagcaattattgctggaagattaagaagagagttaggcaattaccgtctttttgcagatctcatcggtcagggtgaggttagtagaattttatctacagcaattatcgaataa

SEQ ID NO: 197410 - DNA, 261 bp, Klebsiella oxytoca
atgaagctgcttggaagaaatcggttgaaccagcttataagtgagagttccgccaccaaagtttgggtaaacgcatggtcatctgagattgattcatgtagttggaaatccgttgatgatgtgaaagatcgattcccatctgtcgtttgtatcgagaattgtatgttcatattcaaagttgatggctgtgatatgtcgattgaaactattattgatttcaatgcgttgactgtattgattattgctgtaaaggtcacatga

SEQ ID NO: 197411 - DNA, 576 bp, Klebsiella oxytoca
atgactactgtgatcggatacgtgcgagtttccaccagcgaccagaacattgaaaaccagaagcagcagattgccgatgctggttatagcataactcgctggttcagcgatgaagcggtgagtggtgcagttaaggcatcagaacgtccaggattcggtgagttactcagctatgtacgagaaggcgatacgttgatagtgattgctatagaccgcctgggacgtaacaccattgatgtactgtccacagttgaaatgttgcaaacgaagggcgtgaaggttgtcagcttgcgagaaggatttgacctatcaacaccagttggcaaagcaatgctaaccatgatggcaggacttgccagcctggaaaaagacctgatagcagagcgcagaacggcaggtatcaagcgtgctcagtctgaaggaaaacattgcggcagacctatcaaagcaaccgttgaacaagtacaagacctgttagcacagggtctaccgccagcagcggtgcaacataggttaggcatcagcaaagccaccttctaccgattaaagacatccggtcatctctctgatatttga

SEQ ID NO: 197412 - DNA, 591 bp, Klebsiella oxytoca
atgatgaaagtactgataatgtatcatccagactttgcgtctatgggaaagtttgaacgtaaactttctcgtatattttctcagtcaaataactatcaagtattttattttcacgatcatcataatctcattaatcgatattttaatattgatatactaaaccagcttacccctgattttctaacagacctattatctgttggggtgactcatgcagttttatttgattcatcaacacaaccacaatttctctctcatcacaaagtcttatcagaaaaaattccagtacgttatataaaagataacattactttcacttcaaataaagatagaggtgagcatttcgatatctattgtggtagaggtactttatggggaaacccttatgcaataggtgttgatggtgatcgtgaggaagttataagaaagttcaaatatgactttgatcgagactatctgaagggtggggctgagttcaaagaaaagctgaaagctctgagaggacagactttaggatgtcactgtaaaccgtatgcatgtcattgcgacgttctttctcaatatttaaatgaattggatgatggtgaatag

SEQ ID NO: 197413 - DNA, 441 bp, Klebsiella oxytoca
atgaaggtattttcgattggttttactgaaaaatctgctgagaaattctttactctgattaaatcacaatcagcgattaaaacattaattgatgttcgtttgaataatgtttctcaacttgcggggtttgccaaaaagaatgatttaaaatacttccttagagaattgtgcaatgttgactacctacatgtgccagatcttgcgccaacaaaagagatgctaagtccttataaaaaaggggatgtatcctgggaagtttacgaggataaattcttgaatcttatggcaaaaagaaatattgagcgaatggataagtccatgattgaagatagctgtttgctatgtagtgaacacaaaccccaccactgtcatcgacgtcttgtgatagaatacttaaacagtcactggaatactgattttgaggttaagcatttgatatga

SEQ ID NO: 197414 - DNA, 765 bp, Klebsiella oxytoca
atgatatactgtaacaatatgatgtggttgacaatttcctctccggttaataggattaatcttatttttctaaagggaattaccatgccatcaatgacgttcgtagtgctcgcaaaatcagtaaaacataagaaattctgtgtcgctggaaaattatttacaaatggagttattggcggctgggtgcgccccgttaaccctgaaactgacactgatgcacttacatataaaaacattgaatattccagtaaaaagcacccggaaatattccatgtaacttcatttaattatctccgaaacgaacctcatcaaattcagagagaaaattactcaatcgacccttctatttattggagtaaagaaggggttttcagtcttaataatattgatagacttgctgataaccctccaacgctttggattaatggtagctcttcatataatggtgagaatgaccgctttctatctaatttagttgttcatcctctccagtctttatatttcatacgtgtcatgaactttagaatacgaatcaaaagagaaggagctgactttggtaatgacacgaaaaaatttagaggttattttacatacaataatgttagctatgcacttgtaattactgatccagagatttacagtgcatatggacaaaaaaatgagggtacctatgatgtaggagcatgctatataacattgagcactgcgcctcataatgatgggtattgctacaaatttattgcagctgtaattgtgttagtttaa

SEQ ID NO: 197415 - DNA, 132 bp, Klebsiella oxytoca
atgaaacgggacaaaataatggcgaaaattttgcgtggtgtggatatcacgatgtattattttaaaaataaagaacaaagtaaatatattggtgaaatttttagattatcctacccatcaatcttaccctga

SEQ ID NO: 197416 - DNA, 753 bp, Klebsiella oxytoca
atgctggctactatggcccgtcaggattatgagactcgtcgtgcacgtcaaaagcaaggaaagcaaaggtacgaagtaaccgaaagctggttgaagacgtataaacattggtattcgccatctggtaaaagatataaagccaccgcctcagcgatcgcaatttatagcttcatcgcaggtcttactgagcaaaagaaagtgtgttatgccaaccaagagacattaggtgacgttggcagtgtggagcctcgccaggttaggaacattatcaagttgcttgaggatgtaggcgtgattcacgttgaaagacggagaggacaaacaagtatttgcacagcgttaccgttcactaatgcgcatgttataccaccagaagcactgacagcgcagtctgtaatcgtttctgacgaagtgccagcccctgtgccagtgaaggcagcagaggaaaattcagtatctgattttgatgatcttccgtttgtccgggatgtttcagaatacctggagtcgccagtaccaacaccaacgatccccactcagcaggagaagccagagtttccctggggcggtgtagtagtctgtaaacctaatggcgatcccactgatgccgctttgaaatgggcgcacacagagacaatgggcgatgaggaagcagcctaccaactaatttccagagtggtttctgagcgcactggaagaacagaagactttactccgcaaacggaagaggattttgattcaataccattttaa

SEQ ID NO: 197417 - DNA, 153 bp, Klebsiella oxytoca
atgcaaatgacagaaaccgagatctacgagaacattaagcaagccatcaacagcgctccgcgaaatggtcaaacggtagaaatgcacctccagatgatcaaatacgccgaccatctgaaaaacgttactgcaacagagttttgcgaggggtag

SEQ ID NO: 197418 - DNA, 1095 bp, Klebsiella oxytoca
atgactatattaattcaggattcattacgtcgcgccgttgaagctgcctcaggcggtgcgcagactgtactttataccagcgccggtgacccgtcgtttgtgaatattatccccaaatttgacgtcagcacgattgatgcatcgctggggtcgggaacgcatccggcatttattgtgaatggcgtcgaggttgatcagatattcgttgggacatatccagggagcattgtaaatggtcagttactgtcactgcctgaccgcgctccagctgtatccgttccatacaatgacggcatcagcctggcgcgggctgcaggtcctggctggcacgccatgactaacgctgagtgggctgcgatagccctgctttgctattcccagaacacgtctccgcgcggaaatacgaagtggggtttgtcgtctgacaatattagcgaagcggggcggcgggttgacggcatggcggccgggacagaatccggaacgggtctgacgctgacggggtccggcccggttggctggcggcacaaccgtgactatgcaggcattgcagatttagccggcaacgtctgggagcaggtgacgggagtccgattctgtggtggtgagctgcagattatgacgaataacaatgcggcgatgggctctactgaccattccctgtcgtcaactgcgtggaaggcggtaagcggtgttgatggttcactgttgacgccaaccggtacgggtacagccgggacagactcctgggtaccgactacgaccaattccgtgcgaatcgacacgtcggggacaggaaattacacactgatttacggtgagaatacgctgttcaccagtgcccgaaatcctggcgctacgccggtatcagaagctgcactaagggtgttgcgcaaactaatgttgttcccgctggcgggcctggtttccgatgattcgctgtcgtactcaaaaggaggcgaggtgatgacactgcgaggcggtgcatattcgaatggtaccggcggcggcgtcaatgcgctactcgctaaccgtgggcgcacctcagtaagcgccgctaactcaggtgtccgtccggtatattacaagccttga

SEQ ID NO: 197419 - DNA, 2604 bp, Klebsiella oxytoca; identical to SEQ ID NO: 183845

SEQ ID NO: 197420 - DNA, 1683 bp, Klebsiella oxytoca
gtgacgcttgcctataacagcgccacgggaacggccttttccggcatgccggatggtatgcagcggctttcacttgctcaccgcgggaatgagtacaggattgtgtccgctgacggcacgacggcgacggtggcgcgtctggttaacggtgcagttgatgagtcatggccgggattcaccgccaggacgatgatcgactacgaggcaaccggactcaacgacacgctgagctggctgggtccataccttgtctgccctgaaaatgaaaccgtagatatgttcgaggtgaatttttccttcccgaacggcatctgtggcttcgacagtaaggggaaaaagcggctccggcatgttgagtgggagattcagtatcgcgtctacggttccggatcggggtgggtgagtcaccagggagagtacgcgctcaaaaacatcaacgggttaggtttcactgagcggatcaccctcagttctccggggcttgtagaggttcgctgtcgacgtcgcaacgagcagggctccaataatgccagggattcgatgtactggcaggcactgcgcggacgactgctgacgcgtccttcatcctatcccggtgtgtcgctgatggcggtgaccgtcgagacgggcggtaaactggcggcgcagtctgaccgccgcgtaaacgttgtggggacgcgtgcctatgaaaccggaacggccagaaccatttcgggggcgctgctgcatgtcgggaactcgctgggactggagatggatgtcgataccattaacggcattgagtccgcgtactggacgccgcggggagagtattttgatttcgctaccggcgacagtatctcggcactggaaatgctgcaaaagatcgccaacgccgggaagtcacgttttctgctgagtgatggcctggcgacagtaaaccgggaagggattaagccctggacaggtgtcatcaccccgcatgagatggtggaagagctgcagagtggtttcactgtgccatctgacgatgattacgacggcgttgacgtgacgtacattaacgggaccacctgggcggaagagacggttaaatgccgcactcccgataacccaacaccggtgaaaatcgaggattacaaactcgacggggtattgagtcaggatcatgcctaccagattgggatgcggcgcctgatgaaatacctgcagcagcgggtaacgttccagacgacgaccgaactggacgcactctgctacaacgttggcgatcgtattgtgctgaccgacgatataccggggaataacacgatttcctgtcttgttgaggagatgacaacggctggcggtgtaacgaccttcaccgttacggagccgctggactggtcttttgaaaatcctcgcgcgctgattcgttaccaggatggctcggcctccggtctgatggtggcgaccagagcaggggattatcaactttcagtcccgcatctgagtgagtttgatgaccaactgaaaatcaatttatcgtctgcaaccatcgagccgatacggctggtgttctgcggctcgacacggcatgtctatgatgcgctggtggcagaaattgctccacagtctgacggcacctgccaggtgaccgctaacgaatatcttgaatcgttctacgcctacgacgacgccacataccccggcgacgtcgtttaa

SEQ ID NO: 197421 - DNA, 270 bp, Klebsiella oxytoca
atgcaaaccctgttgctcagcctgtggcacgagaccggtaagaaggtgctgctgattacccacgatatcgaagaggcggtgtttatggccaccgaactggtactactctcgccggggccgggccgggtgctcgaacggctgccgctcgattttggccgccgcttcgtcgccggtgaatcctgccgcagcattaaatcggacccgcggtttatcgaacagcgcgaatacgtcctcagccgggtatttgaacaacgggaggctttctcatga

SEQ ID NO: 197422 - DNA, 363 bp, Klebsiella oxytoca
atgctgcaaatctcgcatctttccgccgattacggcggtaaaccggcgctggcggatatcaacctgacgctggacagcggcgaactgctggtggtcctggggccctccggctgcggtaaaaccacgctgctgaacctgattgccggattcgtgccttatcagcacggcagcatcacccttgaaggccagcgggttgaagggccgggcgccgatcgcggcgtggtgtttcagcacgaagggctgctgccgtggcgcaacgtgcaggataacgttgcgctcgggctgcagctggctggggtcgacaaaacgcagcgccgggcaaccgccgcgcagatgctgaaaaaagtgggcctcgacgggtag

SEQ ID NO: 197423 - DNA, 1206 bp, Klebsiella oxytoca
atgtcaaataataagctagaggaaatcaaatcattattagcaccattaagtaaaatcattataaatcttattccatatacgactatcgtatcaggtgttatcatatggacatacctgaaaaacatagatagaatggatttattcgttgatgcattatctttaaatgcgggtcttatttcattattattttctgctcttttcctttctgtttttatctctatagcattagttttaccaagttatatattaattttgtttaaaatcaataataacactaatgactcggacctaacctcagcaacgccagtgttcagcctactattatcgatagcatttttatgcttggtgtttttaccatatacaggttttgtagaaagatggctcaatggaaaaaaactttccattgaggaaatcatatttataattttcattgccatagtaataatatactgtataggcactatcataaatgatgatttcagcagcaaaaattcaaaacccaaagttttctttaaaaaagtcgcttatactacgcttaagattttcatacttttcatctcaacactatctatttcaataccggtcagtctattattgagagccagcaaaggagaagacacgacatctattttatttgcattattatttatgattatattttcttttttcacatttttacctgctatggtattttaccgcaacatagaaaagcagcgcattaataagattgatgaaagtgtatttaaaaacatcaggaattgttcttttacagttattttttctattttttctataatattcattttccctggcatatcaaatgtctttgtctattcatcgctaagcagtattggcttaatcgataaaaagccacactattttaaggtaagcggtgagagttataaacctgcaatgttccctgccagtatatggaaaacgcaaacgccatcagatatggggaatgacttttatattaaaggagcaaatcttttttctgcaggttcaactaatcttatctgccctatgtatattgttaatttgagagattcagcttatgagaatgacttctcagcacttacacccaacaataatgaaaagaagattaattatttgaagaaaatgactaaaacttgtgttgttttagacgatcccgatgttcggttatgggacacgctttttgatgcggcaggccagatcaaaaagtaa

SEQ ID NO: 197424 - DNA, 3792 bp, Klebsiella oxytoca
atggaacgcaaaggttcgggttcatcgggggcaggatctcatgccggacgaggatttcgctatcaggatgcagtcggagtatggctgtcactccgctgttggagtcaagaacttcactatggctccgtgatccctgaagggcgagatgattacgaattacagggctctaggggctctgctctagtacaagttaagtctcgtcgtgatcacatgggattattcccgattagtgaggttgttggttttgtgcgggcgctttggagtcggtacgaagtatctccggaccctggcaaagatctgaatctgatccttgagcgccctgttatacaggggccaaaaacagattatatcctcactgaacataccggcttagctgaagttctgcggggagactctcgctggaaattacttgcaccccgtactcatatctggattgctgctgaacctgcggaaaaagcaattgaaactatcagccatacactttcttgtgcaccagtggctgcacaagtttactacggtgaattgttaaaccacatcggtggtttggctgatgcgaatgggatggttaagaatggaatatacgaaggattggctatatccgatgtcgaagcggttattcgtcgtatggagcctgtccttgatgtagcgggcatggagatggcccttcgtgaagggtactgcgatgctattgattttctgactacggtagacgaacctgcattttatcagggagttgatacccgaccggcccatcttgctgctggccttgtcgtggaaagacctgaagcgcgcagtgtggttttaactatgctggcagcccaaagagctgctctgatcgttgggcagtcgggcaccgggaaatcagcacttatgtgggaaacagcccgcgtcagccgacatacagtacgctggtttgaaattactcgtggtgacagctttgacgcccatttgcttatccgtttagcccgttcattgagagcgtcatctacagcgcccgttggttttatttttgatgatgtgggtaaagggaaagcgggtctttgggatggtctgttgcgtgaggcaagagccggaagcggcattcttctgctcggttcaatcagagaagaagacgtttttatgctaactacccggtctttcgccggagagttccgtccaactgtggaagaaattgtcgccgaacggatttggcaacaactttctcatcagagacaaaccacatgggctggctggcgagagccatgggcgcaaagtaatgggcttttgcttgaatacacgcatatcctcacccgtggtgaacggcttgaaatagttcttggagaacagatagattgtcgccttcgggaggcaagggatgccgagctggctattcttcgcattaccgcactagctggcgctgcgggggctatagttgatattgaccgattatctgaagttttagacctctcgcagagcgatctttctcgagcgctacgacggctcattgatgaacatctcatttccgaatcccagaatgggcagttgggagggctgcatcagctacgctctgcggctattttctgtctctgccacaagtatccgccgccaacacttttgcacaccatcgcagaagcagtactcgctgttcacaacatgaatctggatatgcttgcggcttatgtcatcgtccattatccggaagcaaaagctgctttgattaaggcgattgtgctccgaattgagcgtgagcgcgatcctgctacattagtgactgtgctttcaggactgggacaggcgcatattgagatgactctacgggactggatcccggaggtgaaagcgttgggggtagaaccgacacttattacaggtattgttatgttcgccatcgctgatacagatctttcctctgatatttttcctgaacgaacgagaaattcagcgcacatcttgcaaatccgatcaacatccgatcccagattgactttattaaccctactttcaccagagataattgagcggttaatttctaccgctacgatatcaaatcttcgggggattctgggagggctgttgggaatagaggtcccggcgaatgttcgacagatgatggctgatgcaagcccttgcttcgatgcgttggaccttatgactatagcagacttactgagtgtggcccgacttgtcgatcccatgatttcgatggaatgggcatgtagcaatattccagagcgattaattgcgcgtattccacttgagatcccctgggctggacctgtcagtgttgaggcggtaccagaaggtcggctgctgcgtagctcgatcttccatgttgcacattctgtccagacagacattcataaagacgttgtacaactttgtacactcctgcttggattggatccaacagtcgctgtggttgctgtcgatgctattgctgcaggtgggtttctctctggtactccagattatccccttgcatcaaagcgaattccaagagaaaacttgccaccaccagcattacccgaatggaataagcggtggatagcgaccgccgccgggctggtgggaacagaaagctatacggattatttacagcgggcactcgtactgttaaataaactcgttccgttagtcgagaagattctggatggaaccttacggtgcaagactccttcatctaaagttctggaacaactgggggccatacatgaggcttcgcgggaacttaccctaccaaaaggaggggagtttattggtataaatatagaactgcatgccactcctgttcagaacatattattttattgttcgacagatatgatccggcgatttatatctttacctgaagggtatggtgcatacattgcgtggctgaaagatctgctgaaagacatagagaagggcaaagattatccttgggatctcgtgggtggttatccggaaaaatccttcacgcgtttaaaggagttgatcacgtcactgcgtcttctgtcagcggaagcgggtactcaaggaataaaaccgacacagctatggttaactgaggctaaaacggctgtgcgtggaggggcactgagcagcgctgtcagagtggtaatgcgtcagttcaataagttagcttctggctatctggcagcaatagaggacagactgaaaaatagaggaattgaaacagaactccatgcccgtcctgactgggaggaacttttaccgtggccaacgtcagaagttctggcgatcgttgatattgagtatcctgaagactggccgaactggcttgaggaaaatggagcatatcttcagactgcaattggtgaacatcgccgtctatggattattcctcgtattgcagggattgtagtatcccgccttactgtcagcgcaatatttagtttttttgcttccccatatgcagttgatgactggcttgaggaattaaatttgcatcggcttaacgataccctgactcaggctgcgcagcctgccttggcgcttatcagtgagcttgacggattacgctattttaatcttggaacagaaagtcgtcctcatctggagcggtctgtacgtaaagagggtgaaaaagccctgattaccgccctgacggaatttgaacaaacagcggaaggtaagccggttcaaatgttactccgacaattaaacgaagagtgcatagcaggacgagcggctatagctgagggggagattgccctgttatatggtcaaatgacggcaggaggtgaagccttaatgatacttcaatttactttactgactcaggatctggtgactgccttaacgcaagcgtag

SEQ ID NO: 197425 - DNA, 213 bp, Klebsiella oxytoca
atggctcctctgactgggatcgcctttgccactaacttgctgactaacaagctaaatataaacattggggttgtcaagaccaccagtatgatcaccatttttttctggcttttccttccggaattcaagtcgggtattatggcctgtacgccatctatgttgtacctgtcccatacccatatgaagagcaaagaaggcgctgagggaatttga

SEQ ID NO: 197426 - DNA, 552 bp, Klebsiella oxytoca
atgcccaccgccgccgccagcgtccacgacacgccgatgccgatgagaataaagcgcgggcgcgaacagtcgcgggccagcgccagaaccagcagcgccaccagcacgccgccgagcattcccgccagcggccgccagaccaggcccaccgccgggaagaacagcaccagcgccagaacgacaatactggccccctccttcaccccgataagcccgggatccgccagaccgttgcgggtaatgctctgcatcgccgcgccggccagaccgagcatcgccccgcacagcagcgccataaacagccgcggcaggcggatatcaaagaggataaatcgctgctgttcgtccacgatgtccgcccccagcagcgcacggaacagggtaccggagggcatcgggaagctgccgcgggtcaggccaaacagcgccagcagcaggatgacgagcagcgcgacagcggcgatttttaccgccgcagggcgcagcagaatgtgccagcggccgcaggtcagcggccgaaagccggcgcgacggacggcgcttttcatttaa

SEQ ID NO: 197427 - DNA, 351 bp, Klebsiella oxytoca; identical to SEQ ID NO: 183947

SEQ ID NO: 197428 - DNA, 768 bp, Klebsiella oxytoca
atgacgggattccgttgggagatcattgaggagtacggtccgctgtttatggacggtgccctgatgaccattaaatgtaccattatctgcgtgatcctcggcaccctgtgggggctgaccctcgggctggggcggatggcgaaagccgagcacggggtatggaaatacgttctgcgttacctggtgcagtttccggtgcgcttttacgtcagcgcgtttcgcggtacgccgctgttcgtgcaaattatggtggtgcacttcgcgctggtgccgctgtttatcaacccgcgcgacggactgctggtgaccagcggcatgatgagcgctgatttcgctcgcgagctgcgctcaaactacggcgcgtttctctcctgtatcgtggcgattacgctgaatgccggggcctacgtgtcggagatcttccgtgccgggatccagtcgatcgataaggggcagatggaagcttcccgcgcgctgggaatgccgtggtggaaaaccatgcgtcaggtgattctgccgcaggcgtttcgccgcattctgccgccgctgggcaacaacgctatcgccatcgttaaggactcctcgctggcgtcggccatcggtctggcggatctggcctacgccgcgcgcaccgtttccggcgcctacgccacctactgggaaccctacctgaccatctccctggtttactgggttattactttcctgctggcgcagctggttaaccgtctggaaaagaggtttggcaaaagtgattcacattcgtaa

SEQ ID NO: 197429 - DNA, 501 bp, Klebsiella oxytoca; identical to SEQ ID NO: 101070

SEQ ID NO: 197430 - DNA, 2796 bp, Klebsiella oxytoca
atgcccgtcgattttctgaccactgagcaggaactgaattatggtcgctatgttgcagaacccaatgacgtgcagctggcgcgctattttcatcttgatgagcgggatcttgccttcattaaccagcggcggggaaggcataaccggctgggaattgcgcttcagctcaccaccgcccgttttctgggcacctttctgacagacttaacccgggttctgccaggtgttcagcaatttgtcgcggtgcagcttaatattcgccgtccagaagtccttacccgctacgcagaacgggttaccaccctcagagagcatactgcgctgattaaggaatattacggttaccatgaatttggcgatttcccctggtctttccgcctgaagcgcctgctgtacacccgcgcatggctcagtaatgagcgacccggccttatgtttgattttgccaccgcgtggctgcttcagaataaggtcctgctgcccggagcaaccacacttgtacgtctcgtcagtgaaatacgcgaacgggcaaatcagcggctgtggaagaaactggccgcgttgccggacagctggcagaccgcccgcgtgacggagcttctggacattcctgaggggcagcgtacttcaccgctggagcaactgaaaaagggaccggtcaccgtcagcggcccggcatttaccgaagcgctggagcggtatatccggctgcgaaacctggaattttcccgactgaattttaccggtctgcctgctatacaactgcgtaatttggcccgttacgcaggcatggcgtcggtaaaatatatcgcgcgaatgccacagcagagaaaactggccgtactcacagcattcgttaaagcgcaggagactgcggcgctggatgaggccgttgatgtgctcgatatgctgatactggatatcactcgtgcggcgaagaaaacggggcagaaaaaacggctcaggacgcttaaagatcttgatcgtgctgcgctaatattggcgcgggcatgttcattgttgctggatgaacaggctgacgatgctgaactgagggagaccatattcaacagcataccgaaaagcaggctggcagaatccgtctgcaaggtaaatgagctggcccggcctcagaacaacaatttccatgacgaaatggtggagcagtacgggcgggtaaagcgctttcttccggcggtattgcgcgacctgcatttccaggcagcgccagccggagaacatacgttgtccgccattcattatctgaccgaactgaactgctcgaaaaagcgcatcctggacaatgcgcctgaacatattattaccggcccctggaaacgcctggtatacgatgcggagggccggatacagcgtgccggttactcgctttgtctgctggagcgccttcaggatgcactacgtcgaagggacatctggctcgaaaacagcgatcgctggggaaatccccgcgagaagctgttgcagggggaagaatggcaggctcagcgggtccccgtttgccgggcgctgggacatcccactgatggacataaaggcgtgcaacagttggcggtccagctagatgaaacctggaaaaccgtcgcatcccgctttgaaggaaatgcggaggttcatatttgccatgacggtaaacatccttccctgactatcagcagcctggagaaactggaggagccaacatcgttgcatcgtctcaacagtcgggtaaggctgctactcccgccagtagatttgacggaactgttgcttgaaatagatgccagaacgggatttacacgtgagtttacgcatgtcagtgaatccggggcccgggcacaggatctgcacatcagcctgtgcgcggtcctgatggcagaggcctgcaatatcgggctggaaccgctgataaagcacaatataccggcgctgacgcgccaccggcttagctgggtaaaacagaattacctccgggcagaaacgctggtcagcgccaatgcccgcctggttgattttcagtccacactggagcttgctggccgctggggtggtggcgaagtggcttcagctgatggcatgcgctttgtcacgccggtgaaaaccgtcaattcaggacctaacagaaaatattttggttccggacgtggcatcacctggtacaacttcgtctctgatcagtactctggattccacggcatcgttgtccccggcacattacgagattccatttttgtgctggaaggccttctggagcagcagacagggctgaatccggttgagatcatgacagacacagccggtaccagcgacattatttttggcctcttctggctgctgggataccagttttccccccggcttgccgatgccggtgaagcggtattctggcgagtggataaatcggcaaattacggtgcactggacgaactggcacgtggttgtgccgatctgtcgaaagccgaggatcagtgggatgagatgatgcgaaccgccggttcgctgaaactgggcaccattcatgcttcagaactcattcgctctttgctgaaaagctcgcgcccatcagggctggcacaggcgatcatggaagtggggcgcgtcaacaagacgctgtaccttcttaattatattgatgatgaggattatcgtcggcggatcctgacgcagctaaaccggggggaaggccgccatgctgtggcgagggcgatctgctacgggcagcgcggtgagatcagaaagcgctatcgtgaaggtcaggaagatcagctgggggcactggtgacctgcccccaggattag

SEQ ID NO: 197431 - DNA, 402 bp, Klebsiella oxytoca
atgtccagagcagaattactgcgtgatattgaagcaattgtctcaggagcaggctttgagttaagtagctcagaaaccccaatgacatttaagaaaaatgtcagttatccgggcctgatcgctggcaaaaatgaaacagctcattttctgttgttcaccaactcaggaaccgttcaaataacggctaaatggcaggaagtgagtggtactgcaatagagaagctaggtcacacagctctcgatgcgcaaaacacacatcatcagaattatttcgttatctgtggcggaggtaagctggttacaagagcaatcgattatctgaacagccagcagtctttagccccacgcctcagagcaatgcaggtaagggagcttgagcctgcattggaagaaataatctaa

SEQ ID NO: 197432 - DNA, 156 bp, Klebsiella oxytoca; identical to SEQ ID NO: 103079

SEQ ID NO: 197433 - DNA, 258 bp, Klebsiella oxytoca
atggctaataaaactttggctgactatacagagcaggaatttattgagtttatcgaaaaaattaaaaaggcagactttgctactgagtctgagcatgatgaggctatttatgagttcagccagttgactgagcatccagatggttgggatcttatttatcatcctcaagcaggagccgataactctcctgctggtgttgtaaaaacagtaaaagagtggcgagcagctaacggtaagccaggttttaaaaaatcgtga

SEQ ID NO: 197434 - DNA, 2298 bp, Klebsiella oxytoca
atgggtggtggatttaactataacggggaaggtgctactggcaccggattggatcgtgatccatatgttcgcgacagcaatggtaatgctattggtgttaaatcaggctatcacgcggagtcctatgggacgtcaagtccagccttagggcctaatggcgctattcagattactgctggggttattgctgtgcctggagataagccccgacctgacggtggtagtggtggtgggaatactgttaacaccggacctgcaggacagctcctggtgatgaataaaggtcagcttggatactgggaaactcgttctacgggcgcgggtaacaatgagcataatacgagtgtatttgttgctgtaggtccttctgaggcagaaaaaactgcttctgcagagaaggcgttaaaggaaaaacagcaggcagaagcagcagcaaaagactttgcggctaaaactgctgccgcatcagccacggcggaaaaagaacgccagcaggcaattgctgctgcaactgcagcgggtcagcatcagtcagtttctgatgcccgtaatagcctgaataacgcgacgtcagatgtgtctcgtctgaaatcagctgcagacagtgcactgcaggaggcaaaggcaaaacggaaggctgctattgatgctgtacctgttgcaacccaggcggaaaataaatatcaggagctgcagcagaagattaaaggcctgaagctgaaaaatggtgagtatggtacggataaatgggaaataattggctctaataaggagcatgatcactggggatacaggttttatccatccggaattaccaaagctcaggttgatgcggcgcagagcgatgctgtgaataagcgaaatcaggctaccagtcttgccagtcaggcaacagcagcagaacaggacagcctgaaagctacagctgcctataatgcggcagaaacgcgccgtcaggctgctcaggcggcgttaaattctgctgaacaggctgctgctgctgaacgtaagcggcaggaagctgaggcggctgcagcagctgctgctgagaaaaaacgtcaggcagacgcagcagcaaaagctgcagaggaagcgcgtgcggcagcggaaaaagccaggctgatgcaggagcgtcaggcagcagcagataagctgaaatccacagatattcagtctgttcgcgggatcccgtctacggctgcgcctgcagcgtcacccatttcctgggccgttgcatcacttggtggtatatcgctggatagtgttactgcagggaaagcctggacgcagattgctgaggtgatggctaaactacgaggtattgccggtgcgagtcttgttggtcccgtggtggcaactgctgtagggctgttttggtcacgtgatgttggtattggcagtgatgtggtgcccggacgtgacatcagcgggctgatgccgggtgatgcactgtcattacctgatctggccactttgattaaagctgctgacagtaaaacgggtgtcagtatgccggttcgaggccggattatcgtgcgtgaaggcgattatctggagtctcagttcgttcgaacacctgttgccggtagtgttccggttgttcgggctgctctggataaagctactggttactggggatatacgttgccggcgatacaggatgtgcccggacagacaatactggtgagtccgtcagatgcgccgggcgttaatggtcctctgggacttgctgggccggttcctttgcctgaaactattatacataccggtgggcaaactacggttcctcagggggggactgtgacagtttcgccggcagaagacgatattgatttcaatgatttgattctggtatttccgccggagtccggtcttaaaccgttgtatgtgatgtaccgtagccctcgtaacatgccggggacagccagtggtaaaggtcagaacgttggaaataactggatgggggggaccagtaccggggatggtgctcctgttccttcccagattgcagataaattacgtgggaaggctttcggtagttttgattctttccgtcgggctttctggaaagcggttgctgctgatccggacctcagtaagcagttttatcctgatgatatagagcgaatgaaattagggcgagctccaacagttcgattccgagattctgtaggtaaaagggttaaggttgaactacaccataaagttgaaatttctaaaggtggtgatgtctataacgtagataacctgaatgcattaacacctaaacgtcatattgaaattcataaggggaactga

SEQ ID NO: 197435 - DNA, 543 bp, Klebsiella oxytoca
atggtaaggaggaaaataacagtatcagataaaacaaaggaactatttaaacctttttttgatttgagttcatacaaggagaaaaaagaaggcttcgaagaagaagagtataaaagactcgttgagttgtgttttaaaagtatgggaaaaggaaaactcagcattaatagaccaatggcaaccggtaaaggaattttaacttttatatataggactgataaagatttattgttagacgagtttatagatagatttgagaagaaaataactaaaaaaagatatatggattttttgctttttattttggttgacgatactaaaaacatagaaaaaatagaaaaaatgtttactcgaatttgtggggtagatattgaagataatgttttaaaggctattaaatgtttaaaggctgacggttatgattataaagggtttggtgatttaattgattattttgagggtttaaaaagggttagattagaaaaagaggaacttaataaaattatggcttcaagtaaaaataaaaagagggggagattatga

SEQ ID NO: 197436 - DNA, 1299 bp, Klebsiella oxytoca
atggctatatattattttgatgtttccaatgtgagtagaagctcaggcaaaaaatcagcttcgtctgttgctgctgctgcataccagaacagagccaggtacacagacgaacgaaccggtacaacatacgactacaccaagaaggggggtttatactactcaggcattttagcccctgagaatgccccagagagccttacagcttcaccgttgaccctatggaacaccgtagaggctactgagaagaggaaggatgccaggcttgccaaagactttaaaatttccctacccatagagctatccccagaacagaacaaagccttaattttagactttgcaaaacaggcttttgtatcaaagggtatgattgtagatctggctattcacgatataaacacccaacctcatagccatataaaaacaactaccagagaattaacaccagagggatttggaaaaaaagaaagggaatgggataaaaaagaaacgactttatactggagggaattatgggcaaaagtggctaatgaacatttattaaaagctggacacgatacaactatcagccatttgacattaaaagaacaaatgaaagaagcactggaggaaatggacaaaacaaccgacctggaggaaaaaataaaacttgcttcaaaggctatcgaattaaatagaccagcaatgaaaacaatcagtaaaaaagactggggcgatcccaaatttcaggaaataagaaaacaggaacaggaggcaaaaaaacaaatattaaaaaaggctaaaaatttccgaattaaaaacacaagggaattaaaagaaatacaaacagaattaaataaaaaatttagaccgtctaaaatatataaatcagtttccgaggctattagaaatttaaataataaaattaccgactcaaaattaaataatattcttaatgatagattagataaattaagcgaaacaataaaatcagttcctgataaaataaaacattccatagagaaaagaaaaataaaaaaagagaataaggaacaggaaagaagaaataaagaagaggaaagaatatttagagaaacccacaaaatggatgagttcgggaatatttataatatagaggacgataaaaaatggaataaggaaaataataaacttattaaacagcaaacagccagtaataaagcaaaagccgaagaagaaagagagaggaaaaaattagaggacgaggctaatagactggctgaaaaaaataatatttcacctaacgactttaagcaaaagaaaaagaaagggttaggtatatag

SEQ ID NO: 197437 - DNA, 144 bp, Klebsiella oxytoca
atgaaaaagaaacagaagcctaaaaaaagaaatcgtaataaaaagagtaaattctttaaaatgctaatggcttcggttcgtgaagccgttgaaatttcaaaaggaaatattgagccagcaaggatcacaattttaaaaagatag

SEQ ID NO: 197438 - DNA, 981 bp, Klebsiella oxytoca
atgaaaaaatataaagattttattcttggtggtatccgttcgacggagatcacaagggggaaatctggggctgacgaatgccatccccactttcattttttgcttatggtaaaaggcaattacggtaaaaaatactatgtaaatcaagaggattgggggaaggactggggggattgcctggcttatgagtgtgatagggtagggtatccgtataaccccgtcgattatcctcgtgggttcccaatcgtggacgtcgttagagctatggacaaagaaaagaaaatcgaaataacgaataagaatattaaaaattcgggtgaagcgattataaattatgttctaaaatattccgtcaagggcagtgatattttagaccataaaaagggtaaaaatgacgattggttttttgaatttgataagcaaattaaaggctgtcgaatgataacaccagttggagtttttaaaaaatatctaagcgaaattaaaaaagatccgtttgattatgatattgaaaaagcaaaaatagaggaaagattaggagaaggctatcaggttaataaagctatatttaaaaaaggcgattataaacttgaaaataaaaaagataatgaaggttatttattggaggcattggaagcaaaagcctataatttccagcaattatatttaactatatatagtgattatattaagttctataatgacactaaaagggaaatatctaaattagaagataagttatttaatgaagataatatgttgatcgagtctaaaataggtagattattattaattcaggaagacaggaaaaaacgaattaataatactattgaaagtttaaaaagggtcggttatcttaaagaagaaaaagggctttactatgacgaatggggatcgctttgggcaacatttgaaattgaaaaacctactattgagatagtggaaattaatgattttgctgatatgtttgaggtgtggtaa

SEQ ID NO: 197439 - DNA, 144 bp, Klebsiella oxytoca; identical to SEQ ID NO: 197437

SEQ ID NO: 197440 - DNA, 1299 bp, Klebsiella oxytoca; identical to SEQ ID NO: 197436

SEQ ID NO: 197441 - DNA, 543 bp, Klebsiella oxytoca; identical to SEQ ID NO: 197435

SEQ ID NO: 197442 - DNA, 615 bp, Klebsiella oxytoca
atgaaaagtaccttattaaattacggcataactaaaccaatacgagttataagaaaccctgtttgtataattaattctgagcggcagttcttgttggatgatgatagtgttcatattgtttatgttgggcgtttgacccctgaaaaagggttggtagaatttattaataagttaaatagagaaactaaagaacccattcagttacatctttacggttcaggtccatcggcagaagttattaaatcaatcaaatatagaaaagatctaaaggttatttttcacggatttatagatagaaatcttcttgtaacagaaatatcaaagtatcatatgtttgttttgccttctatttggttggagaatgcgccagtttcaattattgaggcagccgctgctgggttacctgttatcgtccctaattatggaggcttagcagaaatcgcaaaagaaactttatatcattatgaatttgattatgaagataatgacctttctaacatcatcactcaagcagcggctatgaaaggaaagaataaacttaatgacccgaatagtttttcttacaagacttacaaggatagtattcggcgattatatactgatgagcttcaataa

SEQ ID NO: 197443 - DNA, 705 bp, Klebsiella oxytoca; identical to SEQ ID NO: 8686

SEQ ID NO: 197444 - DNA, 165 bp, Klebsiella oxytoca
atgattccgtatttcactttgaaatgtctctacagcaacaataaactgagtatgcttattaactgtagccaaccaatttttatcaacatttactacctgaacaccatcgatagaatggttagtgttttcactatgttctatattaacaaaacctataatttttag

SEQ ID NO: 197445 - DNA, 465 bp, Klebsiella oxytoca
atgggcgccatgagaaagaaaacgcttgatgcagctgaagctgatgcagcccaaaggctgcgtgacatatggaacgagaaaaaagtaactttacgtctcactcaggaaaaggcggcagacgctctcggctttagcacgcaggctactgttagtcagtatttgaatggcagcattccactaaacacagatgcgacattaaaattttcagctcttctgggcgtaaaacctgaggacattaggccagacctcgctgaactaatgaattatgtcaggaaatcaggatcccacgttcaagattattcagctgctggctggcgacttctgaaaccagaagaggcagaattagtagaactgtacgaaagacttcctctgagcgaaaaagaaaggcatctatctgaattaaaagataaagtcagtggattcgaccgcctttttgaagaacttctagccacaagaaaacaataa

SEQ ID NO: 197446 - DNA, 774 bp, Klebsiella oxytoca
atgcttaatcaaaaagttttagatgttcttgtcgggttgtattctttttttgatataaaacttttgacttttattgctgcgggcttcactgtttacttcggatggcaaaaggtaacaagaaaagtttgtgtgtcttaccgagttcgcaggagtgcattatatgaggctcatatttctgatcttgttatctctaacaaacgtgacaatgcaatacccatttcttcgatcatatgtgaaatcggaaataaaggagttctaactctgattgaattcgacagtccattggtgcttaagggatatgattctgtgaaggttgatatgcctttacacagtatgctacataaagggatggaaagagtgaaaattgatgcatttgaacatttttctttttctcttgttactactgctggtaataaaatagattgtttagtcgagagcagcgtaagtattcacagttttcagaattgtatcagtaaaagtacatttaggttcgatgatatagttttgactgaaaagatgcagtttatatttttctacatgaaggagaaggaggaaaagtactgcatatttgattaccataactttatcaacggggataacccttttccatatagccaaatgaaccatgatgaactcaagtatgttttaattgaggaagggtttcatgattggtttgataattatcttctctacagtattgatggacacttatcagctcattttgtgttctcaaaaaacagtatagatatcgactgtaaaaaagataataaataa

SEQ ID NO: 197447 - DNA, 591 bp, Klebsiella oxytoca
atgactttatcattccgccgtctcagtttatgcttggacgatgaaaaaattttgagaaataataatatgcgaaagatataccttctgttgttgtctgtgatcttcccattctttattcacgctcaagagatatcgaattgtctttctattggaaacagtcattggaaattcaccaatgatgttgttggttatgctttcgattgtgaagattgtaatcagccaattgaaattgttgtgaattgtggtgatcctgggggcgctgataatgacaagtttatcaagattgttactgaggatcctttaacatttgcaaaaaacctaactgatgatgcatttaaaaacagagtaaaagtaagtgttataaaagcagatgtgaatggattcttagctggtcagcgagcattagttagtgatcaaatacacatgatcggacaacaagtaaaaacccctatcaatgtcaaatcttattggatcataaataatttgaacctaagaatgatcaatttaagagtttatacgtcgcataacttggatagaaaagatcaaaataggatcgataccttcttgcaaacagcaagtttggtaaagtga

SEQ ID NO: 197448 - DNA, 213 bp, Klebsiella oxytoca
atggctaaaaagcaatatggcatcatgccaccgtttccgcacttggttgccatgctgcgcggttcccagtaccgtcactttgtttttgggatcgactggtggcacaggcacatcatagttttgcgtgatggcaaacctgaactggtgccgattgagcaggtgaagtttgtcgagccaacggaagaggaaatcaagatgttgagtaaaatgtaa

SEQ ID NO: 197449 - DNA, 1251 bp, Klebsiella oxytoca
atgactgcagaaataattgtaaaaaatccggtggcttgtgcgttagctgcagattcagcaatgacaatgactggagggaatagcggcacagtaaaaatatttaataacgcagaaaaaatttatcagttatcaaagcactacccagtaggtttaatggtttataataatgcagacttctgcggaaccccttgggaactatcgattagaagctttcgaaaactacatggacatgaagaacatagtaccattagagaatatttaacttctttcctaaacttcttaaactccacttatgacattacttccacagctaaaagagaagctaagctaaaggaaatgttcaggagatacctaagattaaactatgatgatctaagccaaaaaacacttcatgtttctttgcctgaatcagatgaggaagcacttaatattattcatcagagattaactaatttttacacttctgaaaatgagtttttagaaagaaatcctttttttgaagggtttgatgaattagacattattgatgccagagattttgttattaataactacctacaaatagcattggatattttccccaataatggggacttgccagagcatcttaaaacacagctaataaactttttcactttcataatctgcaaagagaatgtcacaccattatatagtggtcttgtttttgctggttacggttctgatgaatattatgcctctatcattacaatacaaatttatggaagctttaacaataaagtaatgtataaaataattaatggaaaaagctcaaaatcagaccctgacaactcagtaataataccatttgcatcagaagatgaagtgttcaccttcgttagaggctttaacaattcaattattaatttcatgggtaatacagtatctcaattatcgaatgtgatacttgaaaatttgagggaaagaggtgtaaacgatgaaatatcagagcaaaaattaacatcattaaaagatgatatcatagacagggtgcaacgatattgtgatgagaatttcacacagaaagtaacaaacatgctaacttctttatcaaaaaaagatctttcttacatggctgagtcactcgtaaacctcagcgcatttaagttaaagatttcagattcttacgagaccgtcggaggtccaattgatgttgcaataatttcaaaaaccgacggttttgtatggataaaaagaaagctttactttgataaaaatcttaacaataattaa

SEQ ID NO: 197450 - DNA, 468 bp, Klebsiella oxytoca
atgagcagaattattgacattttatcgtttgaagaagggtatcgggaaaagccatacctcgacacactgggatttccaactgttgccggtggtataaagattggaccgaaaaacgcgccgctgagctattacgcgttcacagtccctaaagcggttggcgacgtctggaagcaggtattcgttgataaaacgattgcagagatgaacggctatccagctatcaccgcagctctgaatgtttgcaacgatgctcgccgggacgttctgttcagcatggcgtatcagatgggcgtccccgggcttgccggatttaaaaatacactggctctcattgctgcctcgaactttgaatcggccgcaaaaggaatgcttaacagcctgtgggcgaaacagacgccggaacgtgcagcccggcattctgacgtcatgcgctctggtacctacgacgcatacatggggctaatttga

SEQ ID NO: 197451 - DNA, 180 bp, Klebsiella oxytoca
atgaaggaaccagatatgacagctattaccatttcactgaccattgctgatgtggcaaagatcgttaacgacaacgcggatattaaggcggcggtcatcgcaaaatactttgaaaccaatgctcctgagctggttattcccgaccttcccgctgtagaggccgttgaaaccaccgcataa

SEQ ID NO: 197452 - DNA, 1773 bp, Klebsiella oxytoca
atgggggcgtctttaattgcgctgatttacggcggaacggttcaggatgcgattaaatttgtgaccccgtatatgtatcaaagtctagtatcagacggtaactggagtgcagctatagttgcagctgatgctaaagctgcagaacttggccttcctctgatgggtttcggccaggtattttctgtccgctctttggctctgatttcagaccatatcgaaggagtagggtttactcccgcagacggatatacaggcgcgggaccgacttttaaaatcaatcaggttaccggaaatctttatttcaaaggcagttgtaagggctttacgtccgtgggggctaaattcattcgtggtaactattctggtattccgcaattaactctcgatgcctgcgaattttcgaataatggaagcctgctacgcacaacatgtgttaacgccgtgaataccgcatctgattttgttattccggtagtggatgcgtcggggtttatcgtcggaaattacatctggattggcgattccaaatgcatgattgcggggatttcaggcaacaccattacgcttgtcaataatggcagcgcgccaacactgtattcaggcggaaccggaacaggcagctataaagcggggcagttttttacacgtgatggtgacggaaagaacggtgcaacgattggcgagggcggcactgagcaaggctggggtatctccatccagaatggtatcaggctgatgaataacggctggtttggtttgtttcagtacgtcagagccaaagctggaacggtatcgatcaaaggcaaggttgagggcggtggtaacggttattgcggaatgggcctgtcgtatgttcagggcggagagatatcaggattcactttttacgaaaatgggaataatggcctggatatcttcgagacaaccggggatttatctatttccgacggcctctgttatgggaatggtgtcgatggcgtatttgcctgcggcaatggtacaggtccaaaaatatccagaatcaagagtcgcaataacttccgtatcggtatactggcttatggtcgcaccgtatcccctgcgggattcaatattacagatagcgagtgtacggataacggactctatgacgtttgttataccggggttcgctctttcaattttgccgcgaataccattggtggtgccagcacatctttaaaaattgagggaagaaatggcctccttaatccggacagtgtgactgtttctgagaataattttgctaaagaatcattaatagaagatattaacgccaatatcggcggctataacgatggcggtagtagtggggctatctctgttctgaataaccgctacaacggcagaaacccgaaacataccatcagcaactttaaccgctcacagagtcgctttgtgcctgttggccgcgtgagctttacttccagttataccgcagccgcgggagcaacaatcagcgtcccgctggtattctacaagccaaatgccacgagtaatatcgatgtgctgggtggtcaggtggaaatccagatttgttcaaatccttcattactgaccatcgggacggtaaccagtgcagtgcgtactgcaggtgtggagctaaataatggagcaacaacaaatgggaaaatccttgcaatggcagcgttcggtaccctctcgtacaacttcacactgacaacggcagggacagtttaccttaacgtccgttcgccatacggcgacggcgtcattcagttaacctggacttga

SEQ ID NO: 197453 - DNA, 177 bp, Klebsiella oxytoca; identical to SEQ ID NO: 103873

SEQ ID NO: 197454 - DNA, 897 bp, Klebsiella oxytoca; identical to SEQ ID NO: 103733

SEQ ID NO: 197455 - DNA, 849 bp, Klebsiella oxytoca
atgaacctggacgaaagaatcaccctggtcgaaaaacagttgcaggagctgtcacagccagcgctggacatcccaaacaccgaagtcattaagcagttagtggtctgcgaaaagcacggcgactatgagcaacgccagcgcgtatcaactggccttgtccgtctgccaggggcgccgactagctgcccgggatgcctgaaagatgagctcgttttcctgcgaaacgagaaggccaaaacggatgacagaactcgcactgcgaatgttgaacgcctgatgctggagctcaaggtcccggcccggttcgaagcctgcacgctggataactaccagccggtgagcgaagaagcagcgcgggcgctgaaagtctgccgagcgtacgccagccgctggccagatcgccggaagaacggcggcggactggttatgtgcggcaaacccggcacggggaaaaaccacctagcctatgccattgcgaaaagcgttatcgcagagcaccagagcccggttgtgttcaccaccgcgctgaaaatcgcccgggagtttaaatccacctggtcaaagacgtcgacccgctccgaggaagacgtgatccgcttcttcaccaagccggatctgctgattatcgacgaggtaggcattcagttcggcagcaaagccgaggagatgatcatgtttgaaatcatcaacacccgctacgagcgcctgaagccgacgatcctgatcagcaacttgccaaaggatgagttgacgcagtttatcggcgagcgcgtcatcgaccgcatgaacgacggcggcggctgcacgatttcgtttacctgggacagctatcgggagaaccggtcatga

SEQ ID NO: 197456 - DNA, 585 bp, Klebsiella oxytoca
atgactatcacactacaggcagtaaacgagctcatcgcttcccttgagagcgcaggcgagctgtcgatcagagagcagaagttcctgaagctggcgaaagcgtttaagcagttggctgcggagaatgcctatcttctcagcggagcagcccgtgaacttaacacttcatggatgttccacaaaacgatgctgggtgctcaggcggcgatggcttgcctttcgcttggcagggagtctgctgctcgcgactggctggaaggtactacagacgaagctggggccgatattcccgttgatattaccgttgctggcctgcaggcatggttcgacagccagatggtcagcaatgacgggaaaagcggattcctgaccaggaaggaagccgaagaggctatccgtaaggcgtgccccgccaccgacgccttcctggacgggattaaggctgatggggtggagatgtttgtcgaaaaatgccgagaagaatctatgcgggccatttcttcggatatcagaaacaactggtggcttgctggcgagcacgccgaaggcttcgccgccaagctgcgcgagggggacggcaaatga

SEQ ID NO: 197457 - DNA, 588 bp, Klebsiella oxytoca
atgactgatatcaccgaactggcgcagcggaacgaactgctgattgcaaacgggcagcagacagcagacctgctacgccacctggcagataacgaaattgattctgactattttgccgttgtgtcggagtgtgaaagctacgggaaagaaactgacgctgagttatcgatcacggagtttgccctccgtgccgctggctacgttgacgcgctggtagaggcgctggagctcaaggaagagcaacgcgctaactggttccagatggcacagaaattaggggacgacctggatgcggccgggaagcgcatcgccgagctggagtcccgcaccgtcaccgtgaagcctgatgatgccgatgaggtccgggaagaaggcaatcaatttttggttgtacgccatccgggtaaggtgccagttatcaaacacccgataggtcagcttgaggattatctacttcagattctgaaggctgatccgttagccaccatcgacattgtgactcaccgctattacggcgccggcggtcagtttgttgaggatgcggatgaatatctgcatgagatgggcatcaagtgggaggctgagtag

SEQ ID NO: 197458 - DNA, 375 bp, Klebsiella oxytoca
atggcactgaccaaaaaacagcgcgcagaattgcgcatgaagtttggcggccgctgcgcttactgcggctgcgaacttggagacaaatggcacgctgaccacgttaagcccgttttacggcatatgaatggcagcggcatgattcatgctgaaaacgacactgaggaaaatttggttccggcctgccatccttgcaatctgcacaagcattgcaacagcctggaggattaccgccggatcataggcgatggtcgtcgcgagttcctggtgtctgggaaaggaaaggcgctggttcgtatggggctggttgagatgaaaccagacccggtagtgttctggttcgaaaaatatcaggcagaaggagccaaccaatga

SEQ ID NO: 197459 - DNA, 231 bp, Klebsiella oxytoca
atgaccaaatatgaattactcgactcaaaaataatgaacaaaattggtgggcaccccactccatttttcagcctgtttgtccgcgacgtcgctgatgaatgcgccaaaatcgcagctgacgaaagtggcggcaaagagccgttcagaattcttgatcgccgactacaggcgctacgcaaggctgggaaaatccgtagcacctctaaaggctgggtgaggacagaccaatga

SEQ ID NO: 197460 - DNA, 258 bp, Klebsiella oxytoca
atgaccaaaatttacgtaacgaaatacgctctgtcttcaggtcctttcacggttgatgctgaagtaacaggaggatccgcattttggtatgacaatggataccagcagagcgtacaccgtaaagaatggtggccgacggaagatgaggccatggcagattgtgagcgccggcgtactgaaaaactagcttcgatcgagaaacagaagaaaaagcttaccgcgatgacgttcaccatcactgaggtttcgaacaaatga

SEQ ID NO: 197461 - DNA, 714 bp, Klebsiella oxytoca
atgaccagcaaattaaccataacagacgagcgcctggcggaattagtggagttcaaaccattacttggcaccgatatcaactcggccacccgggatgaatggatggctatgtccgcagagctacaggaacgccgcaaggccggcagcgagccggttggtgaattctacgaggatggcccgctgaactggtatcaaatttcggatggtgatcgagtcccggcccacaggcgtattccgctctatcgccacgcgcagccagcgccggtagtgccggaagaagccactccggacagtatcgagattcttgccagtgccaggcgtcgtgaccacgctgtattccagtgggatgaagaccaacgaaatgcggccgctgattcctggaacgcctgccgcgccgccatgctgcaggcaaagtcgctgaccagcatcaatcccgcgccaactctggtttccttgccaaaaaacgccaagtcgctgaccggcaactctccggtaattggcattgacctggcatcaggtccagatcgcactgtcgaggttcattacgttgtacctcccggttacgttgtggtgccgaaggagccgacagacgaaatgatagccgctgctatgaactgcaaagatgtgctgttcaatagcgatgattctttttgcatacagttcgtgaatatctatgaagccatgctcgctgccgctccgaaggaggtgaagtga

SEQ ID NO: 197462 - DNA, 870 bp, Klebsiella oxytoca
atgagttacaaggagagagagcttactgtatcgttcacgctggctaacggcacgtttgacggtggcatcggaaataccctgatagttaaagggttcaaatgcgaggcggctatatctgcctttggcggcgctactggcacgatgatggagctaagtctgtgggggttgtcgctggagaacatggccaagctgacgaccaacgcgcaaaaaataatcgctgctgagcaaaacgctatcgtcgtttatgccggtgatacccgtgttttttccgggtcgataacatctgccaggattaacctgaatcagatgcctgatgcgccgattgagataaccgcggcggcagccggaagggagcgcctgatcccatgcgagccaacgtccattcgtggcaatgcggatgtggctgacatgatccgcgctcttgcctttaaagttgggctgaaattcatcaatgttgacgtcaagagtaccgagcgaaacccggtatacaaaggcaatgcgataaagcagatcattgaaatagcagctgcgcataaaataacggtaaatattgattttggcaccgtcactatttataccggaaagaaaccctctgattctgtcgttccatatgtttctccatcaacaggacttattgggtatcctattttttatgacatggggattaactttcgctgcatttactccccgactctgaaactgaacaccaaaatcatccttgagactgacctgccacacgcaagcggggaatggattattcaggcaggaaccactcattacctttcctgtaaagttcccggtggtctgtgggaaacgttcgttgtggccgcgccgggatatcttgtaaaagggaacgaaaatgctaactaa

SEQ ID NO: 197463 - DNA, 843 bp, Klebsiella oxytoca
atgggtaggggtaggcgtctcaaatcctatttggattatgaaaatgcgctaggtgacggcataggagtgggctatggccaaagttatcagccctggcttagagctcaggacgttaaatcccgtggaaaccgttcgatagtctttggccttaagacgtttcgaaaccatcatctcctttcttctgtcgaaagtaactttttctatctggctgagtttaatgactcggtgattgatatccgggaacaattcccactctttcctctccggcttacccaacaaatagcaaatcatctacattttcaacatcctatggtgaggggagtaagaggagtacctgtcgaagttctgaatgttatgacaaccgattttttactgaccttgagaactcctgaaggcggacttcgatacaaagctgtagcagtaaaacaaaacgagagcatacctgaacgcgaagcccaaaaacttgaaatagagaggatgttttggcagttgattgatgttgagtttcaaatttatgttggctcggaactcaataacgtcgtcggtaaaaatatttgttgggttacttctgtattaagagatggttctgtattttatgataaatatcctcttgataaaatcctatggaagcttaaaccagatgtttatcccatagtgggactacgtgcaatgatttcatcaatcattggggtagatgcacaagaagcgatgatgttattgcaggcaatgattggattaaaaatgataaaaattgatttatcatatccaatactcgaaaccggtctgataaagataatatccaatggccactatataggactgaacgcaaatggatattattag

SEQ ID NO: 197464 - DNA, 2124 bp, Klebsiella oxytoca
atggatattattagaaattcagtctggctctctcaaggcactgatttgcttgcagaggggctttatcgtgttttggattttgacaaaaaggttgatttgttaattttgtttaaaataaaatcagaaagaacgggtaagccaattcctttctcattttcattgtttaaatattatattgaatcaaatagcataacttgtaaagattatatatacccttcatatatgttagtagatgagaaagaaataacagatgaagacaggggaaggcgagatgaaaattacaatatcattaaagatcttgtagatgacagaatgtttctgttcgactatgcattacataaaaagtctcaccttttaatggactactccagaaataaaaaaatatcacaatatactatcagaacgcttctggcgttgtactggcgacatgggcaggatgtttatgcattactacccgcattctcgaactgtggtgccgctgggaaaagtagaatcaaacatgaaattaaacttgggaattccaagaaaaacagagcattacctaatgaacgttcacgtgttttcattcttaatgaaagagatataaataatattagaaaatctctcattatgtatcattataaagttaacggagatacgataaagaaaacattagagagacatattgatttgtattttagggatgaaattaaaacagcgaacttagaaaatagagctccatatgttccttctttaaaacaattttcatactggaataaaaaactcttcactaaagatttctcgataaagaagaagaacacgaaaaaagaaatagacctcaaaatgcgggcgcttttaggtagtgcggctaatacaactgttttaccgggtgatgttttcgaaatagactcaactgtcgctgatgtacatcttatttcgagtttaaacagacgaaaagtcattgggcgcccaactatttatacagtggtggatcgcgcaacaagaatgattgttggccttcatgtttctttataccatgcttcatggcgagctgcccgacaagcgttagcaaattgctttatgccaaaaaaagaatattgtagattatttggaatctctattactaatgatgattggccttgttctcatattccattaacattgatgtgtgacaacggggagatgattggtcttaaacctcaggaaaagatgacccccctgacaaaacttgagtttgcgccagtcggtagaggcgacagaaaaagcattgttgaacgctgtttcggtattctaaatgatgaagttattcataggcttattggaacaacacgaaggggtaagattgttaaaggagagccaacaccgcaatccagggcttgtttaacgattcaggaggtcacgtctttactgattcgggagatacttgcacataatcagagaacatatgaagaactggcttatatcaatcccttactgattgaaaatgatctcgtaatatcaccaaaaaatagttggatgataagcttaaagcacgggagattcagcgcaagagccgttggggccgacgaagtgatcgcacgattgttgatccctgtgaacgctaacattaccgccggtgggattcagtacaataatcttttttatgaatgtgatccagacattgcatcaggtgccagagtatttggaagaaccacttgtgaagcaagaatagatgacaattgcgtagattatatatatgtaagatttgacaaaaatagcattttcaaaaagcattacctgcttaagaaaagagatatatttaaaggtaaagctcatcttgatacagatgtaatggctgattgggtagatactcaaaaagaaattaatttatttactctggattcactcagcaatatcaataataaagatgattttaacaagaaaggtaacgaaagattaaatgaaatatacgaatctcgacgggtacatggtaaagatattaaaaagaacaggaaaaatgaacttgattcattagggcgaactgatgttgctaatggaagacctgaacccctacttccgtcatccagtaaggttctgcttttgcctggccgggaggagaaacaaagatggttaaaaggtaagaagaagactgaggacgcagaataa

SEQ ID NO: 197465 - DNA, 1449 bp, Klebsiella oxytoca
atgaaccttatacggagcgtttcagcgatatataaagaacaggagttacctgagtatcgtggcaaccccttaattgaagcacttcctgaagcgcttacggaagatgaagtacttctggaaatgagttattttcccgaaattgacgaaaaaatccgctggactgccccggcgaatgttagagagcagtatgtcgaacgtataaagaaattccgttgccctcaaaccaatcttatccaggcttataaaatgattttacgggcacttagggaaagctatgcagcccgtaatcctttaaaaagcggaactattcaatatcttcattactatgggactgagcgtcctgatattgaacccgaaagtggatattttaaatcccaggctgaaaccattacgatagttggaatgagtggttctggaaaaactaccatgatcgagcaagtcatggatcatttccctcagattatagaacacagcagctataaaggagtttttcccggcttcagtaagcaaatcgtatgggtaaagattaattgtccatacaactcaagtgtgagagacctttgtgaagagattttacaaaaattagatgatgcaattggtattgaacgaactacaccagagattagaaatggtgctctggctcgccagattgcgcaaagaataaaatcatcatttttaggtatccttgttattgatgaaatgcagaggctaaaattttcaagaactggaggtgagagtaagttgattgattttttacatgaaattgtagattcgatgggggtatctatggttttttgtggaaatcatccttttgacgagactctgacaaagaaaatgagaattgccaggcgggcagagtctggtggttatatgaaaatttcaaatgtcagatacgactcacaagactggcaatcgtttattcattatttatggccattacaatggacaaatgttgaaacaccattaaatgatgagttaaacgaaaaattattcattttatctaaaggcaacattggattggctcagatgatttatcggggggcacaattaaaggttatcggtagcggtaatgaaatcataactggtgcagtcttgtcggcctctgtaccggtactcgtaagccatacggaggaatataaggatactttactcccgggggcagcgactgaagacgaggaagccaaatggctctctgcatctaatgaaagtgatgcttcggctaagttcatgtcagagaagcccttaaaagctttgatccctggagatatagacaggccacagcacaaggaattcgtaagaaaaatagacgaggttatgcgcaatttcgacgagaaaatactgtctcttgaccatgatcttgttatcaccagaacagctgaaaagaaaaatacctacgatgctcttcagcgttgcgggcttataaatacagatccacttaataaattgtaa

SEQ ID NO: 197466 - DNA, 1557 bp, Klebsiella oxytoca
atgagaatgttgtctgttttacctgatgaatccttgttcagtcggttttgtcggacagctaccgtgtacggtatgtccccatcttctctgttaacgatcattttccacaaacctgatatgagcgtccatccaattctcaattcaggattaaaggctatttctcttcatacatccgaaagtgcagaccagctctggcatgaacagactttactccctctgtttgcctgggcactaccaatcagtcgtaatgaaattatggatttcaacacgacccctgccaggcttaatcgattgtgccgccttagtaatttttcactaggacagcggacactattgaagttttgcccggtttgcgctcgtgaagatacttttcattatggtgttacttattggcatctggcgcatcaacttcatggggttacaacctgccatcggcaccaggtagtgcttgaaagcatcaatgtcccttctgcaccgcacatacgtattggactgatgcctcctgtttcgtatacagaacaactcagcaatgagacagacttcgattttgctaaattttgttatgagtccataaatataatcagaagaaaagaaatttgtcacccaaattacatggatgtacttaaaaagttaaatttattatcattggacgggaatctgaagaaaaatgtattttacgcacatgtttatgctaagtgccagttatttggggagggttcatcggagcttctaccgacatcccttactgattatcactactgggagcctatactcaaagataaatgttgtcagcatcccacaaagcaccttttgctttgttattgtttgttaaatacttgctggccaacgtatgcaggaagtcgtcctaataaaaagaaagaaatctttaaaagtcataaggaatacagctttcatatggctgaaaataatactagtgttagcaaccttgggagagaatttaatcgcagcagatgttacattaaaacacttatttataaaaaatacctgagggcgtttaagcgaaacacaaaaattaatatattcactgaattgcttatcaagtctatggctgtaagggggtttagtctggcatccatagctgagaaaaactcattatcggaaggaactgtatcctctgtaatttcatcttgttacggtttatgctcatggcgtaaaaaatgtaaaaaagattctttaagacggcgtcataagcagaaaatattaagatttatacataatcaatccatttctgtaacgcgaaagttagtcaaggaaagttgttatgctagtttcttttggctaaataaacatgaaaatggctggcttaattcctgtcttcctaaagcagtacgatgttatagaaataaaagagtagactggagcgagagagatataatctcatcatcattaataaatgttgttttatctcaggggcaatacccgatgtcacttacaagcctggatgctttactgggggggcataactggcttttgaaatacagagataaactaccaatgacaatgacacttctcaggaaaaagaatctaattaaataa

SEQ ID NO: 197467 - DNA, 927 bp, Klebsiella oxytoca
atggtttgcgaaaatgaattgtggcacagttttcttctgcgttcacagataatgtataacttatccaattgcaggaacataatatctaagcatggtgaactaaggtacgatgcctttcctcggctcgaactgattgatatgtacaaattgcatagtttgcaggatatatatgacattcttgccacaagaaatggttatatactaacttccaatatagtgtcgttatcttctggtgtttacgggtatttcaacgctgttgaagatgcctgtcgaaataatttacacataactaattcatatccattggtaaacatctcaaagattcgttactgccataaatgtattattgaagatatacactctaaaggcattggttatcttcgtcatagatggttgtttgaatctaaatgtgcagctcatagtacctgtttatatgaggtttgttttgacaactatttggatgcagtgaaaggacttagtgacttaattataagtggaataaatcctcatggttattgttcccttgtggttgacatttcaaatcctttcaaaactccagtgtatttattgccatgtgccagggataaaattttaaaatggatttctgacaataaaaatgagctggtttactttctctttgacctctttaaaagtaaatcgcattctagtttattaaaggttattgaagtcaggataatgcatagtagttatatttctgcggtgttcaggatattgagtgaggttaatttttgtaatttcaactcatttattaccgatttattcgaggacgtaagttatgcctctgttggacttgatgattattctgttaatgtggattttctcaggctaaaagccgcagattgcaaattttgccggttcaatggtaaaaatttttgctcactttttaatgtaaagcttcttcgctaa

SEQ ID NO: 197468 - DNA, 216 bp, Klebsiella oxytoca
atggggttaaaaatggcgtacatactttcgatgagtgaacaggttaaactgaaagcgtttttggcggcagtactcgatgactataagctgggagctatttcgcagcagcaagctgttggcgggatcactagcctggttgatgctcttgagatcagtgactcggggaaaatcagccaaattctatcggaaggacgtaaactcctccggacgggataa

SEQ ID NO: 197469 - DNA, 345 bp, Klebsiella oxytoca
atggacccaacagaagaaaatagccgtcttgccggtgaaaaaattaaaatactggactatcccgatggcaccctcgccttccactatggacaccggagccttaagtgccaggcatttgataagctggcctgtgtcgaccaggggcagattgtcgataacaaacgtctcgggactgtactcagactggctcaggtaaaacaggatgagcgggaaagcgaaggcaaacgggaacgaagcaaaaaatcgcccagccgtaaggctcaggtgcgcgtccaggaacagctccgggctatcaatcccgttctggcagacccgagcttgtttgtggcaagttcaaagcgatag

SEQ ID NO: 197470 - DNA, 603 bp, Klebsiella oxytoca
gtgaagaaatcagatattagtataattttcgataaaaatattcccgatgaatttttcaaagattttgaaaacgatgtagaagtacaaggtttaaatcttgttattgagtccagagaaccaacaggtccaatggcctgtgctgaatggttcatccttccagttgtttttgcattcatcggtaaaagctactttgatggcttcctgaaagaaatggggaaagatcactaccaatccatgaaggaaagtctatcaaacttaacaacaaaagtaatgaagacccccagaattgagccaacactatttagcaccaaggggaaaattagtagccgcaatccattttctcttgcattctcaattctggcagaagcagaagatggttatacattcaaactactaatacctaaagcaacaaatgaagctgattatggtttaatcgctaagaaatttatggattttctttctgactatcatttagggattgcgaccctggaatccataggctatatatctgaaggatgcagacttacctctggattaatcttcgtgcattacaattctgacaataactctattgaatggttaaatcaaaaagactatcgttaa

SEQ ID NO: 197471 - DNA, 795 bp, Klebsiella oxytoca
atgcccattgctaacatcacggctcagcagttcatcggagcattagagccaacacacgctgccggaagactcgaaacggttaaacgtctgagccagcgtatcaatgaagttatggattatgcgctcaattccggtctggtatctgtaaaccccgccgcacgaatcggacgaacattccataaaccaaaagtaaagcaccgccctgccttacctccaaagcaactccctcttttaatgaaaactctggcatttgccagtattggacgtcaaacccgatgtcatatcgaatggcaattgcttacgatgattcgtccagcagaagcatcaacgactcgctgggatgagatcgactttgatgcaaaagaatggcgtatccctgctggccgtatgaagatgaagcgtgaacacatcgttccgctttctgaacaggctctggcaattctggaagtgatgaagcccatcagtaagcacagagattatgttttccctggctaccgtaatccacttgaaccgatgaatagtcagacagcgaacatggcgcttaaacgaatgggcttcaaagatcttcttgtcgctcatgggatgagagcgattgcctcaacagtgcttaacgagaaaggttttcctcctgatgtgatcgaagctgcgttagcacatatcgatactaacgaagtcaggagagcttacaatcgcgctcaataccttgaacaacgtagagagatgatgaactggtggggagaacatgtggaagcggcttcttttggggcaacgagtattacttctgtggctggataa

SEQ ID NO: 197472 - DNA, 396 bp, Klebsiella oxytoca
atggcgcgtcagacaaagccccttaacaacaccgaagtcaaaaatgccaaagcgactgaacgtgccactatcctgtacgacggggatggcttagagctactggttaagcccggaggctcaaaactctggcgattccgctattacaaacctttcactcgcaaacgcgccatgattagctttggtgcttaccctgctgtatctctctctgaggctcgtcaacttcgtgaagatgcacgtcttctattgagcaaagatattgatccgcaggagcataaaaaaaccgtacagttgcggcaaaaaagtgccactgagagcacctttgaaaaagttgcaggagactggtttaaaaccaaagaatcagcggggctggcaactcatacattaaacgatatctag

SEQ ID NO: 197473 - DNA, 168 bp, Klebsiella oxytoca
atgccgatcctggcccggcgtataccagataacttcttctatttcggccgtcggcgtaaaattcgctctgttggtggctatctgaaagatatccgcagagaccgtatggcccggctcgtttgccgccgtatcggtgaaacggccgaccggaaccagttcttcaggtga

SEQ ID NO: 197474 - DNA, 180 bp, Klebsiella oxytoca
gtgggacatcactcctctgccgtggccgagcgtctggcgcaggttgtggttccaatcgaagattattttatctgggtgaccggggaaggcgcggtggtgaaatcactgctggcgcgttttgaaggtccggagattgacccgcagctggtgcgttcgcaggcctactggcacagcaagtaa

SEQ ID NO: 197475 - DNA, 219 bp, Klebsiella oxytoca
atgatgaattgcccaaagtgtggacatgcggcgcatacccggagcagttttcaggttacggacagcacgaaggagcgttactgtcagtgccagaacattaattgtggcagcacatttgtcacccatgaaacggtagtgcggtttatcgtaacgccgacattaattaataatgcaccaccgcaccctttgccgggtggtcaagggcacatgaatttttaa

SEQ ID NO: 197476 - DNA, 1101 bp, Klebsiella oxytoca
gtgaatgttagttctgaactttttgattccaacagcaaaagcccggcttttagtatcaccattgaaggtaaggacgtgactaccgtactggatgcacgtctgctgagtctgacgctgaccgataaccggggttttgaagcagaccagcttgatctggagctggacgacgctgacgggcagattgttctgccgcgacgtggtgccgttatccagctggcgctgggatggaagggccagctgcttttcccaaaaggagcattcactgtggatgagattgagcatagcggtgcccctgatcgtcttaccatccgggcgcggagtgcagatttccgggaaaccctcaatacccggcgtgaaaagtcatggcaccagacaacggtgggggaggttgtaaaggaaattgccgcccggcataagctcaaaatggcgctgggtaaagacctgacagataaggcgctggatcatatggaccagaccaatgaaagcgatgccagttttctgatgaaactggcgcgccagtttggcgcgattgcttccgttaaggatggaaacctgctgtttatccggcaggggcagggaagaacggcgagcggtaagccattgcctgttatcaccattgagcgtaaagccggtgacggtcatcgttttactctggctgatcgtggtgcttataccggcgtaattgccagttggctgcatacccgcgaacctaagaaaaaagaaacaacgaaagttaagcgccgtcggaagataaccaccacacctaaagaggcggaagcaaaacagggtgattatctggtgggaacggatgaaaacgtgctggtactaaatcgcacctatgcaaaccgcagtaatgctgagcgtgcggcaaaaatgcagtgggagcgtttgcagcgtggtgttgcgtcattctccctgcagcttgcagagggccgggcagatctctatacagaaatgccagtaaaggtgagcggttttaagcagtctatcgacgaggccgaatggaccattacaactttgacgcatacggtcagcccggataatggctttactaccagtctggagcttgaagtaaaaattgatgatttagaaatggaataa

SEQ ID NO: 197477 - DNA, 486 bp, Klebsiella oxytoca
atgatgatggtgcttgggttatatgtctttatgttgcgtaccgtgccctatcaggagctgcagtatcagcgaagctggcgacacgccgcaaacagccgggtgaaccgccgaccatcaacgcagtttcttggaccggataacgattcgctgacgttatctggtgtactgctgccggaagtcaccggcggcaggctgtcattgttggcactagagcaaatggctgagctgggcaaagcgtggcccctgattgaggggagcgggaccatttacggcatgtttgtgatcgaggggctgagtcagacaaaaacggagttttttgcaagcggaatgcctcgccgtattgagtttacgctgaccctgaaaagggttgatgagtcgctgtctgatatgttcggtaatctcagcgatcagctcagtaatctgcagaactctgcaacgtctgcaataggtaatattaaaaacacggttggagggatgctgcagtga

SEQ ID NO: 197478 - DNA, 3075 bp, Klebsiella oxytoca
atgagtgacaataacctgcgcctgcaggtgattcttaatgcggttgacaagctcacccgtccattccgaaccgcgcagaccagctcaaaagagctggctgcagccattcagcaaagccgcgcccgattaaaagagttagatgccctggcgggccgtattgacggtttccgcaaggccagcgctcagttagcagtcaccggcaacagccttaaagccgcacgcgaagaagcggctaaacttgccacgcaattctctgccaccaaccgcccgacggcggcgcaggcgcggctacttgagcaggcaaaaaaccgtgttacagagttgcagagtaaatataacggcttgcgtcagtcggtacagcgccagcgtcttgcgttcaatgaagccggactggacacgaaaaagctcagtagtgcgcaacgggaactgcggcagaatgccgacgaaacccggcaggcgctggaccggcagcagaaatccctgaaacgcctgggcgaacagcaggcgcggatgaacgccgtccgcgatcagtattcgcgccgtcttgaggtgcgggatcgtatcgccggggcaggggctaccaccacggctgcaggagtggcaatgggtgcgccagtagtggcggcagttaagagctatgccagcatggaagatgccatgaaaggcgtggcaaagcaggtaaacgggctgcgggacgataatggcaaccgcacgaaacagttttatgacatgcaggctgccatcaaggccgccagtgaacagctgccgatggagaatggcgctatagattatgccgcgctggttgaaggtggcgcacgcatgggtgtcatcaatcaggacgatccttacgaagaccagaagcgtgacctgctggcctttgcatccacggcggcaaaagcagcaacggcgtttgaactacccgctgacgaactggcggaaggtctgggtaaaattgcgcagctgtataaagtccccacccgcaatattgaacagctgggtgatgcgctgaattacctggacgataacgccatgtcaaagggtggggatattatcaacgtgctgcagcgcatgggtggcgtggctgaccgcctcgacttccgaaaggctgccgcgctgggttcaaccttcctttctctgggcgcagcgccggaaattgccgcgagtgactcaaatgccatggtacgtgagctttccattgcaaccatgcaaagcaagcgcttctttgaaggtatggacttgcttaaactcaaccccgcagagattgagaaacagatgaccaccgacgcaatgggcactatccagcgcgttctggagaaggtcaacaagctacccaaagataagcgcctgtctgccatgaccatggtttttggcaaagaatttggtgacgacgcagcaaagctggctaacaatctgccggaattacaacgtcagctaaaactcacctcaggcaatgaagcgaacggctccatgcagaaagaatctgatatcaataaagactctttatctgcgcagtggttgctggttaaaacaggtgcgcagaacgctttcagtagtctgggcgaaacgctacgccagccactgatggacattatggattctgtaaaacgtatcaccggcgcactacgtcgctgggtggagaccaacccgcagttggcaggcacgctgatgaaagttgcagcggcgactgccgcgatcaccgttgcgctcggtacgctggccatggcggtagctgctgtgctggggccgctggcggtgatccggttgggcctgtctgtgctgggtgtaaaaactttaccttctgtcactgcggctgtgacccgcaccggtagtgtattgtcatggctggcaggcgcgccgctttccctgttacgtcgtggcatgtcctcatccggcggtagtgccagtctgctgagtgctccccttcattccctgcgacgttctgccggactggctggcaacgcactgaaagcggtagcaggtgcaccgcttaccatgctacgcgcgggaatgtcaggcatacgtaatgttattggtatggtgatgaatccgctggcggcgctgcggggtgggttatctgccgctggcgacgtgctgcgctttttggtttccggcccaatggcattacttcgcgttacgctgtacgggatttccggcctgctgggggcgctgctcagcccgatagggctggttgtagctgcgctggctggtgtggcgcttgttgtgtggaaatactggcagcccatcagggcatttttaggtggtgtggtggaggggtttaaagccgcagctgcaccgatcagtgctgcctttgagccattgcggcctgtttttcagtggattggtgacagggtacaggctttgtggggatggtttactgatttgctcacgccggttaaatccacttccgaagaactgaacagcgcagcggcaatggggcgcaggtttggtgaggcgctggctgaaggtctgaatatggtgatgcacccgcttgagtcgcttaaatcaggtgtgtcgtggttacttgaaaaactcggcatcgtcagtaaggaggcggcaaaagcaaaactccccgaacaggttacacggcaacagcctgccacggtgaacagtgacggtaaggtagtgctgccgccaggtggatttccgtctatggggtttgcaggtatgtatgacagcggaggcacgatcccgcgtggtcagtttggcatcgttggggagaacggtcctgaaatagtgaacggtcccgcaaatgtgaccagcagacagcgcactgccgcgctggcttccctcgttgcaggtgtcatgggcgtagctgcagcgcctgcagaggccgcacctctgcatccgtacagcctaccagcaatggcatacaaacaaagtcaacctgtgaaatctgccagcgtaccgtcagcgatccgttatgagattaacgcgcccattcatatcactgcccagcctgggcagagtgcgcaggatattgcccgtgaagtcgcgcggcagcttgatgagcgcgagcgcaaagccagggcgaaagcgcgcagtaatttcagcgatcaagggggatatgattcatga

SEQ ID NO: 197479 - DNA, 303 bp, Klebsiella oxytoca
atgagcgacaagctgactgaaaagaccgtaccactggataccccgatcaagcgcggtaaaacggaaattactgaaattgtgctgcgtaagccgcaatccggcgcactacgtggcacccgtctgcaggccataatggatatggacgtgggcgcgatgatgaccgttattccgcgcatctccaccccggcgctgaccgcgcaggaaatggctgagctggaccctgccgatctcaccgcgttgtcggttgaggtggtgacttttttgttgaagaagtcggtgcttgccggtttaccgacagcctga

SEQ ID NO: 197480 - DNA, 516 bp, Klebsiella oxytoca
atggctttaccacgtaagttaaaacacctgaacctgttcaacgacgggaacaactggcaggggatcgttgagtctctgaccctgccgaaattcacccgcaagtttgagaagtatcgcggcggcggtatgccgggcgcggtggacgtggacatggggctggatgacggcgcactggatacggaattttcaatcggcggcaccgaactgctgttattcaagcaaatgggcaaggccaccgttgacggcatccagttgcgtttcaccggctccattcagcgtgacgataccggcgaagtgcaggccgttgagctggttgtgcgcgggcgtcataaagaagtggattccggcgagtggaaaaccggagagagtagcgccaccaaagtcagcagcaccaacagctacgcgaagctgaccattaacggtgaggtgctctatgaggttgatgtggtcaatatgattgaaatcgttgacggcgtggacctgatggaagcacaccgtaatgccctcggcctctga

SEQ ID NO: 197481 - DNA, 402 bp, Klebsiella oxytoca
atgaaatatttcacggcaaaaccggttggtctttatgacgacgaaaataatattattcctgctgatgctatcaatataagcgaggaacaatatcagctattacttgagggacagcgcaatggtaaatttatacaggctgattcttctggttcccctgaactggtggatgaattcccgttagcacatactgaattagttgctattgcaaaaggtcagcggtctgaatttctggcaacagctaatacagagattgcatggcggcaggatgcgcttgatgcgggaattgcgacagaagacgaaaccgccacgttggcagcctggagaaaataccgggtgctgctgatgcgggtggatgtatcgatggccccggaaattaactggcctgaacctcctgaagaataa

SEQ ID NO: 197482 - DNA, 1506 bp, Klebsiella oxytoca
atgagcgctaaattttataccctgctgacggatatcggcgcggcgaaactggcaagcgccgccgcgctcggtgttccgcttaaaattacccagatggcggtgggcgacggtggcggcgcgctacccacgcccagcgcacaacagacaaagctggttgccgaaaagcgccgcgcagacctcaatatgttgtatatcgatccgcagaacagcagccagattattgctgagcaagtgatccctgaaaccgagggcggttggtggattcgtgaggttggtctgtttgatgaaactggcgcgctgattgccgtgggtaactgcccggagagctacaagccgcagctggcggaggggagcgggcgcactcaaaccgtgcgcatggtactgattaccagcagtaccgataatatcaccctaaaaattgacccggcagtagtgctggcaacccgcaagtatgtggatgacaaggtgctggagcttaaggtgtatgtggatgacctgatggcgaaacacatcgcggcaactgacccacatccccggtacgcaccgaaagccagcccgacattcaccggcacaccaacagcgcccacgccagcaagtggtgataacagcaagaagctggcgacgacagaatttgttgttaaatcggtggcgagtctggatgaaaaaaatcaggctaaataccttcctaaagctgggggggatattacaggccggttgggtgttgccggtaaacttgaagttggtaagtccgaaactgaatcggttattgcgttaggttcatccaacattctgagagataacggcaaaaaagcacttgttatcagtagtgagtctggtgcaggttcgacagcaggaatatatttgcgccctaatggtagtaccgacagctcaatcgagttacatgggagcagcagcgggtggaacttcaccggcacaccaacggctaccacgcctgcagctacggacaaaagttcaaaactggctactacccagtttgttgcgagagcaattgcgaatcttgcgggtagtgcccccgagacgctggatacgctcaaagaactagctgatgcgctgggcaacgatccaaactttgcgaccaccgttctgaataaactgactgagaagttagcaaaagaccagaatggcgctgatattccagatcccactgcctttatcaaaaatctgggcttaagaggcgcgatcacaggtactgaatccatgtttcgtcttccggcgtttattaatggtcagccgggagaatatgttattcagacacaacaattaaccagcaatacaagtagcggtttgaatgtattccctgaggcatttaacaataagtgcatgattatcattgccgttgattatgcttctgctgctgttgataactcgcgtgtcagatttaatgtgcctactaaatcgcagtgtgaatggtttgggcagaccatgtccgttaatccaactcccgttagcccttccacatgggcatggctggcaatagggtattga

SEQ ID NO: 197483 - DNA, 606 bp, Klebsiella oxytoca
atgaatagtctgctgccgcctggttcatcgccgcttgagcgccggctggcgcagacctgcagcggaatttccgatctggaagtgccgctgcgcgatttatggaacccggcaacgtgtacggtcagctttctgccgtatctggcgtgggcgttttccgttgaccgctgggacgaaagctggacggagagtgtcaagcgccgggtggtacaggacgctttctatattcatcagcataaggggacaaccagcgccgtgcggcgcgtggtggagccgttcggcttcctgatccgcatcattgagtggtggcagaccggcgagcaaccgggcacgtttcgtctggacattggcgtgcaggagcaggggatcacagaagaaacctatctggagctggagcgcctgattagtgacgccaagccgtgcagccgccatctgattggcatgtccatcaacctgcagaccagcggcccctatttcgtgggtgcggctacctacaccggcgaagaaatcacaatctacccgtatatcaacgaaaccattatttccggcggcaccgcttatgagggcggggcagtccatgttattgacacgatgagagtgaatccatga

SEQ ID NO: 197484 - DNA, 909 bp, Klebsiella oxytoca
atggcagtaattgacctttcccaactgcccgcgccgcagatagtggatgtgccggattttgagacgctgctggctgagcgcaaggccgcttttgtggccctttatccgctggatgagcaggacgcggtacggcgcacgctggcgctggaatctgaacccgtcaccaagctgctgcaggaaagtacctaccgcgaaatcctgttgcgccagcgtattaatgaggccgcgcaggcggccatggtggcgtatgccatcggtggcgatctcgatcaactggcagccaactacaacgtgaaacgcctgacggtaacgcctgccgataacgacgcagtgccgccggttgctgccgtcatggaaagcgatgaagcgctgcgcctgcgtgttcctgctgcgtttgaagggttgtccgttgcggggccgacggcggcttatgagtttcacgccagaagcgcggacgggcgcgtggcagacgccagcgcaaccagcccggcaccggcggaggtggtgcttactgtactgagccgggagggtgacggtacggcagggactgatctgctgtcagtggtggagcaggcgcttaacagcgagaacgtgcgcccggtggcagacagaatgacggtgcgtagtgccgaaataatcccgtacagcgtggatgcgacgatctttctttatccggggccggaggctgagccggtgatggcggcggcaaaagccagcctgcagaagtatatcgccagtcagacgcggctgggccgtgatatccgtcgcagtgccatttatgctgcgctgcacgttgagggtgttcagcgtgtggagctggcctcaccgctggatgatgtggtgctggataagacgcaggcggcatcctgtacggaatggagcgtaaccaacggtggcacggatgaatag

SEQ ID NO: 197485 - DNA, 360 bp, Klebsiella oxytoca
atgacgctgtatatcggcatgagccagggcaacggtaaagctattactgatacggaccatctgcgccagtcagtgcgggatattctgctgacgccgcagggcagccgtattgcccgccgggaatatggttccctgctgtccgccctgattgaccagccgcagaatccagcgttacgcctgcaggtcatgtctgcggtctatgtggcgctgagccgttgggagccacggcttacgctggattccatcaacatcagcagcaattttgacggctccatggtggttgagcttaccgggcagcgtaataacggcgcgccggtttccctttcggtatcaacaggagcagaaaatggcagtaattga

SEQ ID NO: 197486 - DNA, 921 bp, Klebsiella oxytoca
atgaatagctataagcaaattgattttcaaagtgctgatgagctctgggagagcttatccccgacacgtaacctggatataccggtacctcataaattactatttcgaggccaagccgatgcttcttggggacttctccctgcttcattaaggcatgaacatataaataactgcgttgttagacgttacaatgaacatgaacaatccaatggtattgtgaaggatgagatattttctttagtccaatttattcatcattgtgaccgaattggaataagaattccaaacgacagtcaagaatttagagaaaagtatggaaaaatcacaaaccatgggaatacagtctatattaatcaaccttcaaactggccaaatagcgagctattagatcttatggcattagcccaacatcatggtgttcccacaagacttttagactggaccacacttccatatactgcatgttattttgctgcaagttcttctttgtttaattataaatcatggactgatgactcaaaattagccatctgggttttagatgaacaccgcctgagcaatgatgacttaatcaaaacatttaaatctccaggttcaacgagccctcaccttgcagctcaatatggctcattcacagtacatccacataacgggtcatacaggaaaggatattcgatccggaatgtcgaagaaataataagaccacgagaaaaccctatccttctaaaattaaccataccgtcttacgaaactgtacgcttattgggcttatgttgcatttctggatttagcgctgcagatatatatccttcaattgatggtgtcggtaaggctgtaatcgatgacaggaatattcaagcagcacgctatcaccacgaagcacgaggaatagacattagcttctcgcatagaaaaaaataa

SEQ ID NO: 197487 - DNA, 447 bp, Klebsiella oxytoca
atgggtgatctgcatagggtggatgactggctggcggcgttgctggcgaatctggagcctgccgcacgcagccgcatgatgcgtcagctggcgcaggaattgcgccgcagtcagcagcagaatatcaggctgcagcgaaacccggacgggagcggctacgagccacgccgggtaacggcccgcagcaaaaagggccgcattaagcgccagatgtttgcaaaacttcgcaccactaaatacctgaaaaccgctgccagcgcggattccgccagcgtgcagtttgagggtaaagtgcagcgtattgcgcgggtacatcattacggcctgcgcgaccgagtgaaccgcaatgggtatagggttaagtatgcggagcgcaagttattaggatttgaatattccacaattaataatatacaatgctacctattaaattggctcagctactaa

SEQ ID NO: 197488 - DNA, 432 bp, Klebsiella oxytoca
gtgaacaagcctcagtctttacgcagcgccctgaataaggcggtgccgtatgtccgcagtaacccggacaaactgcacctgtttgtggataacggctcactggtggcaaccggggccagctcaatgtcatgggagtaccgctacaccctgaacgtggtgatcgaggatttcagcggggaccagaatctgctgatggctcccgttctgctctggctcacggacaatcagccggatgcaattaataaccctgaactgcgcgaaaagctgttcacctttgacgtggatattctgcgcaatgatgtgtgcgatatcagcctgaacctgcagctgacggagcgcgtgctggtcagcactgacaggggcgtgtcgagcgttgaagcggtgccggaaccggacgtaccggaagaaatgtggacggtgaagcatgggtga

SEQ ID NO: 197489 - DNA, 435 bp, Klebsiella oxytoca
atgagacgtgctttagtggcggtgctggcgctgacgctgacgctcgcggcgctgggctggcagtcgtggcggcttaacaatgccagccacactatcgagacgcagggcgcggcgctgaaaagcaaagcgcaggaactgacgaagaaaaacagccagctgatcggcctgtctattctgaccgaaaccaacagccgggagcagatgcggctttatgcggcggcggagcagacctccgcgctgcttcgcaaccgtcagcaccggatagaggaactgaaacgtgaaaatgaggatttgcgccgctgggctgacactcctttgcctggtgacgttatccggctgcgggagcgtccggccctcgccggaggtgcagcttaccgtgagtggctgtcccagagtgacgcagtgccgcctggaaaggtcagcgccgcgcagtaa

SEQ ID NO: 197490 - DNA, 516 bp, Klebsiella oxytoca
atgaatccttcaatcgttaaacgctgccttgtcggggtggtgctggctatcgccgccacgctgcccggtttccagtcgctcaacacctccgtcgaggggctgaagctgttagccgattttgaggggtgccgcctgcagccttatcagtgcagcgcgggtgtctggactgacgggatcggcaacacgtcaggcgtggtgcccggcaagaccatcacggaacggcaggcggcgcaggggttaatcagcaatgtgttgctgacggaaaaaaggcttgatgcgtgcctgaaggtcaggcccccgcagcatgtttacgatgcgctggtaagcatcggcttcaacgtgggcaccggcgcaatatgccgatccaccatggtgtcctacatcaaccgccagcagtggtggcaggcatgcaacgagctgccgcgctgggtttacgtcaatggtaagaaaaataaagggctggaaaaccgccgcgcgcgggagttggcctggtgccttaaaggtgctggtctatga

SEQ ID NO: 197491 - DNA, 204 bp, Klebsiella oxytoca
atgaaagtgcgtgcgcatcagtatgacacggtggacgcgctttgctggcgtcattacgggcacacgcagggtgtcactgagcaggttctgcaggcaaatccggggctggctgagtacggcccatttttaccgcacgggctgcaggtggagctgccggacattacggcgtcaaccacggcgcagaccgtccagctatgggactga

SEQ ID NO: 197492 - DNA, 651 bp, Klebsiella oxytoca
atgagcctgagtcccgcacgggagcaccgcctgcgcattcaggccgaacaggccgcccgtgagggcggcagtgttcgccatgcgtcgggctatgacctgatgctgctgcaacttgcagaagaccgccgccgcctcaagggcgtccagtccacggtgaaaaaggcggaaatcaaggtggagctactgccgaaatattccgcctgggcggagggggtactggctgccggaggtgcgcagcaggatgacgtgctgatgtacgtgatgctgtggcgtatcgatgccggtgattatgccggtgcgctggaaatcgggcgtcatgcgctgcgccatggctgggtgatgccactgggcaaccgtaacgtgcagaccgtgctggcagaagaaatggcagacgcggcgcaaagcgctctgctagccgctgccggttttgatgccgatctgcttttgcagacgctggacctgacagccgatctggatatgccggaccagtcgcgggcgcgtctgcataaagccatcggcgctgtactgagcgaaagcaacccggcatctgccctgaatcaccttacccatgcgctgcagctcgatccccgctgtggcgttaaaaaagaaaagcagcagctggagcgcagactgcgcaatgacagccgctaa

SEQ ID NO: 197493 - DNA, 834 bp, Klebsiella oxytoca
atgacagtgaaagcaaagcgtttccgtatcggggtggaaggtgccaccactgacgggcgcgaaatccagcgtgaatggctggtacaaatggctgccagctacaacccgacggtctataccgcgttgattaaccttgagcacatcaagtcttatctgccggacagcacttttaaccgctacggcagggtgacggggctggttgctgaagaaatcaaggacgggccgctagcgggcaagatggcgctttatgccgatatcgaacccacggacgccctggtggaactggtgaaaaagggccagaagcttttcacctccatggaggtcagcacgaagtttgccgacaccggcaaagcctaccttgtggggctgggtgcgacggacgatccggcgagtctgggcaccgaaatgctggcattcagtgccagcgccgcgcataacccgctggcgaaccgtaagcagaatcctgaaaacctgttttcggaagcggttgaaacgctgatcgaactggaagaagcccaggacgaaaagccgtccctctttgcccgcatcaccgcgctgttaaccaaaaaagagcagaccgatgaggcgagtttctccgacgtgcataaagccgtggaactggttgccaccgagcagcagaacctgagcgagcgcacggataaatccctgaccgaacaggacaagcgcctttctgagctggagtcctcactgcaggagcagcaggccgcctttgccgagcttgagcagaagctgagccgtgaagacagccgtaaagactaccgccagcgcgcgccgggcggtgacgcaccggcaggcaccctgaccaattgctga

SEQ ID NO: 197494 - DNA, 1944 bp, Klebsiella oxytoca
atgatagcaggtctttttatacgcaacgttaaaacgtatcaaggtataaattatattccattaacggattcaccaaatttaagtggttttctgggaaataatggaataggtaaaagttctatcctagaatctttagatacaatactgaattcaaaagaatggaattataatgcagtagtaaaaaagagtgggctagaaaaatcaagcccatatatcgtgccggtctttatattggaagagacattctttggtccggaaactttacctttagcaaaaacgcttgatgctttagctcgagaagtaaatttggatgattcaactaattctcaaacaagaaatatactggagaatttcattcagcatcgtgatcgaatactaaatagacatgacctgcatggtaaattaatagtgcctattggtcgtttgtataataataatatatcggtgtctgttttggcgggaaggactttacctgccatcatagaaagaaacacatttgatgccgagtttatggtaagtgatgagagtgtagatttaacaggatctttcagtaaattgttagactatattcttaataagttagagtatttatatataccaaaggaacttgatgcggagctttttactaagctagaaagtataggcacgcaggttttaatgggagagtctttgtatgaaattcttgatagaatagtaggtgattcaacgattgctaatatcaacggtgaactgagtgcttttcttgatgaactttcaactaaattgggtgattatatatataaaacgccattggataggcaaaggagaattcaaagaaaagaagtatacaatttaattattcaagctttctttaatatcagaaagttacataaaaggcatggtagcgagaattatatagaaattggtaatttaagttccggggaaaaacaaaaagccatcatagatgtggctcatgcactgttaacgaaacacagaagaaatagcgataacctaattataggaatagatgagcctgagtcatctttacatatgtcagcatgcttcgagcagttccaagcgctttctgagttaagtgaaagatgtagacaattattttttacctctcactggtatggttttctcccaactcttgagaaaggtgccgttacaattatatccaagaaaaataatgagcatgttttcgatttgataaatttggaatcttacagggaggaaatcaagcagcttgttcgagaaagtagagggaaattaccatttgatatcagaattaaaagtatgaatgattttattcagtcacttttatctagtgcgacaggcgataacccatataattggctgatttgtgagggttcatcggaaagaatatatctgtcagcatatcttagtgatttaataaaagaaaggaatcttcgtataattcctgtggggggagcgtcagaaattaaaaaaatttataattacctctcaggttgctacaaggatgtagagagtgaaattactgggaatatatatttgctggctgatactgacagccagttggttaggtacgatgttattacgcatcaaaaattacattgtaaaagatttgtttatgatagtaatagtaataaagctattttagttaagatagactctaatccagtatctccagcaacagagatagaggatgtattaaacgcaaggctctattaccaatcgttatccacttttgttggtagttacggttatttaagttttattaataatatagcaactccagacgaaggtctggaatcatactctgctcttgatttaaggcagagtgaaaaagatgcgataactagattctttgatgaaggcaataataagtttctgttcgctaaaaaatatgttgagttaatgacggaggaaaatagtattccggaatggattagtgaaatcagaagggtaatgacttcgcgatag

SEQ ID NO: 197495 - DNA, 861 bp, Klebsiella oxytoca
atgagcaccatcctaaaatgggcgggaaataaaaccgccatcatgccggaactgattaagcaccttcccgcaggtccgcgactggttgaacctttcgcgggctcctgcgctgtgatgatggcgacagactatcctcattatcttgtcgcagatattaatcctgacctgatcagcctctatagcgtcattaaaaacaagtctgaattactaattactattgcgaaagggttatttgataagaataacaccgcagaagattattacggtatacgtaaggaatttaattgtgatcgccactggcccgcagaatggcgcgcagctatgtttctttatcttaatcgccattgttatcgtggattatgccgttataaccagaaagggcagtttaacgctccatacggtaactataaaagtccttattttcctgaaagtgaaatactcgcttttgcagaaaaggctcaacgcgcaacgtttatttgtgccagttatgatgaaacactggcgctgctgcaggctggtgatgttgtttattgtgatccgccatacgatggcacatttaacggttatcacactgccggttttacagaggacgatcagtatcatctggcgtctattcttgagcgccggtcatcagaaggtcatccggttatcgtgtccaacagtgacacgtccctgacccgttcgctttatcgtaattttacccgccatcgcatcactgcaaagcgcagcatgggtgtggctgccggtgagagtaaatctgcaactgaaatcatcgccataaaatcagcagactggtttggtgtcgatttggcgtccggtccagatatcttggtggaaactgaggtgcgggcgtggcagtga

SEQ ID NO: 197496 - DNA, 633 bp, Klebsiella oxytoca
atgagatcaattaaggttggtaatgacagcggaggccgcgatgcaataaacaggctgattaaggcttataatttcagctcgcggcaacagctatgcgaccatctatccgtatcaaaaagcactatggcaaacagatacttacgcgacagcttccctgctgagtgggtaatacagtgcgcactcgaaacaggcatttcgttgctttggctaactaccgggcaaggggatatgcatgatgataatgggcaagaaaaaaggtttgattttgtgaccccatcaagtatcaaaccgctatctgaggtagtagctcctgagatcgataaagctacgcttgatgcaggcgctttagtagagcacggaaaagttatattggataacagcctaataccgcagaacttgacgaatccgttacttgtccatactgatgatggctcttacctcgtagaccgtaacgcagcaactcccgtaaatggtgtatggctcgttgatattgatggaataaaaactattgcaaaactcacacggatacccggtaaccgtctagtcgttcagcaaggggattcatcttttgaatgctctttggacgatattgaaattgtgggacgtgctctcaaatcaattaagagtatttaa

SEQ ID NO: 197497 - DNA, 1215 bp, Klebsiella oxytoca
atgactaaaccaacaaatatatttgatgaaactaaagatgtttattacatgtatcgtgaagtatttgataacctttcctcaataccggatctgcagcccccattcatagccaatgaaaatataattagagactttgagcgccgcataaatctatatttaaaaactattgacgaaataaaaagcaaagataacctgattattaaagaagtcaaaaaaagcataaagagcactaaatcactagctgataaaataatagaaaccttgcgcctatacttaaatggaaatattagagaggcttataaaacatttgacatggcaataactaacacaaggataaatgatcacatatataatatgaccgttccgctaagcgacttttgccactcatccaaacctctttttagagttcgtaaaagtgatgctatcattaaggaacgagaggatatttttcacattccatttcctaagcgccatctggttggggctcagcgatactctgtatcaggtttgccttgtctttacttaggaacttcaatatttgtatgctggcaagagatggaaaaacctgattttgataaactttatgtttcatcattcataagcgaagttgcaacaagtcatcggatacttaatattggatacaatcttaaatccgcattaaataagcccgtaatagaactgtggacagaaacagatcaggaaggaagcattaacagagtcatatcaaatcttcttgcatggccactggttttggcatgtaactacacaaaaaaacataacaatgccagctttaatgtagaatatataatcccaaacttacttatgcaatggattagtggtgatgataataaaagcatttcaggcattgcttacagaacaacaaagattttaaatcagaaggatagtgatattggtataaatattataatgccgcctaaaattgataacatagctgaaaataacttaaatttttgccctcatcttagaagcatatttaaatttactaaacctgtatcatggcaggtatttagtacgttaaaccttgaaccaaatggaatggaaggttactcccctattgttaataaagcatcgactggctctggaaatatcgatgattttgatgaatcattagttcattattacaaaaatacatcttttaaaaaaattcaactacttttacaaagcctgatgaaacacgattacctgaacgaataa

SEQ ID NO: 197498 - DNA, 213 bp, Klebsiella oxytoca
atgcactttcaaacggtcatatcatcaagaattaaatccattagttattattcatcagaaaaagtgctggaggtggcttttgtaggttcagtaacctatcagtacattaaagtgtccggaaaaactcataatgactttttaatggctaaatccaaagggcgtttttttgaaggtgtaattaaaggtaaatacctttgccggaaaataggatga

SEQ ID NO: 197499 - DNA, 249 bp, Klebsiella oxytoca
atgcccccttattggattgcgattcttaacctacattgcggtaagaatcattcacaccgttacgatacccttcagcaaaagcagcctgtgggcttttatgacgcacagtccctgcctgactatcaggaagagccgccaaatcaacccaaggttgacctgtacgagctagaccagcgcgatacccctgatcgtaagcgcatccacaacatttgtggcggccctcgccaccttgatcgtgaggtaagctga

SEQ ID NO: 197500 - DNA, 327 bp, Klebsiella oxytoca
atgacaaaagaacattttaaagccagtactcaatataacgactacaaaggcactgttgcagcggacagggctgatcaagacagcttcagtgacttcctgagagctaaagggattctgaaagaaggtgagatagttaaaggtatttccttctactcagcagagcgattctttgatgtcgaggcgtatgtaactgatgaccaacacggcttacgtagagaaagagtagcgataactcttgaagaattttttaaaacgttcaaacgtttctcaatcaaactatctcgggatggggaacttgatgatcaagaaatcgagttcaaagaataa

SEQ ID NO: 197501 - DNA, 207 bp, Klebsiella oxytoca
gtgggggataattcacccggaaagggtaagagattaggttttaaaataattgcggtgatctttttttttgaagcattattattgcgtttttgggtgtttatttgctgcatttcaatgtatatgattgttttttatattaaaaatattaaagtgatggtgtgttcttgcgttggcgaagaacataattacaatttatttattgcataa

SEQ ID NO: 197502 - DNA, 867 bp, Klebsiella oxytoca
gtgcaacattctcttggccttatcgaagtctcgggtatgtctctggcgataactgttgctgatgtgatggtgaaaaccgcccagatcagattgatcggcgtggaaagaaccatcgggtctggctggatgctggtgaaaattgcaggcgatgttgctgcagtgcgtacggctctatcggccggagaagaaacagccagagcacatcagggatttgttgcctgcaccacaattgcccggccagcgaaagaaatcagtgtactggcttcaacaactaaaccgccccgagatgagcttgttcagaagacaaccgctctcccggccattaccctcacggcatccgccgcccataccacaaccggacctgaatccgttcaggaggatccggacgcagaaaaggcagtgcccccggtcaagcaggctgccgagggcagcaccgacaatatcattcaggtcgatgctatcaatgaacctgtggaaatggccggggaaatcagtaaaccgaacgcttcagcaaagtctcctcctgatgaatatggtgaaaaacaatctgtggagacggtcaaagcatttccggccacgggagatatcgctactgaccacgatattccgacagcgtcagcgggaaccgttgccgttgtgcagcatgtcaaacccggaatatctctgcatcagtttcatactcaggtgaaacctgatgatgaaactgcagatgcgggtagccaacagacaagagagagaaaacaggctgtcgccataacagcagaattactggtgacatgcaaaatctgtggagatccttcatgtccgcggcataaaggccagccacgcagtagatgtattcacaatcagaaatcgatattgaggtaa

SEQ ID NO: 197503 - DNA, 861 bp, Klebsiella oxytoca
atgagaaacgcccacgatatacttgacaatattgtatacgattttgccaatgccactggtctgggttctgttgctgtagatctgaatggcaaagagatatccccatggtataattttacttctttctgccagcaagtcagaaaaatcgcagcttaccatccctattgccagcaatgtgatcgttgcggtggttttgaaagtacgaaagcacagcatattcaatgttatcgctgtcatgctggacttgtagacttctccattccaatattcattaacggtaatctgacagggtttgtttcttgcgggcaagcccgtgtcacagaaaagctaccattacccaagatagtggagaacgataaaaacttatcaaaagaatcaaagcttatcgaattgtatcatgaggtacctgaactgagcctgatgaaagttaaatctgctgcccaccttttgcacattattatagagaactacatcagtaatgaatataatttacgcgtagtaaggaatgtcagtcctgttcaaaatcagaaactgaaaacatcgagtcgacatcaggcaacaatgggaatgatactcaatcacataaaccagaatttttcagacaatatcagccttgagcaaatggccagcaaagccaacctgagcatgttttacttttccagaacgtttaaggagttgacaggcacaggcttcgcaacttacttaataaataaaagaatgacggaagctcattgtctccttgaacaaacaaactggaacatagaaaaaatagctcgaagtgtcggttataatgatgttcattacttctcccgcctgtttaagaaaacgttcaacaagtcaccgtcagagttccgcaattga

SEQ ID NO: 197504 - DNA, 159 bp, Klebsiella oxytoca
atgtcatgtcatgaactggatattgccccgtcgacgtattactggcatcagcaacgccgtcgttgccctggacggctcggcaacaaggataaacacgacgtccatctgaaacaggaaatccagcgcgtctttgatgaaaactacgccgcgtatggttaa

SEQ ID NO: 197505 - DNA, 795 bp, Klebsiella oxytoca
atgagtcggcggccccagcgctattctgctctcgccatcaccaccgttctggtgattaaacgcgtattccggctgaccctgcgggctgcgcagggttttattgattccatttttgccctgatgaacgttccgttgcgctgcccggattacaccagtgtcagtaagcgggcaaagtcggttaatgtcagtttcaaaacgtccacccggggtgaaatcgcacacctggtgattgattccaccgggctgaaggtctttggtgaaggcgaatggaaagtcagaaagcacggcaaagagcgccgtcgtatctggcgaaagttgcatcttgctgttgacagcaacacacatgaagttgtctgtgcagacctgtcgctgaataacgtcacggactcagaagccttcccgggccttatccggcagactcacagaaaaatcagggcagccgcggcagacggggcttacgacacccggctctgtcacgatgaactgcggcgtaagaaaatcagcgcgcttatccctccccgaaaaggtgcaggttactggcccggtgaatatgcagaccgtaaccgtgccgttgctaatcagcggctgagcggaagcaatgcacggtggaaatggacaacggaatataaccgtcgctcgatagcggaaacggcaatgtacagaatgaagcagttgttgggagattcactgacgctgcgtgactacgatggtcaggtggcggaagctatggccatggtgcgtgcgttgaacaggatgacaaaggctgggatgccagaaagcgtgcgtattgcctga

SEQ ID NO: 197506 - DNA, 642 bp, Klebsiella oxytoca
atgttcatcagagcttatttaagggcatcgacggaagatcagttcgctgaccgggcaaaagagatgctggagcagttcgttcagcagcggggacataaaatcgccagctactaccgggagaatatcagcggcacaaaacttgatcgccctgagctggggcgcttactgatggacagtcaccacaatgatatcttgctggtcgaacagatagaccgtctgacccgtctgagcaacagcgactggatgacgctgaaaaagcagatagaaaaacatgagctgcggattgtcagtcttgatgtgcccacctcatggcaggcgctgtcagataaagatccttcgcaggcggacccgattactcgcgcagtaataaccgccatcaataacatgctaatcgacctgatggccgcgatgtcgcataaggactggctgagccgccgccagcggcaaaaacaggggattgaacgggctcatacactaggtaaataccaaggtaagcaagctgatcgggagcgtcaccagaaagtactgtattatcggcaggttaagaaattgagtattcgtgaaaccgcagatgcaacaggttacagtgcttcgcaggtatgtcggatacaagcgctgtataaaaataatgaattttcctga

SEQ ID NO: 197507 - DNA, 477 bp, Klebsiella oxytoca; identical to SEQ ID NO: 83457

SEQ ID NO: 197508 - DNA, 846 bp, Klebsiella oxytoca; identical to SEQ ID NO: 168867

SEQ ID NO: 197509 - DNA, 204 bp, Klebsiella oxytoca; identical to SEQ ID NO: 100787

SEQ ID NO: 197510 - DNA, 492 bp, Klebsiella oxytoca; identical to SEQ ID NO: 168865

SEQ ID NO: 197511 - DNA, 378 bp, Klebsiella oxytoca; identical to SEQ ID NO: 168864

SEQ ID NO: 197512 - DNA, 360 bp, Klebsiella oxytoca; identical to SEQ ID NO: 168863

SEQ ID NO: 197513 - DNA, 645 bp, Klebsiella oxytoca; identical to SEQ ID NO: 168862

SEQ ID NO: 197514 - DNA, 480 bp, Klebsiella oxytoca
atgaccgacattatcaaccttaacgataacaacctgttacaccagaaatctgccgatgaagtctccgcactggccgccacgctcgtaccggacgaacagcgtgttggcttctggccactgcacttcggcaacataccacagtggataatccttgaaccgacagccttcgcctggatggaccgcttctgcgccagctacagtggcggcatctggcagttttacacgctgagcaacggcggtgcttttatggccccggaagcgaatgaggatatcgatgaaaaatggacgctgttcaatccgatgaacggcaacggtggtgaactcagcgccgaagccgccggaatagccgtctgtctgatgacttacagccaccacgccatgcgcaccgaatgcgacaccatgacggagcactattaccgtctgcgggactacgcgctcaaccacgcagaatgcagcgccatcatgcatatcatcgactga

SEQ ID NO: 197515 - DNA, 225 bp, Klebsiella oxytoca; identical to SEQ ID NO: 168860

SEQ ID NO: 197516 - DNA, 819 bp, Klebsiella oxytoca
atgcgattagccagccgctttggccgaaccaaccagatacgccgtgatcgtccactaacccacgacgaattacaccagcatgttcccagcgtttttggcgaagacaagcacgaatcccgctcggagcgctactgctatatcccgactatcactctgctggagaatcttcatcgcgaaggatttgagcctttctttgcctgtcagactaaagtgcgtgatcagagcaagcgtgagcatacgaagcacatgctccgtctgcgccgtgccgggcagataaacggtcagcaggtgccggaaatcatcattcttaattcgcacgatggcgcatccagctttcagttattaccagggatcttcagaagtgtttgtacaaactcgctcgtctgcggtcagtcgtttggcgagatccgcgtaccgcatcgcggtgatgtcgttgaaaaagtgattgaaggcgcttacgaagtcctcggcgtgtttgaccgggtggaggagaaacgcgaggccatgcagtcactgctggtgccgccacccgctcagcaggcgtttgcgaaagcagcgctggcctaccgttttggcgaagagcatcagcccatcaccgaatcccaggtactgacgccacgtcgctggcaggacgaaaaaagtgatttgtggacgactttcaatacgcttcaggaaaatttgagtaagggaggcttaaatggccgctccgcacagggtaaacgcagccgtacacgcgcggttaacggtatcgacggcgatatcaagctgaaccgcgcgctgtgggtgatggccgaagaattacaacaggcactgagctga

SEQ ID NO: 197517 - DNA, 252 bp, Klebsiella oxytoca; identical to SEQ ID NO: 100793

SEQ ID NO: 197518 - DNA, 945 bp, Klebsiella oxytoca
atgcagcctaaaattgatgtcagtgtcattatcccggtcttcaatgcgcaggccagcatcggccatctggtgcatgtactcctcagtgaacaaacactcagcattgaggtgattgtcgttgatgacggctctaccgacgaaacgtcgaccatacttaacgccatcaccgatgagcggctgattcttgttcatcaggaaaatcagggggtatatgctgcacgtaacaccgcgctggcggttcacggcggtgagtgggtggtctttctggatgcggatgaccggattgaagaggggtttctccgggagcgtctgaagagcgcacgggagaaccaggccgatgttgcccttttcaatggctggcacacagacagcagttgcctgcagcggcgacctgttcatcgcaaacagccctgcggtcacgcgctcaacgggcatgcctggatacaacattgcgtggcgcagaaagagtggccgcactacctgtggctgcagatggtacgctcgtcttacatcaggaagaataatctgcgctttcaggaaggaaaaagccacaaggacattctctggacgattaacctggccgctgcaaacggtctgttttatttcgctgacaggaaagactattgctacatcacgaatccggcatccattactcaccgacaggactattacgatatccgggcgcacagctacattgacgttattagcggcattctcgcgctctcatctctaccacagcaccacgaaatcagaacccctctgagaaggcatgcgctggttgagtgccgccattttctcggactgtaccggcgtaagattgccaaccggcaggcagccaggatgcggttcaggcagcgaatcgcgttgcatcagttgattgccggggtcaacagcctgagcgatgtcttttttctgctgaaattcatgagaaagatttatctgtag

SEQ ID NO: 197519 - DNA, 927 bp, Klebsiella oxytoca
atgggagatatcgttaattattatcatctgtatatacgcaagtctcgacaccaacgaagttatacctctccacagaagggatgtgatggaaaaacaacgcttgttccactgttttgtctggatatcagccatttatatccgaacgcaaagggcggagcaaatacggctgaaaatctgattatagcgccttcatttattaatcgcaggaataatgatgctatcccgtatcagggacaggggttcggggggattcagtcaacgggggagttgatcccttttaacggcagtctgtatgacagtttaactgcgcgatttggttcagaggaggtgaatgcggcattaagagaaattacacctgctaaacgtttttatggcaatgttcccagagagattgagtttgggggtattgagcaacagcttcccttgttcactttacttcatggggagttgtggcgtcttgggcataacaaaatctcagaatgcctgggggagatccggcagctgttccccgaatatcccttgtatctggagttactggcaatcgttggttttcatgcggtgttatctggcgatcccgatcgcgtcatggcgcttttatgccgtgtttttaataaatgcttcgacgccacctcgttgttacgtgagccacacaagcagtgtatcgacctgatgtatcgcttactgagtaagtatcttcgtcgctacttcagcgttgaggtagacgacagggaagccgtggtggcgttctacaatggtttttactcacaggagataattgcgcctggtgatgccgacgatgaagttgtgtgttatcgctattgtacaggcatcaagagttctgccaccacctttttctatgtaccatcacagaagaaggcacctgtcgatttatggcttcttttgggggaagatcttacttttgaataa

SEQ ID NO: 197520 - DNA, 1569 bp, Klebsiella oxytoca
atgtctttaaataaaaaaacagaaaaagaacacaggacaaccttccctttgcactgtttacctgagcaactaaaagatacagttgagcgtgtgaatatgtttacaggaatgtcaatggaacttacgataaacattatttttaccatgctttcaattatctgccagtaccttgttggtgttgtatcaccttactcgggtatacctggcccatgctctttatacctacttacgcttgccgagtctggtgaaggtaagacgtttctgtcacgactgttaatgaggcccttttacagccagattgagaaaatgcagcttgaatacagagatcggcttaccatctataaaagacaacatcgtatctggaaaactagcttacagggattcgatgccaatcaacgtcaggctataaaaaatggaaagggtgtcgaggatgctcaggttcagctggatgaacattataaaggtgaaccaaaacgtcctgttgagccaaaattcagctatcaggatgtgacatttaaagctcttatccagggcttaagcctacatgctgaagctggcatcattatggatgaagcgatctcttttttcagaagcgggttgaaaaatcatctcggactgttgaataaaggctgggatggagggaaatattcatttgacagaacagatggtgagaactacgaactcccattatgtctgatgctttcactaatgattcagcctggcgtatttagtaattatttagaaaaacatggagagatggctaaaagcagtggtttacttgcccgattccttgttatgaaggtaaaaagctcaatagggcaacgtaatagccgtattgatgaagaagggctgaatgcagtattagctccgttttatgaccacattcaggggctgttaagccttcttgaagcccggttttatgatgacagtataccgaaagatcaactgagactgtcagatgatgcaaaaatgtttcttcaggaaaaacagagagaaattgagcaggctattttaccaggcgggaagtattcacatatccgggattttgcgtcaaaagctatagagcaggcactgcgactggctacaataatgactttttatttaactaaacctacaggaggcagttcggccgctgaccttatttatactaagattatcgatgctcgtcagataagaaatgccatgacaatagtggattggtatttgcagcaggcgagcgacttattttatccactgtcagagcgataccagtttgaatgcgaagttcgaagcctctggagctttattgttaaaagactgaacaaaagtcaaggtataccatttcctaaatgtgaattgcttcagtctggtccgggtcgtctcaggcacatagataaattaacgcctgcgttaaatcaacttatcaatcagagattgtgttgcattatacgatacaacggttccagcatgttacatattgcaggttattattcaaacggctctatatgtacaggcggttttccccacaactacagcatcgtacaaatgcaaaacctgaaggatgaaggtttctggcatgttgatttgtaa

SEQ ID NO: 197521 - DNA, 2145 bp, Klebsiella oxytoca
atgtccaggctgactgatttaatagctaaagcgaaggccaaagacccgcaactgggcgctgatcttgatcgagaaatcaagatcctgtcgtcacgtcttcccttcgggctgaatttcgagcgacatagccctgaagtcgtagagttaccattgcgaccagtgcgcaagggagataaagtgcgcattttgccagaacgtggctccaccaagaaaggtgaccagcgattgtggcaagtgaaagcaatccataaagcgaagaagacagccgatctagaattgctgggcgcagctgatgtcgagactcagacagtaacgctaagtgacctagtggttatagctgaatttcgtgacacgatctggccgggtctggtcagtacaggaaaagtacagcgtggtggtgacaaaccttaccattcagtaatcaatggcgagaactaccatgtgttgaaagcgttgacctacacgcacaggggcaaggtagacgtcatctatattgacccaccatataacacgggagcaaaagactggaaatacaataacgattatgtcgaaggtgacgatatttatcgacatagtaagtggctggcttttatggaacgtcgtttgcttattgcgcaagaattattgaacccagataattcagtgctaatcgtgactattgatgagaaagaatatttacggctagggctgttgcttgaacaaacgtttcaaaatgcaaaaattcaaatggtcagtagcgttatatcccctcaaggtagcactcggggaactcagttcaaacgctcagatgaatacatttattttgtctattttggtaattcaagtgtgacgcccctgcggcttcctgaagaatggtcaaatgggcaagaaacaagtactgtgcgagggtctattcattgggctagtttaaaaagaacgggcactgaagctacccgccaagctagacctcaaatgttttacccgatatttttgacatcagattgctcgaaattccactccgttggtgatccaatagctataaatgttgaaagatcatctatcagcattcctgatggttgtgtagccatatggcctctgcgaagagattcttcagaaggtcgctggcaagtaggaccagaggcattacgtaatctaattcttgaaggccatgcacgattaggcaagccaaatggtacagaaactgctattgcatatcttaaggctggtgaaagagcaaaagttgcgagtggagaatataaagtaataggtcataattatgatggttctatcataactgaaaatgaaaatggggaaactactcaagcagaataccggccaacaactatttggaatgtctctagtcatagcgcagggcatcatggttcaaatctacttcggtctttgctcccgggccgtacctttccattcccaaaatcactctacgccgttgaagatgcgctcagattttttgtaataaataatcctaatgcagtagtgcttgactttttcagtggttctggaaccactgcccacgcagtcatgcgtctgaacaagcaagacggaggttgccgtcagtgcatatctgtcactaacaacgaagtagcggccgatgaacaaaaactgttgcgtgaacagggccttcgaccaggtgatcccgaatgggaaaaatggggtatatgtgactatataaccaagccacgtgtgcttgctgccatcacaggcaagactcccgatggtaaaccgattaaaggtgattataaatttaccgatttattcccaatctctgaaggtattgaggaaaatgctgagttttttaccctaacctacgaagctgagaaatcagttagtcacaacttggcttatacccgaattgcgccgttactctggctacgcgcaggggcacgcggcaaacgtattgacacactgcctcttgaaggatgggcggtggcagatacctatggcctgctgtcagtcgtagatcaggctacgcctttcattgaagccattagccaaaccagtgacatacgagtagcctttatcgtcactgacgatgaccgccacttccaagctgtcaccagacgtctgccaaaaggtgttgagccggtacgtttgtatgaatcgtacctgaccaatttcagcttcaccagtggggaattaacagaatga

SEQ ID NO: 197522 - DNA, 228 bp, Klebsiella oxytoca
atggctgccggcgacgcggtggagctgcagctgggtgatggccgttacttcctgcgggaagcggcctacgtgatccgtctggacggtaccacctgcctgcagctgacggatgcccgcggcatacgccggataaaagagggcgatcccctgcaggtggccacatggtatcagacctgttttgatgcaggcctgccggtcatcgtccaggtgaatgagagccgggactga

SEQ ID NO: 197523 - DNA, 1626 bp, Klebsiella oxytoca
atgaacctgcctgattatcaacacgtttttgatgtttaccatcactgccaggagacgctcgaagtgggtttacctgcgggtgaagcggccttgctgggcaaacgcctgatgacgaaaagcgagcaattgcagccagtgattatggtttacggcgtctataacgccggaaaaagcaccttgctgaacgcattaatgggccgggctgatgctgagatggcagacaggcccatgaccgatcaggtgacgggctatcagtggcgcggctatacgctgtatgacacgccgggcatcgatgctccgcaagaacatcagcaagtgacggaagcgcatttgcgcgaatccgatgtcgtgttgttcgtcgtcgccacgggaggcgcggtcgaggagcaatcgacctggcaggcgctgatctcgttggtcgaaaaagagcgacgggtcatgctgatcgtcaacaataaaaccggcctcaaacctgaatcacatgaatatattcatcttgtcgatcagctcagacagcggcttcagtatgccgccgacgaggaacagatcgacgatatactcagcaaagtcagtattcatctggtgaatgcccgttcggcactcaagggaaggcttgagcagaagtcaggactaatcaactcaagcgggatcaccttgctggaagagcaactgtcgcaatttttgcaggaaaccgatcagtacagcgtgctcgatacctgttacagcgacctgcgtcaggccattgataccgccctgctctcgctcgcgaaaatcgccgccagtccggaaagcgaggccttgcaggacgccagactgcgcgtagagagtgagtgcgagcgcctgagcctgcaactccatgatcatttagagaaaaacattcagaagcatcagcatgtcctagcaggcaccattgatgacctgctggaaaactgccgctctaagcacgtctttgaagcggatctcagccgtgaactggaagtggtttcagataagattttccagcaacagcaggcattactggaaagtgaactgcccaaaacgcagcgcaagctggaggacattggtgaaaccttgcaggtcgccgagatgcggcaggctcaggccgaaagtcccgacgtaaaagctttccagagtgaagacgaggaatctgcctggaaacagggcttgaagcaggtgatgggccacagcgacaaactggatgtgaatgcccttgccgaagcaggcgccaaaaaagggttagtgattgccaaagatctgttgccaaatctgtttaaagggattgggaaaagaaccatcgagcgctgggccgctacggcaggacgcttagcaggccctgccattgctctgggcgtgggagcctggaacatttatcaggccgtgaatgaaaatgaaaaattaagacaggcaagacgtcgccgtcgagaagccgcagaagacaccgccgccacgctgatggatgggctgaaacaggcgtggcagggggtgattcgcgaggtggtgaatgagattttcgaaccagtagacgctttcctgaaacagcgaaaaaacgagcatcagcagcagagcgatctcaccgcaaaacgcattgaggaattagaaacagccaaacgggctctgtcgcattaa

SEQ ID NO: 197524 - DNA, 1839 bp, Klebsiella oxytoca
atgattacctcacccgccaatcgtaatgaactgctcgccgtgttttcgcaggtggcagaaggctttagcgccacaggcaacaggatcaaacagtacgaagcgctaatcagcccgctgctggcggcgctcaccgacacgcaacagcgtgatccctgggccaacagcgcactccgacgtgaccatccctttttgcagtttgttgaagaccacactgcgcagctgcgtgagatgctgcgtcttcaggtcggggagatgctcagctatcaacgaaaaaacatttttcgtcagaagtttgatgatgcgttgatggtctacgtttacggtaaagtcaaagccggtaaatcctcctttggcaattttattgcctggggccatccctgcccggatgcagcgctgaaaagccaagtcgaaccgaaacccgccttcttttgtgaagttgatagcggtacaacagaaaagatgtcggcagaaaaaatggcacgccagcaacacttttccgtcggcgtatcggaaactaccagcgctattcagggtttcaccctgcctggactgacctggattgattcgcccggaattcactcggtgaccgctgagaatggtaggctggcgcaggagtacagcgatgccgccgaccttatcatctatctgaccagttccagcagccccggcaggaaaagcgatctggaggtgatgcgcgaagttgttgagaagaacaagccgatgatggtgctaatcccggccagcgacattatcgatgaagatgaagatgatgaaggtaatcccgtttctcaactgatcatgaagtcagatgccgatcgcgtcgatcaggaaaactatgtcagcgagtcgctttctgctctggtggacagccataaagttggcgtcacggtgcaatccatctcggtcgagtatgcgcgacaaggcgcagaaactgagcgcaacgcgcgctggcaggagagcggtttagagacgtttgccgaaaccgttgctcggatcgcgcagtccgatggcatcaggatgaaacaacgtaccccgctgattaaccacaaaaatgtttgcgattacctgacccgcagtggcgatgagatcatcgcgctgttgaatgaagtgtccgccggactggatgacgccgcgcaaaaactgcatcaggagtgtgaacgcctctgtcttgagctggaggagcggcttaagccaaaaatcgaacgtctgattgaacgttacgcgatggataaccgccagtacctgtcgcactgcgccagagtgtgggaagatgagatcgcgaccagcaaaacggcgctgcttgaacaggttcagcagggcttcgaccagttgacgcttaacctcaatcaactggatgtgattgacgaggcgataccgggttttgaaaagcgtacagagcgcatcgcttttaactcacgtctgggggaaaacgtcggtaaagccggcggggcggccgtcggcacggcgatcggtgccttcgcgggaagcatcattccgggtattggaacggctatcggtgccggcatcggcggtttacttggtggcatggtgggcggctacggtggcggcaaaattggagagaatttcaattcaaccgaatatgaagatatcgaagtcggcgataaccgcgtggaggtggcgttaaaaacccgcaaagtgttaagccagcgggctgaacgcgagctgggcgcggtaacggtcatgctggagaacgccttctatggcgatatcaaagcctgggtgacagagatccatactgctctgacgtcattacaactggaattacgtagccagcatctggccctgacaaaggagttgcttaacaatgaacctgcctga

SEQ ID NO: 197525 - DNA, 459 bp, Klebsiella oxytoca
atgtggtggttacttattcctgttgtaggcgcagtgattacagccgttgccgcctcagacagcagcagttcatcttcttcatctgacaccggcaacagccgtgaaacggcggctcgcgaagcgctggaaaaagagcagaggcgtaaccgggagttgaaccaggcggcattggttcaggatgcccgcaaaggcctgaagaggctgctggccgatcatcccgcttttctgaaacgcacccagcccgatgactggcacacgctgacggcgttcaatctcgaaaatgcgttgagcaccccggcgacggtgaataacagtttctcgaaactgcgggcgctgttaccggatctggaatatgtcggcaacgacagtgaggtgcagatgcatattcatcagttgcagggagagatggcggagctgctcgcactcagtcagcgtctttctgaggagatggatcaatga

SEQ ID NO: 197526 - DNA, 864 bp, Klebsiella oxytoca
atggggaatattgacggactgacgctgatgcagagagaagatccttcattcgctgagcactacctgcgttgggaaagtatcagacagacctcagcatcccatcaggttgccatttgcggcctgatgaatgcagggaaaagcgcattactgaatatgctgaccggacacctggaacaggagtatttcgccaccggcgcgagtcgcaccacggcagacgtacagtcaatgaccacggaaaacattgactggctcgacacgccaggcattgatgccagtgacagcgatgatcacaccgccttgcgtggcatattgcgtgcggattcggttctttttgcccataccctgcgcaccggcacgcttgagcaggtggaactcgattttcttgatacgctgatgcgccatatccccgctctgccgcagcgattgattgtggtgctcacccacgctgacagtgtggaaacccatcagcaagagagcattgattccattacgcggattctctccacgcgttttgccgaacagttgccgctgtttgtcacctcaagcccgcgttttattaaaggtacgctgacgaataagcctaggctggttcagcgcagcggtattccgcagttgctggcagccatcaccacccgtgtcagtagggccaatgcatcgctcgtctcagggcgggcgctggaaaaagttcatctcgacatcatgctcaagggtgctatcactgaggctcttgctcagcgcgaagagaagttgagcgcactaatgctgcaacataaagaagaggagaaggcgtttcgcaaggcagcaaaacagctgctaaacgccctgcgtcagcgtatccctgatgagaataaatctgacatttaa

SEQ ID NO: 197527 - DNA, 264 bp, Klebsiella oxytoca
ttgtctacgggcgtggggtcagtccaacatggcgacttcttgcccacgattgatttctgcccggtgattttcaaaggcacctatgacgaacaaaactggcaggtactgagtcagcgctgggacaacctgcgtgcacagttgcacggcaatcccttctccgccagtgcgctgcaggatcatgctctgcataaagaacttattcagtcggtgctggacagtgcgccgaacttctctccgttaaagagagcgcatgacaaagattag

SEQ ID NO: 197528 - DNA, 549 bp, Klebsiella oxytoca
atgtccgagattactaatgagcagttccgcgtaataaaggctgattccgatgtagaaatcaccgggattaagcagttcgattgtggcgaaaaagtgctgaatggttatttacagcagttaaagcgccagtgtggccgtgacaacatccacgggttattgcttcttaaaggcgataaagttgtagggtttgtgacggcctctttgtatcagttgggccgcgatgaagttcctgatggaacattcccatattcggtaccacctgtgtttgcggtgatgaaaatcccaatgattgccatcgataagcaataccaaaggcagggctggggtgaagagttgttgcgcgctattctcgattactgcgtcgagagcgctgcatttgtgaagggcattaaaggggtttaccttgatgctaaagttggtgcaagggctttttacgaaagcttcgattttgaagctacgcgtgaagaggtctctgccaacgatacaatcccaatgttcatttcaatggacacgttacgggaagctaaagaactggaaaaaagcgcctga

SEQ ID NO: 197529 - DNA, 2682 bp, Klebsiella oxytoca
gtgaaaggttcagaatggaataaatgggatttacatattcacagtccgatgacgtggcaggccaatggttactccgaccagtgtgatatagagcgctatgtacatctactcggagaaaagcaactttctcttgtcgccgtgaccaactatttttatttccggcagaatgagctggaaacgatcagggaagagattgcccgtcagggtctcaatataaccgtgctgggaaatgtggaattccgccttgatcaacagaacaaggccggggattttattaatgtccatatccttttttcagataaggtgagcaccgaacgtattaacgaagccctagcccgttttccgctccggttaacagacggcgacagaaaggccatttactgctgtgaaaagagcgtcatggaaagcggccatggtgtggataccattgtggtggcgttcagtgcactgcttgagcatctcagttccgcattccgcccgttcagggattacctagtggccgtctgtccgaacgggtatggcggttatcgacccgacgcaaatgggcgctctgcggcaatcgcaaccgagatcgaccgtcagggacatattattttcggcggaaagggcgatcgtgaattttttatgaaaacgaatcgttatgacgatgctggcgtcaaacccgtcttcctctgctccgatgcacaccgggtggaggatatcggcagccgttacacttgggtaaaggcgcttccgaccttcgaggggcttcgccaagcgttactggagcctgaaggccgactgaggctcggggatgagtggctgactgagctcacgccaaaagcgcatttcagtcagatcgatattgaagggacgatttttgatggccaggaaatcagcttcaggaagctgtccatcccccttagtcaggatatggtggcgattattggcggccggggcacaggtaaaagcctgctgcttgatgcgctccgttcccgctttgccggtaccgcggcacggggaagcgagcaacgtgaagtgaatgttcagtatctaagtattgaattggataaagccaatggtgagaagatacgatttgatgcccgttcagaagggtatgagtatctgcatgtgtctcagggggaaatcaaaaaactctgccaggagccggggctcatcagtgatgagatcaagaaaatgctgaggctgacaccggttcatgaggcgggtgatacggccacacaactggcagaaaacctcagcgcctggcgtgcctggcgtgaattcagtttgtacaggaatgagcattcagagccggtgaatacgcgtgagtttcagcagcagatcatcagaggcgctcaggaaaaaattgaggttctcacaagtgaccgcaataaggcattgattgagacgtttcgtgaaaacagccggcgtcagacattgctggttcagatgcgggataaattaacgggtgtgcgtgcggacattgcgacggccgaacataacctgaatgccagcatagcggctattaatgctgactctaccgctcaagaagcgatcccgctcgtagatctgtcagcacagacagaggctgttgcgcgcaggcttctatccgtgcaggagcagacggcacagttcgggcgtgataacgacgagattattggcgctttccgtgagcagggactgggacaggacatcacagggttgctggaaaaagtacatgaatatcagcgtcaaacggagcttgcggaaacgcatttgcgtgaaatagcgcgtcgagagacacagtaccagaccggactggaacaacgcgccaaggttgcggctgaattcatggatggattgctgtccagacagggtgtgatcgatacggctttcgcgtcgctaaccaaaaaaccacatctgacgcaggaccagcaggccctgataaaagacattcttacggatatccgcatttatggacagccacactttgatataaaggccttttatgatggaatgctcagttgtctgaaccgaggacgattcagggctagcggggagctgacctctgttgacaggcttcgggaggtgttcagggtcagcggtattgatgagtttcgggcactgcaggcaaatgaacccatgctggttctgccggaattttcggacaaaaaactgaccgtcgaagagttcttctggcgtgatgaatattttaacagtcagggaccggattcactactcagttatctgttcagtccggagcagatccagcgctatctgaacgtcagggcggaatttgaatacaaaggcaaaacggtcgaaaaactgtcagccggtcaacgggggaccttctatgtctgccttaaactggcgacggacgccttcggatcgccatttgtattcgatcagccagaagatgacctagacaatgacttcatcatgcacagtctggtacctctcttcagaaaaataaaacagtacaggcaggtcattatcgtgacgcataacgccaacctggtggtgaactgtgatgctgagcaggtcatcatcgccactaataatgatgaagtcatcagttaccgtagcggggcgcttgaatacggagatcatgatgcgccaaacagcatgcgcaaggcaatatgcgatgtgcttgagggaggccgtcaggcgttcgaagcccgtgagcaaaaatacggcatgttgtggcttaaagccatctaa

SEQ ID NO: 197530 - DNA, 1029 bp, Klebsiella oxytoca
gtgaaacgtgtgactttgcgcgatgtcgcgaaagaggcaggagtctcgcttgcaacggttgaccgggtattaaatgggcggagtaaagttcgccccgatgctgccgagcgcgtcaaaaatgcgttggatctcttgcaatttcgcgggaatgtcacgcctgcgagcctgacagatgaacaggaatatcgctttcagttcatcatcccgcgcggcccaaaaaatacctttatggtcagcttgcgtgaagaggctgaagcgttaggaaaacgtttggctgaacaacgcattttcctgtcattcgccgactataaagaattggatgatgaggagttgacccacctgctcagtcaaattaatccaaagatttgcatgggcgttgcggtggtcgccattgatacctttgcggtgcgtgaggctatcgacgcgctgattcagaaaggggtcggcgtcgttacccttgtatccgatgttaccccctcccgtcggttgcactgtatcggccaaaataatgtcgccgccggccgggtggcggcttcgttgattggcaagtttacggcgggcctctccggttccgtcggcatcatcgcgggcgcgatgaccttgtgtgatcaggccgaccggcgagtgggtttcgaacaggtcatcacgcgggaatatccgcatttacgggtattgccggtccgggagggacgcgacgatagcagcataaccgtgacggtggcgcgcgaattgttggccaacaatcccgatctggtggggttatacaatatcggggcgggtaaccgcggacttatcaatgccatagaagaaagcggccgcaaatccgaggtcgtggtggtggcccacgaactgacggagcatgcgcgtcgcgcgctcattgcgggtacctttgacgcaattattaatcagaacctgttgcatgaaatcgagtatgccgttcagacgttgaaggcgttttcggatagtgatgccggcttcatagcaccaagtgtttctatcgatatcttcgttcgtgacaatctcccttga

SEQ ID NO: 197531 - DNA, 978 bp, Klebsiella oxytoca
atgactaagttagccgtgattaaccctacttccgtgtcactgctgaacgccatgtttcgttcctggcgacgcgccatcctttatatcgggtttgttgttatctttattgtattctccatcaccttatccgaccagggcttcctggaccccgataatctcttgaacattgtcagacaaacagcgatgatcgccatcatggcgaccgccatgacattcgtactggctgccagagaaatcgatctttctatcggttcactggcgggtctggcctcggtggtcaccgccatgaccatacataattatggcgtggtacccggcgtcttcgccggtgttgcggtcagcctgatctttggtctggtgaatggttttctgaccactcgcatcgggataccttcctttttgaccactctcgccaccatgggtattgcaaccggtgtgtcaatgtggataagccataccgcggcgattccgatactgagccaaggatatgcttttgtgtttggcggcggtaatatcggcccggtgccggttttgctgatttggatgtttgtcatcggattcgccggacatttctcgctaaaacgcagtaccttcggtcgtcgggtcatggcgacggggggcaacgagaccgcggcgcgctatagtggcattaacacggcatcgatcaaagccagggtcctgctgctgtcgtctttgtcggccgggttggcggggatgctttacgccggtcggctgcaatccgggcgattccaatttggcgtcggcgacgaaatgtcggtcattgctgctgcggttctgggcggtaccggactgttggggggaagcggtaccgtggttggctccattgttggcgcgttgatgatgggattaatcaataacgggttgctgctgctgggactggattacagtcagcaactggtagcccgtggtgtgattatcattctggcggtggcccttagccaatctaataaccgttag

SEQ ID NO: 197532 - DNA, 1626 bp, Klebsiella oxytoca
atgacaaacattgttgctgctcttggcggtcagtcagtgggaaatgtggaacagcgggcaggaaacgagtcccccaatcctgcccccgccattcgcatggtcggcatcacgaaaacatttggcggcgtagtcgccctcaaagatgtccggatcgaggtcaagcgcggcgagatccatgccttgctggggggcaacggtgcggggaaatccaccttgttgaagatccttcgtggcgtacagtcccccgataccgggactatcgaagtgaacgggcaaccgctgatcgagcataccgttgaggcagcaaggttagcgggcattgccatgatttttcaggaaatgagtctgataccgaccctcaccgctgcccagaatattttcctgaatcgcgagcctagaaatcgctttggtttaattgatgaccaagcctgcatccggttatcccgcggtttattccaggaattccatgtcgatatcgaaccgacggagcttgttgcccagatgagcgccggtcagcgtcaactgactgaaatcatcaaagccatgtcgcaacgcagcagtattctgatactggacgaaccgtcgagcgcgctgaccgaaacagaggtgggcctgctgtttagcatgcttcgccacctgaaaacagcgggggtcgccattatctatgtgtcacatagaatggatgagatcatgcatatcgccgatcgcgccacgattctgcgggatggccgttacgtcatgtccgcgccgctatcggatctgacgattgagactattatcggtcacatcgtcggccaggaggggcgaaatcttacggtcacggttgataatgcagactcggtacccggggaaatcattctggaactcaagggtgtatccggtagccgccggccgcttgatgtcagtttgacggttcgccggggtgaagtcgtcggtatcgcgggtctgctgggcagcggtcgcagcgcattggcacgtcttctctacggtatcagcccggtggttgccggcgaaatccgggtgaatggcaaaaccgtccatttcgccagcccccgcgaagccattgccgaaggtatcgcccttatccccgaagaccgtttgctggaggggctgattgttcaacatagcgtcgccagcaatatctgtctgccggtacttaaacaattgagccgttatacctgggttttgaccggccggtcggccgccctggtcagaaagcagatagatttcctgcgaattaagactgattcacccggaacctccgccttggcgttatcgggtggaaatcagcaaaaagtcgtcttggcaaagggtctggcgaccgccccggatattctcatcctggatgagcccactgcgggtattgatatcggcagcaaaaccgaaatcgtcgaattgattcgtgaactcgcccgtcaaggcaaggccgttattctcatttcgtcggagatggccgaacttatcgccgcctctgatcgtatcattctcatggcgaaaggccggctggccggtgagattgatcccaggagagatttgatctcacccgataccgccccgtcagaacgtctgtcagacgcgcaacgccgcctccagatcgccattcagaaggtaaattcaaatgactaa

SEQ ID NO: 197533 - DNA, 1125 bp, Klebsiella oxytoca
atgaaaaacaggtggaacagggtactctcaatcgtggtcgccggtttgtttggcatcgcagccacgggagcggcgcttgccgccgatcccaatgaattgctcacttccctgtcgggtaaagtgttaagccagggacccaacggcgaacagccggaatctgtgggcaatatccgactcacccccgatgagttatccagaatcaaaaatctgcatgcgaccgcggcaattatcatgcattactccggcgatgactggtcgcgcgcccagataaatggcttgacccagcagttcaagagcatgggcatcaaggtcatcggcgtgaccgatgccggcttcaagcccgaaaaacaggtctccgatatcgagaccatgttggttaggaaacctaatatcatcgtgtcgatcccaaccgatccggttgctacctcgagcgcttataagaaagcggccgatcagggcgtcaaactggtatttatggacaatgttcccaagggattaactgccggaaaagactatgtcagtgtcgtctccgctgacaattacggtaatggtgtcgcggctgcgctgctcatggcgaaagaattgaaaggaaaaggctcgatcggcattgtctaccatgccgccgattattttgtgacgcaacagcgctacatcgctttcaaaaaaaccattacggataattttccagatatcaagattgtggcagagcagggtatcggcggaccagattttgccggagatgctcaacgggcggccagtgcgatgatcaccgcgcaccgcaggatcaacggaatttgggcggtgtgggatgtaccggctgaaggcgttatcgccgcagcgcgcacctcgggactcgaccatttggtgataaccgcctgtgacttgggtgaaaacgtggccattaatatggcccagggctcttttgttaaaggactgggcgcacaacggccatacgatcagggcgtcaccgaggcgattctggctggttacggcctgttgggcaaaaaagcgcccacctatgttgcctggtcggcgctgccagtgaccaaagacacactcgccgcctcatggcagcaagtttaccaccaggaactgccagatgatgttcgtaacagcatgcgctag

SEQ ID NO: 197534 - DNA, 807 bp, Klebsiella oxytoca
atgttgcatgaaaacgcgctaatggttgatatcgatgtggatcattggcgaaatcttcaaaacttgctgttggattccgcgaaagaaaaacgtcggattattatcatccacgaggacggtgaaatcgttaaatttgttcattcggggaaagcgaagattacgcgacccatcaccagggtaacgcaacctcaggcggacgccaaagcggtatacgaagccaatcgagccactaccgatttcgtcttgatcgttgaacgccgtgcttcggatgagtatttcagaaagatccaggatacctggacggttaatgacgacattgacgagtatgtacaccgggccttcgtcacgatggacgattaccctgacggcattgccgcctttcccggcccggccagttcccgtctgggattacaatggcggcttggcgcgtcctatgaagggattgagcaagccatcaaagcgttcatcccggcggattcctgcgtcgtcttcggtatcttcgagggagaccgtctatggagcagcctggttttgggcttcggcgcggagcgacgtatcacgctggtgaccacggttgatcccagcgaattgaccgtcaaaaccggacgacaggccatagcgcatgatgttgtgtcctggaccggcagaaaattttcaccggtcgccctcggtctgttcgccgacattgccgacgccagacaatttttgtcccgcaccgataaaccagaagttattcgtaacctgtttcgcaccggcaagttactggccgatccggtcccggaatcattatcacggttaatattataa

SEQ ID NO: 197535 - DNA, 2121 bp, Klebsiella oxytoca
gtgtctagtaaccatgaagatcagaacacgatccctatcgtggcggataatcatcaatttcttgtggaaggtcacaatgaatctctttacgctggcgcggttcactactggcgtttggagcgggataaatggggggaaattcttgataaggttaaatccctggggtttacggctatttcaatttatatgccctgggaagttcatgaaatcgaacggggacaattcgacttcggcagcattgaccccaacaaggatcttgacgcgttcctcactctggcggaagaaaaaggtcttcgtaccattgcgcgacctggcccgcaaatcaattctgaattaacctggttcggctatcctcgccggatccttgatgacccggaactgcaggcacttaacgcacaaggggggaaagccgtcctcacccaggtcccccgacctattcctgcgctcagctatgccgcggagaaatttttcactgaggcggctttgtggtttgatgctattttaccgatcctggtgaaacatcagtatccaaacggcggattgattgcggcgcaagtcgataacgaaatggctttctttttccatatcaatccttacgcctgtgatttcagtccatcctcaatcgcaaaattccaggcgtttctggcaaagaaatatcaaacgctcggcgccattgaacaggtctacggccgaaccctgggtggtttcgatcaaatcgatgcgccacggcgttttgagggtaaaacctcacgcgaccttcccgcgtatgtcgattggattgaatatcgggaatactacctggtggactgtctcacccgcttagccggtatgatgcgcaacgctggattgaccaatattcccctgttccataactacccgcaccccttggggccagggggagccgccagcggcatcaccgcgccttataatctgatggcgttagaggaaagccttgacttcgttggtttcgatatctattcccgcaaagaattgtacgatcacgtgaaaacggtggtgtcctatgtggtggggtccagtcggttcccctacattcctgaattcatcgctggggtgtggccatggtacttgcatccaggcgacgagaaagatgaggcgtttgtcactcgcgccgcgctgatgcacgggatcaagggattcagccgttatatgctggtcgaacgggaccgctggctggcctcgcctatacgtcgcgatggacggatacgcacagaaaacgccgcggtattccagcagaccaatgccctggccacccgttatgatttcaatcagtttcagcgccaggctgatgtgctgctactggcgaatcgcgattatgaccggctggaagcggccaccgaactattatccttcccgggcgattttctggaatcccaactgagcctgtcggaatatcccaatttcatgacggtttccgagcggacatttggtttcaacgagcccatccaactggcgaaaacggattggttcaccgcttattaccgttgcctgtccgatgccggacacactttcctgctctctgattcgtcactgccggcagtgcgcctaccgcgctataaggctgtcctgctgtcgtcgtttgagtttcttggcgatgccgcgcagcaaaagctcttggactatatcgagaatggcggcgtagtgatcctcggcccgcagctaccgaccctgaatgaacgattcgccgaaaataagaccctattgactgccgccggcaccggagcagccgtgccgctgtcggttgatcgacggcaggttgccacaacctataccatcggtaacgggcgtctggtagtgataccacggctggccgatgtggcatcggcggttgatgaagcgcttcgccaggtcggcattgtcgcgatcagcaaaaatgatcctcagcttgatgtcgctgtccaccgtgatcccagtaagccaaaccgggtttttgtgttcgtcgccaatccgaccgatcgggaaattcaggcggaggtgggcgtcgggcaacccctccgaaacgtcagcgaaatttgggaaggccgtgctgtcaaggccagcggcacccattggtgcgacacgttggctccttacactattaatacgtacgagattgaactctaa

SEQ ID NO: 197536 - DNA, 279 bp, Klebsiella oxytoca
gtggatgtggactggctgatcgccgagcgtcccggcagggtaaaaaccttgaagcagcatccgcgcaagaacaaaacggccatcaacatcgaatacatgaaagccagcatccgtgccaggggggagcacccgtttcgcatcatcaagcggcagttcggcttcgtgaaagccagatacaaggggctgctgaaaaacgataaccaactggcgatgttattcaccctggccaacctgtttcgggtggaccaaatgatacgtcagtgggagagatctcagtaa

SEQ ID NO: 197537 - DNA, 846 bp, Klebsiella oxytoca
atgaaaaactggtcaacggaacatacgaaagagatcaaatcttggctcgacattgatacttaccgcaaattcgaagagcttacacttatacggttctatcatgagctatgggcaaggacgttgttcttcaaaagctacagagaaaattttgagagcaaagctcttatgggatacttctcgaaaatctttagtgggaatccttttcttatagaagaagaaaagcttgggtatatgactcccgaaaacaagttgtttcaaccacctcatttctttcttactacaacagatgatattgcccgattaagcatacttgctatgaaaagagaaatgtatttctggagtggcggggatgggtatgctgtaaataaagagtttgaagaaaaacctgtctctgagagtatgccagatcagtttccccggacagttatgtttgaaatagatttagcaagtgggactgacgaggaaattgctgaatcacttaaggctgcactaccgcaatggcgaaaaattaaaggtatagaagaaaatcccctggagtcagttcggtttgggtatggaactatcaagaaactgatcaactatcgtgtaatacctatgctggatattctggtctgggccgccattaaaaaaatccgcgtctctgacgacagactatctaggttactatatacagacgatgacgcagaaagtgaaatgagattacctcaacaaatcaaggataccgacaggcctttggcgcttaaagcctgcacgattgattttatcaggcaatttcattttttcattaataagaataatcatttgaaagaaataaaggtatctgatgtgttaaaattaacagattaa

SEQ ID NO: 197538 - DNA, 864 bp, Klebsiella oxytoca
atgatcttcgaagatgctgcattcgacagagcaattagttttggtgcctgtatcaaatctattgaaaatgttcttggaaatgatattgatcaacaaattaagaaaatttattccaccagtgctgaaaagaaaacttatcctcttttaagagataaatcctgggatagtgaatttccgaaagtgttggagatcgaggatataaaagctccaacacctggtaaaggaagaatgcctgaagaggaacttaattccgaaaatataacacataaagattattccatacaaagtctaatcaagcctcgtctatgggatagaacacgctggcaaggagtaggcttcgctcaatttaaatcgtgttatccagggttatatctattatttaaacaccccgatataggtgaggacattttcaaagatcttatatcatcagtaggcttggtagatagtaaagccagattacgggtttgtattgtcaagggtatttcagttaaaaacccaactcattatagagtactaatatctgaaaatatgatgacaacgccgttaactaaaagaatgacaatgatcagtagaattaatacgatgactcctgatagcaatgtcaatttagaaaggtttcttgctgcatatcaggcttgtggaaaattctatcttggatgtgatgcgatgttaaaaaatattgttcctgagcatccacaaagagatagtttagggatagaaatgagtacgttcgatgttagatgggcttgggaaattgggttaaatgatgttgattgcattggggttaatttaaaagaagatgacccctatattcctagtgatgtagctgagatcccattattgcaattgataaacagtaaataa

SEQ ID NO: 197539 - DNA, 519 bp, Klebsiella oxytoca
ttgacctacgataaaaattatcttactaatcaattagcaacactccaagcacgattagaaaaacaagttaataatgaggagtcaagacttgagaagcgatccactgctatcaaagcgttatatgatggagtcatcgctgaaaataacattaaattcagagagttaaataataagcgcgatgaattagcattccagttagccaagtgtaatagtagtgaggaattagaattatataagatcaataaagaaagcgtcatacaactcaagcaagagttgatctctgtgcaaaagaatataaataatctttacttggttcactcacaattaagttcagagtatggctattcgcttaaagaatgtgagaaacgtggggaaagttttcacagtaatatatgtgaacactcatcaagttcaaaagcgaagcttgactcattagttgaacaaattaagtcccaagaacaaagaagacaatttatacataacgaaatattgttacttcagggagagaaaaagcaataa

SEQ ID NO: 197540 - DNA, 441 bp, Klebsiella oxytoca
atgagcacaaataatacttttaataaaatcaatgaaagcaggcattaccgtaatggaagcgttagcgaaacgaagctctcgcacgatcagcttcgttcacattgcgtcagtgtcagacttaataatgaagagcttactcttctgaatgcgaaacgtggtcgtcatcgtaaaggcgaatggcttcgtatggcgtttctgcataacctcccctcagttattccatcgatcaatctcgaaacatggaaaacccttggtgagatttcacataagttaaacaggcttgtcgctcatctggatagcaagagcaatgatagttctctctcacaaactgaactctttgcagtgaagcgtcagatctcagagcttcgtttgaacctgatcacagccgacctatggagatcaccttctgatgaagggaatgcaaaaaatcagcaggggtaa

SEQ ID NO: 197541 - DNA, 1305 bp, Klebsiella oxytoca
atgaagggaatgcaaaaaatcagcaggggtaaaaacttctctggtgtcgttctctacgcattaaagccaggctctcaccataaatgcacaccttatgtcattggtgggaatatggatggaagtgatgctggagatctgatagctgaatttgatgcaacaaaaacgcttcgcccggatgttgctaaacccgtctggcacaattcgcttcgcttgccgaaaaacgaagcgctgacagatgctcagtggtcagggattgctgatgattacatgtcccgaatgggcttctctgaaacgcacctcagatgctatgtccttcatgatgatgcggccggccagcacatccacattattgccagtcgtatagatctatccaatagaagcctttacttgggcaaaaatgaaaacctcatcagcacccgtatcatccaacagttagaaatagatcaccatctgaccaaaaccaaagggccagaattggtagcatcaccatccccagcttcgctatccagaaaatccccgccccaaaaaccgataatcccaataccgaagcctaaaaagctatcgcgtaacgaagcgatgatggagaagtataaaggagagctatcacccaaatcggttatccaggaagccctggaagcattacttgtcgataaaccatccaccactgattttgtgatgcaacttgccgccaacaatatcaaagcgcttccgaatattgcctcaacagggaaaatgaatgggttttcattcgaatatcaggggattgctttcaaagcttcgcagttaggtaaaggttattcttggtctgccttacaaaacaggctagattaccagccggaacgcgacaatgctttcctgtttgcattgaaaatgccctcagtcagtaaggcatcggttagcgaagcgcctaatagtgccatagcaacacatccccatgaaatcacaacagaagacgtgaacaatcctgtcgaatcgcttatcctcgataaccatgctggtcaggacgaatacactaacgcctcccacttagaagttggtgctggtgctaaggaatcgatagcaatcgaagagttaaaagaggctcccaagcgaagctatacggtctcatcgtttagatggcttgaaaccataccctatctccaaatcatcattggtatgttgaaaaacctaaaaatcccaacgctgcaacgtcctaaaaaacacaaaactatcactggcgtgagagtggtagaaattacgccctcaactacagcaaccgacattgaaatgccctcaattcatcgtagaccatcgccaacaatgtaa

SEQ ID NO: 197542 - DNA, 1485 bp, Klebsiella oxytoca
atgtacggagaggagaagtcggactcgctcatagtagcggcgaagcaggcgaacaacccgaaaggagcggagtcagtggagcgaaggagcggggccaaggggaacgcggaacagccacacatgcgccggacacagagccgggaaagcatgtcacagaggctgtcacgcgtgcgggaagctgcgaagcagcggaagaaagaacggtttacagcattgttccacctgctgacagtcgaagcactggaagccgcattcctctccctgagcaggaaagcggccgccggagtggatggcatcaggtggatggactacgccggaaacatgaagaacaacataacagatctgcaccggaggctacatcagggcagctacagggcgcagcccggcaggcgtcactacatcccaaaagcggatggaaaacaacgcccgctcggcatcgcctcgctggaggacaagatcgtccagtatgcgctggtgaaaatcctgaacgcagtctatgaaaacgactttatggggttctcatacgggttcagacccgggcgaagccagcacgatgcactggacgcactggccacagggctggtacgcactaacgtaaactgggtactggatgccgacatcagtcagttctttgacagggtgagccacgaatggctgatcaggttcacagagcatcggatcggcgaccggagggtaatcaggctcatacgtaagtggctcacagccgggacgtcggaggagggtcaatggcgagcaacggaggaaggcaccccacagggtgcggtcatctcaccgctgctggcaaacatatacctccactacgtcttcgatctgtgggcgcatcagtggcgacgtcgctatgccacaggcaatgtggtaatggtcagatacgccgatgacatcgtcatcgggttcgacaaacgatacgatgcccggcgcttccgtatagccatgcagcgcagactgagggagttcggactcacggttcacccggagaaaacccgtctgatggagttcggccgcttcgctgccgaaaaccgtgccatcaggggaaaaggcaaaccagaaacgttcaacttcctcgggttcacgcacatcagcgggaaagatcgcaacggcaggttcatgctgatacgaaagacccgccgggatcggatgacggcaactctgaaagccatcaaagacggtctgcgaaggcgctggcattactcaatccccgaacagggaaaatggctcaggagagtggttcagggatacctgaactatcactcggtaccgggcaacttccccaccatgcagaagttcaggacacacgtaacaaacctctggcgccgggcgctcaggcgcaggagccagaaggatgatacgacctggacgaaagcaaacaaactggcagccgcatggctaccaagggttcgggttcttcatccatggcctgtggagcggttcaccgccagacacccgaggcaggagcccggtgcgtaa

SEQ ID NO: 197543 - DNA, 1485 bp, Klebsiella oxytoca; identical to SEQ ID NO: 197542

SEQ ID NO: 197544 - DNA, 837 bp, Klebsiella oxytoca
  misc_feature (788)..(820): n is a, c, g, or t
atgaatgtacaggaaaccaaattttcatctaaagaatttctaaggcgccgtcgccctgaaaaattttctgattcaacaatcagagagactggtactttagatagagttgtactggaacacttcctctctacgctaaatacaagaaatcaagaattacaattcgaaaattttgcaaaaaaaatatgtgaaaaaataatttgccctaatctccttgaacagactggtcctgtagcagggggggatggtaaaactgacacacaaacattccctgtttcggaacagaataagcttctttggttcgaaggtgttaatgaagcatcaaataaagaacgttgggcctttgcggtaagtacacgtaaagactggaagaaaaaatgtcatgaagatgtacttaagataaaagaaacagagcgtgggtatactagagtattttgcgtaacgaatcaatctgcaaagtccaatattcgttcagaggttgaggatacactaaaaacaaaaactggaatagatgtccgtatattagatattaattggctattagatcaaatttacaaaaaccattttgagcaattggtcattgattcattgtcagttccaacacaatataaaagagaagttatttttggagaaaatgattataagaaacataaaaaatatgaagaattaaccgagtatattagagagaaaataaaccctgctgaaatttcatatgaacaagtggatgtttttttagaaattgcagagttaagcgctgaacttgagaaaccactaattgaaacacaaggtcnnnnnnnnnnnnnnnnnnnnnnnnnnnnnnnnnatttgaaagagctataa

SEQ ID NO: 197545 - DNA, 330 bp, Klebsiella oxytoca
atgaatattaatgactttgcaaaatttgaaaactatgaaggtaccatcagtgatggtacctttgaggatgttttttatatggactatgttgaagatattgaactaacagaagagaatgagaaatatattgaatggttaagctacttctttgttgccgaaatgcaagatgtgttagatgaaattagcgagttggatatgcttgaacagatttctgtttttgatttctggttcaagatcatccagtcaagagatgaagtagaagcactggcaagaactattatctattataaatcaggtgccacatttctgattgaatctattattttatga

SEQ ID NO: 197546 - DNA, 843 bp, Klebsiella oxytoca
atggtagcaagctacgcacaaccaatacataacgtatcaactataccctctttaaaaagaatgtttttcaaaacggatataaaaaccataaaaaactgtcttgaaagaatagccactccatctgataaattattcaaaaatattgactatgataaattactatccgatgatgagtatgctaaaaaagttgatttaactggttctgagttatatgaacaacatcaggaattccctatatggagttttatttctagactttctcgttctaaaaattcattaagtagttactggaatcaacagtttaataaaaaaaatgatggctgcctatctttagaaagcatccaactatatgatttactaaagacagcacactattcatacaagagtattctttcagatacgctgtctaattcaatagaagaaatcatggaaaaaatccctgacagacatggaggcattttttgtgatgtaccaatgcctcacttgtggatggaattagctttaaaccacttaggcggtacatatcatataaacacaaaacaacattggcgtgcaaagtataaggcaaaagagcatgaaatgtatttagatatgtttgtttttgataaatgtagagcattatatgattggttacccatgctcgacttgtatggcacttatatatcagccatagaaagacaaataatagttagatcttgtatggatgccattaaaaaacagtgtcactattcctttttcgacttatatttcggttcacatttaatagggatacatacaaaagagtggtcaggttgcccaaacctaaagattcgccacaacctgaacaatccaaatgaaaagtaa

SEQ ID NO: 197547 - DNA, 399 bp, Klebsiella oxytoca
atggcaagacatctgaataaaaacgatatagcgataataataaatgtgattgtgcagtgggatggagataaaatcacctgggatgggatatgtgcggctgtcgaatcattgattggtaagaagccgacaagacagtctctaaatatgaataaggacatcgttgcggcataccagatcaggaagaaaggcatcagagctacaggcaatgccatcaggcgaccagcgaatctgaagatcgcagctgcgagaatcgctagtttagaaaagcagctttaccatctggaagagataaataagagcttaaaagagcagttcatccgatggcaatataattcatacaaatatggtttgaaagaacatcagctaaatgaagatatgccgactatcgacaggctctaa

SEQ ID NO: 197548 - DNA, 231 bp, Klebsiella oxytoca
atgcaattgaaaatcctaggcgtgggtaactcgcccttgctctccgccagcattaaaaatctggatctggatggtgatgcagggttaataaattggtcagccgtttgcagaaagttgggtgtgaagcgctcaacgtttctgagtaagtgtgcggcggtgggactggaccaggcgtttctcgctgcctgcaatgcaggtaatagcgcaagcaagacccgcaccaaacactaa

SEQ ID NO: 197549 - DNA, 1044 bp, Klebsiella oxytoca
atggctcttacaaaagatttttcatacgtagactacagcgcatcgttcaccaacgttccggctcgcaatcgtatcttaaccaacctgaatattttccagcgtgatactactgaccagtttaaaaccagcctggacatcctgaacgcccaggcggacaccattgccccggcgggaatgcgttttggcagtcagtggggcagcacaccgaagccgacggcctctaaccatctcatcgaactgcctttatttccgactcaggacgtgattacagcggctgacgtccaaccgttccgtaagtacggctctccgctacaggccagtgtcctcgatgccgtcaccgctaagggcctggctcaccatgagcgctttgctgccacgcgtgaaaaaatgtttgcagaagcattattccgccaccgcgtcaccgatatgcagtacaccgctgacggcccgatggactggtcagaagagttcggctacgagcaaagcaccggaaccatctatacagggatttcctctgatccgctggagagcctcggtgatgaagtcagtgcgatgaagcgccggatgggtggcttggcttccctgctgaaaggcatctacctgtttgcgggttccaacctgttcaagaagctgcgttttaacccatcggttcgccagcttgtgcagtatggtgtcctcgatcctgatggtctggtgttcaataaagagatcaacccggcattcagctattacgtcctggataacgtgactgtagtcgagatgtccgataccgatttctacggcatcggtgcggatgcgggctatctggttccggtcttcgagaagccgttgagcgctgatcaggcatcaccttttactaatctggtcggcccaaccagtcgcaatctcgaactggcctttgctgacgtggtggacttccgcatctatagcagcaccgatgcgtacaaaaatatcacgctgagttcagaattcagcctgctgcctgtcagcttccgccccgacctggtgaccgctatcaccaatagcaccagcaaggcggattaa

SEQ ID NO: 197550 - DNA, 342 bp, Klebsiella oxytoca
atgaaaatgagtgaatcccaacgcacgtataacgacgtcgtgacctaccaggcggatgcaaattttgcaattcgtgtaattaatctcccaagcctggccgtcgaagtgcagcccggttcggtcattaaggccgacggcaccgcatttgcctccggctctgatgctctgctggttctgagtcatcaccgcgctggtgaagacgccaacatcatcgttgctgaccgtggcgtttacatccgcccggaaacagtgatcgctgttatgggtgagaccgtgggcgctgctgcaatagcggcattgaccgcatccggcaacatccgcattgccctgactgacaaataa

SEQ ID NO: 197551 - DNA, 603 bp, Klebsiella oxytoca
atgacggatgagaaaagtaacggtgtaatcaccgaacagaacgacccagaacaaaaaacaggccgacttccagaccaacaagcaaaaatcgacctacccgatttacccgcacaagaattgcccgacctgactcgcctctataagcggcgttgcagggatgagagcgtaatcaaaaaagcgaaatcgctccttgttcacggtatgaccgttagcaaagtagccttgctgctacgtcttcctctggagaaggtgcagcaactgcattccgaaggatggaacaacagatgcaggcgcgtgaccccgcacaatgcctggacatgtcaaaagctggcgatccagtgcttccgctctggcgcgatgctgacagagatctgctcacttactgatatgcctatcttcactattatctcaatgctggaacgtgaaggtatcgcgtttgctgatctgctgccaaggatgccgtcagaggctgaccacccattgatggctgagtatcggagaacagtttcacgccataagagcttgccgtgtagacgtaaacctatccagataaacccagtaagacgcaccagcaaaccagcagggcagaccgcgacggcctga

SEQ ID NO: 197552 - DNA, 723 bp, Klebsiella oxytoca
atgacggcagcaaaaactgattacgtaaagctggaatatcagatcttggatctggttgagtacaacgggctaaaaattaatgggaatatgaagatcctgctttccatgatctacagctatgagaggaagaagcggacttattacgaatcaataaccacactgggtaagcgggtaggtttagagccgcaggcggctcgtaatcttgtatctaaactctgcgatgctggaatgatttcctatgaagagcgcgctgggagttctcatattttccactcaaaaccgctcaaccaagaattgatgattttcatcaccgatgaaaaaccgaagaagccgcgcgggaagaaggtcagaaaatctgaggagaaagaggatgatggcaaatccgaaatgcaggcagcaaccgctgatcagagtgttggcatggcctctgagtctgccgcgtctactgttggacagcgcgatagcgtggaatctgacaatgacggcagcagcgatgatcgcgccgctggtaatcatgcagtgaagcaggaagagccattcccctggcagggcgacacttttattaaaaatcgcctctctgagaacgcctatcaatgggcgatcactgctggcgcaactgactggcgtcatgcctgtcgtttggtgtgggaaaagatcgagctgaccccgcccactgagatcgacgagcatttcaaaccattatcactatgcgaggataaatga

SEQ ID NO: 197553 - DNA, 222 bp, Klebsiella oxytoca
atggcattgagcatcaaactacctgaacacgtttacgccgggctgttagccgaggcgaaacgcaggggaacaacggttcccgctctgacgcgtgaagtgttggcggcagcggcgaatctgttcgataacggcggcacaattcatcaattggtatcacatcaactgacaatacccgacacggggaaacatggagaaaacaacaatgacggcagcaaaaactga

SEQ ID NO: 197554 - DNA, 420 bp, Klebsiella oxytoca
ttgaagacagcaaaaatcgacttcggtgtggaaacagccgaaaccattttcaacgcgatcattcacggtgagaccacgcaaacggccctctacggatttatgaaccgtgtcggaaccaacaagcggaacacgacgaaagcgcttgagatgctcagggagcacaaattacgtctgaaacggaatgcccgtgccgcccggactatccgcagcaccttgaaaccctacagcgctgaactggcaaaagggcgtgacgttctggacatcatccagcccgtgctcaccgcatggcgcttattctacgcgaagcagggcattggcctgatgaatgacgcggtgctgctgttgaaaatggttgaggttgcgggcgaacttgagaagctgacgggcgaacccgtcccggatatggtaacgccggattaa

SEQ ID NO: 197555 - DNA, 261 bp, Klebsiella oxytoca
atgagattgtgcggaagaaatcatctggatgagttaaagaaaaccacaccagcctgcattgtttggatcaatgcttgggcagcagagttagattcagtggtttggaaatcagtccatgatgttatgaaccagtttccaaacgcctccagtgttgatggacgctctttcatattcaaagttgatggtagcaacatcgctgttgaaaccatcattgatttcaacatgttactggtgcttattacctcaataaaggtaatgtaa

SEQ ID NO: 197556 - DNA, 1212 bp, Klebsiella oxytoca
atggatatcaaagttataaaaacagagcaacagcatcaggagtatttaaagaagattcactctttaatgctggaaatgccccccattcattccaaggcgcatgaagacttggagttgctaataactattgttgaagcatatgagaactccaagtatccaatcgaacctcctgaccctatcgatgccattcttttcagaatgcatgagaaaggtttaaagcaggttgatcttgtaccctatctgggaacaagaagcagggtttcagaaatccttgcccgtaaaagacctttgacggtgtcgatgatcaaagcgctttctattgggctgggcatttccacagatacgttagttgggataaatgcagataacgagcattcttctggcgatcacattgactggtctaaatttccagttaaagaaatgataaacagaggttggcttccagatatagttgatagaacgaagaaaaataccgaagaaattataaagagctttattgatcaagtgggttggcaggcaagtagcagcgtttcattcaaacggacgctttctggtgatgcttattcacctgcaacaaaatatgcgctgtttgcatgggtcagcagagtggtgcaacaagcacgtaagcgcaagaattcattaggtatctttaatccagatgtcttatcagccagctttatgcgtgatcttgctcaattaagttggttcgaaaaaggccctttattagcaattgagttccttgaaaaacatggcatcgctatagtgattgagccgtgtctaaagggaacaaggattgatggtgcagcgctaaaagacgttgacgggttgccgatcattggcttgagcttacgatatgatcgtttagataacttttggtttactttgctgcatgaagtcgcccacatttggaaacacattgattctaatgagattttcttagatgacatcgactctaacacagatgatagacaggagtcagaagcaaatcggcttgcccgggaggcatttatacccaggtcaacatggaagcgaagccaagcttattcatccccatctaaagaggcaattgatagcctctcaagagagctaaaaattacacctgcgattattgcaggtcggatacggcgtgaaagcggaaattatagaattttcaatgatctgattggtcaaggtgaagtaaaagcactattggttccggccttcgataactaa

SEQ ID NO: 197557 - DNA, 1131 bp, Klebsiella oxytoca
atgtaccctacatatgtacctattctcaaagcaaaagcaggtgaattcgctgctttaaaaaacttgaaggctgcatactctgaaaaaatagcaccttttttcgagattcctattttagtaagaaaagaaaaagagccaaaatggctcatggaatcaacacagcctttgacagatcatctgcaaagaacggctaaaaagcttgtaacttcatgccaatctaacgcctttttctttgacatcacgcaatggaaagccgacagttatattgaaactggtgagcatgtactgagctatcttcacagagaattatccaaaagcggtgcgattattcaccctgtcgtgggattcgatagatgggatattttagattaccaattagcattgaaagatttaaatatccctgatgggaataattattgtattcgaattgattcatcttcaattattgatgactcttacgatgtcgattattttaccgagactcttgaaacaatcatggaagagcttggcttatcaagcaaagaagtcatgataatgcttgattttgatgatgttacaaacaaatcgattgaatcattaaacgctcacgtcaagcatgttttaaatattttgtctgattatgaattttcatgcgttattatttcaggcggttccttccccgcattcataaataaggcagttaaggacgagaattcatctgattatgtaacaaggcgcgaaattcacgtttggaaatcattcgttgatgattcaaagctacctcttgttttctctgattatggtatcagaaaccctaaagccgaagacgatattatagctcctaacgccaatggaaaaatacgatataccattgaaaacaaacactttgttgttcgtggctactctaaactgaaaggggatggttacaaacaattgcacaaattggctgaaaacatcgtcaattcccccaactacttaggaccagactttagttggggtgatgaatgtattaaggcatgtagtaaaaaagaaaaactcggtggtaatactgagtggatcagctatgacacaaaccaccatataagttatgtagttgaagaaattaccgaatttaatagagttagagttgctaaaaaagcagcaatcatataa

SEQ ID NO: 197558 - DNA, 1104 bp, Klebsiella oxytoca
atgattgacatcaattcttttgaaaagatggaaggtacacaatcacatacatttattaatttttctcagggagtaccttatacgactttaggatggagtagctataaaaaattcaataagaaaatgaatgatatcttgttgaaagtgaaagatgaatttgatgtcgatgtttaccttcaagagtatgaggatattaacatagctgagaatttttattggatatatagtttttcagtaaatgaaaaagatattttgataaatataaattcttttattaaaagcaatataaatgatgtgatgaactgtttttttattaaggaggacgatgagctatactctttcaataatcatgatgaaaattttaaaaattacatgcatccctttttggcaatctattattgccatatggtttttacttatgacatgtatatagaacctacgcatccaccaagagaaaaatcttatagtaaagcgactttcgatatttctaaagtcagtgctataatgaaattatctgaatttaaaaaaacaattaatgattatattagtattaccagtcattctgagcattatgagtatatgtatgctgatgatggctttttttcgagtaagtatgaagggaataaaacgctgagggaggagtgccttccaataataaaatatgttgaatataaaaatattccgaaggatttatacattcagttgggtattaaaaaagataattttgacgcaaaaatatttaacgataaatttgctattatattagaaataacatctgctgtgcctgatcatgaccatcattacttatcaataagaaaaagagtcacaccagaaggatatttgccagtaaaaaatatgcacgatttgaaaaaggaatttgatatgtttcctgacaaaattgtaagggcaataaacttaaagcatgaaaaggaatatggagatgaaagggtacttatagtaaatatgcccatggagtatacgtatcaaaatgaggggtatataatagatgaaattttaaaggaagtaaaagaaagggtagtgcgaggaaagggcagctttgttgaaatcgtgcttaatgataagaaaataataagattattttaa

SEQ ID NO: 197559 - DNA, 489 bp, Klebsiella oxytoca; identical to SEQ ID NO: 77493

SEQ ID NO: 197560 - DNA, 294 bp, Klebsiella oxytoca; identical to SEQ ID NO: 77494

SEQ ID NO: 197561 - DNA, 159 bp, Klebsiella oxytoca
atgaacaattatctcggcggatatattttcggtgagcacagcctaattgaacgtgatctggaagaaattcgcgggctcaccctgcggcgaaccagtgaggctgaacaacccctacagcgacagcagcaacttcgcggactgtactcgctattgacgtga

SEQ ID NO: 197562 - DNA, 138 bp, Klebsiella oxytoca
atgattatgcacgaactatgccacatctcaaaacattttattaacacaatgaaatataatacctttttactattcatgggcatgaatgatgatggtcggttttcgcgcaaagtgtcgctgattagcaacaccggatga

SEQ ID NO: 197563 - DNA, 846 bp, Klebsiella oxytoca
atgagtaaattattatttttattgtttacttccgttgttgtcacggggtgtgctaacacaccccgtaattataactacctccaccagtttaacgacaaattagaaagtggtgtttttaaagagaaaataatcgaatatcccacgtcttataatgaaattgattggcagcatccaattaaggggcaggagcttcttgataaaatcatatcaaaaagagggaagagtaaccatgaaactgagcaggagtatcggaataaaaacattgatgtagatgggtttgttttctcagtatattcaaattgggattttgattatgacgcagaaaaggagtcgatcacttttacagattatggtgatggctacctaagcagctacgcatctacatacacaagtgaatcagactttaaagatgtgagtatgtatattggctatcctatatcaggagatataacaaaaaacatcggtggatattacgggagcaatgcttttggtgcaactgcctatgttacaaaaaacgtaagtagaagatttataattattccatacaaaaagaatgatatctacgaaaaaaataaattaattttcgttaatggctgcaaggttgatagggaagaatttaaaaaacataatggtgacatgttagttcagtttatgtctcgtctgatatatccatatgtaaaaactgacgttaattatcagacgcctaccttagacaacccaattagtaatgatatctcaatttatatgttcagggtggatatcctagccgctaggctgattaatgtgaaaagtggaaagatatacccatgccaaatagggttgagaagtttatgggctaaacaatga

SEQ ID NO: 197564 - DNA, 201 bp, Klebsiella oxytoca
atgaaagattattgggattctttaactaaagagcagcagtgcaagcttgccaatagcgttggctcaacgcctggttacttacgcttagtgttcaatgggtacaaaaaggccggtttttctttagctacaagattagaaaacatcactcttggtgagattaaaaaatctgaactccggcctgacatttatccaaaacagtaa

SEQ ID NO: 197565 - DNA, 690 bp, Klebsiella oxytoca
atgtttaatgaaaacatgaaaacaattcaagaaatcaggcgtataaacgccagaaaattgagagacggtgttggcggaaattcgttttttgccacgatgattgatcgcgagccgactcaaaccagccgatttatgggggatggagcaaccaaaaatattggcgacgcaatggcgcgccatattgaaaagtgctttgatctgccactaggctggcttgaccaagaacatcagactacgaatgtggctaaaagcaacgatgtttctgatgcttatagagacattactttagttccagtcatatcctgggtgcaggcaggagcttggacggaagttggatatgctgaggtagacttgaataacgcagaaacttatccctgcccagtgccttgtggcccaatgacctacatattgcgtgtcattggcgattcaatgataaatgaatatcgccccggtgatatgatttttgttgacccggaagtcccagctgttcatggcgatgatgttatagccatcatgcatgactcgggagaaacaaccttcaaacggttgattgaagatagcggacaaaaatttctcaaggcactgaatcctaactggcccgaaccttacgtcaaaatcaacggtaattgctcaatcattgggaccgttattttttcaggaaaaccaaggcgatacataaatagagtataa

SEQ ID NO: 197566 - DNA, 195 bp, Klebsiella oxytoca
atggatgaaaaatgtactgattcaaaaattatgaccggagaatgcctactggttattagttctgaaattctcaccgttttaaaaagcgagctttcctccagaggattaaagcccactccaagcaatttacgcgttgtgatggagattattgataaatctcttcctgattcactcagcgagttttttgtcgagtag

SEQ ID NO: 197567 - DNA, 177 bp, Klebsiella oxytoca
atgaacaaagaagaaaaagtaatgtttttaatgcggcttgctgttgaaactcacaactcataccgttcaggtcaaattgccgctggtaaacaacctacagatcacgatcccatcgaaactatcgaaatgatttacgataagtacgaagagctactcgacaaaaaactcgctgagtga

SEQ ID NO: 197568 - DNA, 576 bp, Klebsiella oxytoca
gtgaaccatttaatgttcgacctcgaaacaatgggcaataagcccaacgcccctatcgtctccatcggtgcggtattttttgagccctcaactggcgaactcggagaagaattttaccgagtagtcagccttaaaagcgcggtagatggcggtgccgttcctgaccctgaaacgattatttggtggatgcagcaaagcgaagaggcccgaaaggccatttgcgataaagacgcggctatgaatcttgttactgccttgagcgatctgaattgcttcatacgtgataacgccgagccagcaaaagttcaggtctggggtaatggggctacgtttgacaacgtaatccttcgggccagctatgagcgggagtttgtaccctgcttatggaaattctggaatgatcgtgatgttagaaccatcgtcgaactgggacgtgctattggtatcaatccgcgccgcgatattccgtttgacggcgatatgcataatgcgcttgatgacgccaaacaccaggctaaatacgtctctgtgatctggcagcgacttgtaaacatacccaaaccaagtgaggtgtag

SEQ ID NO: 197569 - DNA, 201 bp, Klebsiella oxytoca
atgaccgagcaacccgatgatcttctcactccagatgaggtatgtcagaagctggggatcacacagaaaacgttatgtaaatggaatacagaacaccggcaccgctctacgttggcccctgtgaagttcagcgcgaaagtggtgcgctacgaacgccgtaacgtcgaggcttttatacagaaatgccggagtcagtattaa

SEQ ID NO: 197570 - DNA, 1398 bp, Klebsiella oxytoca
atgccgcgcactgtaacacataaaccagatagccccaataatgacgatgttatagccgcgtcagaaaagtgggactcctgtaaacctccctataccagtacacacatgagaatctgtgttactgccgcaaaaacgatcctcgccgcctatggtgtggcccgccgttcaaaatacgaaaaagagaactacctccgtattgattttagcaaagcaggtaaggttacattttacgctgaattcccaaaaaagatgggactcaaagggaaaaagcttggcgaatggccggagctcgcaattcagttagcgcgtgagaaagcgtcagctatggccgaaggtggcctgcgagctgagtccgttcatgctgcgctggaaatgtaccgtgacgacctcaaagcaaaagtagaccgccagaagctaagtccagacagtttcaccacctatggggtgcgtatagaccggattaaagcaaccttcggagaacgggaagtatttagcgacgtaacgtatagtcggctggtggaagtgcttgacgagtggatcgccactcgctcgaacaataacgccctggagctatttgccgagcttcgtcggttctggaagttttgcgcccctacgctttgcaatggccgcaacgttgctgccagcctgcccgatgattatgtatcttctcgtgtgcagaaacctactcccacacggctttttaccgatatcgaatcaatcgcccggctttggctcaatgtggccgcctgtacctctgtacaccaaaagaatgcagttcgcttcatgatcataacgggcgttcgcccgataaacattcataacttgcgctgggattatgttaacgaggtggctggtgaaattgtttaccctgaaggggtgatcggtatgcgcggagcgatgaaaacacaaaaggctttccgccttccgataacacctgaaatacggcgaattatcgacgagcagaaagcctggcgtgattcagttcttgaaagtaataaagattatgttttcttgcagccacgtgatccgatgcaaccattttcaaaacgttcgctggataaactggtgaaaacatacagccctgaaggcgctgttaaaggaatgaagcatgagggaacgataaaggggaaggagggggcatttaatacgatgtgtcgtaaatttctaaagagtaatgttattgctttgatgaaagaaagaggctattcccggtctgacagacgagaaataagcctcctgtgccttcatcattccagcaagtcagatgacccgatggcagagcattacgacttttcagacgagattttgcaggaagagattgcgttaaagcgtgaagctttcgaggctcacgagcgaagcatactagcgcaggctgcactattacggcggcggggttaa

SEQ ID NO: 197571 - DNA, 999 bp, Klebsiella oxytoca
atgaaaccgttccgtcgcgcgttttttatctggggatggccgctgctggccctcagcggcctgttctggctgagcctgttctgctattcgcccatcccgatttcgccgctcaacgcccttcacgccctgctggcgcctgagtctccttcgcttgcggaggcgctggtgcttaatctgcgcctgccccgcagcctggtggcggtaatgctcggcgcctcgctggcaatgtcgggggcgttattacaaacgcttacccataacccgctggcatcgccttcactgctcggcattaatagcggcgcggcgctggcgatggcgctgaccagcgcattcagtccggcaccgctggcgggcttttcgctggcgctgattgccgcctgcggcggcggaataagctggctgctggtgatgagcgccggcggcggctggcgtcaacagcaggatcgccaacggttgatcctcgccggtattgctctctcggcgctatgcatggcgttgaccagaatgaccctgctgctggcggaagatcgcgcctggggcattcttacctggcttgcgggcggcgtttcccacgtgcgctgggccgagttctggcagcttttcccttttgtcgcgctgattacccccggcgtattcctgctggccaacgcgcttaatctgcttaacgtcagcgataccgccgcccattcgctgggggtgaatttgccgcgcctgcgcctgcttatcaacgcggccgtgttgctgcttaccggcgccagcgtcagcgtcgccggaccgattgcctttgttggcctgctggtcccgcatctggcgcgtttttgggcgggtcacgatcatcgtacttttttgccggtcagcgccctgctgggcgccctgtttatgctgctggcggatatgctcgccagagcgttggcctggccgggtgaactgcccgcgggcgcggtgctggcgctggcgggcgggccctgttttgtctggctggtcaggagacgcgggtga

SEQ ID NO: 197572 - DNA, 486 bp, Klebsiella oxytoca
atggaaatgagtaaaattcattgttttgaaacgggttggtcattattattagatgcttctctttggataaaatggctaggtattttatccaatgctgcaacatgcattgctgcaatttttgctgttatagctgtttttgttgcatatcatcaattaaagtcagggagagatgaaggtcgaaaaaacacagcttatggaatctatcagcaatatctatctctctgtattaataacccccttttttcagacggaatgagtaagccggaagatagaacaacggaatatggacaatataggtggttcgtttcttctatgcttttttcttttgaacaaatattagatacacaaaaaaacgatctacagtggattaatacaattaaatcccaactgaaccttcacaaagaaatcttaagaagatcgagaacagtaaaagataaagaatggtcagtcgagttaagtaaaatcattgaagaagtgactaaataa

SEQ ID NO: 197573 - DNA, 3003 bp, Klebsiella oxytoca
gtgaatttagctaacgattacataacaatcgatgatgtatatcttgcgtatagaaaggcgaagcaagaggcttttttagatggtttctataccagctcaattaaatatactaagtttgaggaggatttgcataataatattaaaacactctatgaattattaactactgctgatcagcgatggtatttagatacagattttattggaggtcatctctatgttcctaaaaaaataaatgatgatgagtgggttaaaaatagttctattcattatcgctcagttgatccaaatatagattggatacaaaggtataaggaaaataaaaataaaaaattaactccagagtataggctgataatcaatcctaccgtggcatatcagatagtctcagcgctatggataattaaggttggaactaaatttgaagaacatttgattgatgagtattcatatggaaatagattaagaagatatggtagacaaaataaaaagagtaatcgtgctttgaatattaatgctacagggctttttgttccatattttagtccatacaaaaaatggaggaataaaggtctggaaactatgaaggaaatgttatctgaaggtaaaaacgttacagcagtaacgatggatataacacgtttctaccatagagtaagcgcaaagtttattttaagaccagcttttcttaaatcaatacacgttactctggatatcaatgagaaaacatttacaaaaatgctcattgaatcttttgatgcatggtatgcagagactcctgacgtgaagaataggcctgaaggttgtttacctgtgggattaactgcatcaaaagttatttcaaatatattactttatgagttagatattcagatttcggaaagcatagcaacgacttattatggtcgatatgttgacgatctatttattgtttttgaaacccctaaagatcttataaatggaaatgaaattgttaattatatatcccaacgagtagaatgtataagaattgacaggaaaaaagattcacctccaaacctaaaaataaggtttcaatatgccgaagatagtcatcttgagtttaaggccgataagcaaaggatatttagtttatcatctcaatatggaattgacctaatcaataaaatatctagccaaatcagagagcagtcaagtgagtatagaatgctgccatcagtcccccaaaattctaatgcaatggctgaaaagactttattagcatcttcagacgcttctttagttgcggatgccctacgtaaggctgatgctctttctattcgtcgtttaggtatttcattgttaataagagatatagaaaaatattcacaaaatctcaacaaagatgaatggactgatgtacgaaaagaattttatgaactttcgggaagatacttgttaaccccgaagggtttttttgaatattcaaactattattcgaaaatttttttaattatgatagctaatcatgattttaatgaggctcaaaaattcattaagggcctcagtaataccatgtctattattagggaaacgactaagctgagtacgaaaacacagcaggaactatgtttaagatatttcactgatttattagtagaaaccgctatgaaagcatctacagtaaaatattttgatggctgggtagagttggattctgttattttagagcttcaacgtttcggggcgtgctgtaatactcaaattagttttaactgcaaaaaactaagcaaaaaaatgttggtttctgatttgggctttagaccatataaggactattggtattatgaacaaaaatatgatgccgagtgcattccggagccagactcgaaaaaaattaatatattacttcgtttaccaagtatagaagcgtttagaaaacgagttaacctaaaaaaaccatattggccagcggtagcattttcaacaagaccgttaagcattcaagaaatggttttaatttatccgaatattttacaggatttttatttctttaaagacagtattatggctttacgcggtgccaagataactaaacatcataagtttttcaattcaaaagaggaggataatatatatacgattccatactatagtaaaaaaagaattaatgttgcgcttacaagttttgagacaagctctgagacatacaacatggtattacagggaaccccagatagaggccttaaacgctatgagaaattaaactcactaattaatagagtcctgaaatcaaaggagacaatagattatataatttttcctgagtgctcaattccacgaaagtgggcaattgatattgctaataaacttgccctacaagggatttcttttttggcagggttggaatactacaggaaaaatggagataaaagatatagaaatgattctctaatatcgttaacgactcggtggccgggctacccaattaatctaatgctaacacaacccaaattgaatccatcatatgatgaaactaagaggctaagagagttttcgaaagagttatatattcctaacgtgggggctaacccgtcaatatataggcacggagattttttctttggtgttttaatctgtagtgatttgaccaatcctaggagtcgcgtctattttcaaggcaaagtggatactttgtttgttttggaatggaattcagatgtcaatacattcggctatttggttgagggagctgctcatgatattcatgcgttcatcgtgcaagttaataataggctttatggagatagtagacttcgaagcccctatagaaaaaactataaaagagatttggttcgcttaaaaggtggtattgatgattattatgttattgctgaaatagattatctccctcttagaagttatcagctatatggagatatgacagatcagaacgctgagtttaagccattaccaataggttttaaatatagtcattatagatctgctaataaaattgataaatcagaggatggaaatgagtaa

SEQ ID NO: 197574 - DNA, 870 bp, Klebsiella oxytoca
atggagctgcagaactatggtgtagttagtcgctaccacttgatgcagaaatttaatatcactgaacgaaccgcttatcgcgatcttaacatgctttccttatttattgaggggtgtggcaatggaaaatatcgattgattccatcaaaatttcaaaataatatctatgacactatggctagcacgctggctaagctactggatgccgatgcagtatttcccgacagagatgagtacttctggaacagcctagaaaaacgagttacggaacagcatgtcagtgttcattataactctcctgaacattctaacagaaacattctgcggaagtattttaacttattggagaaagcgattcataaaaaaaatgtttgccatattttatataaaaacaaaacacgcattattaatccctacaagctagttaacaaaaaaaatatttggtacttacaagcgacagaaagcaataaattaaagtcattttcgttaagcaaaatccattggttggatataaaaaaagaacactttgaaattgataaacttacactttcattaattaatgaacacaatgatccttggattagcgaagaaacttttgaagtcagagtgcgtattagccacagcattgctagctactttcttagacgtgatttgttgccccagcaaaaattattgagtgacgatgatgatggaataactctgctttgcaaagccgcacatcagaatcaaattatcccactaattttattctggttacccaatatcgagattctggagcctgattggttaaaaacaacagttattaacatgctgcataactatgttgctggcgatcgtaactcgattcctggtgtaggatgtgatggatag

SEQ ID NO: 197575 - DNA, 1098 bp, Klebsiella oxytoca
atggcattacctttcattattctgggggtcgcggcagcggcaacagcatttggtggcaagaaagcttatgatggctaccagaaaaaatcagaagccgatgatgtactagccggtgcgcagcgtcgctttaatctgtttaaagagagttttgaggcggtagagaagaggacctctgaaaagctggcagaattgggtgaggcggagttagaagtcggtaaaaattttgatgagttcaatactatcgccgttgatctcctggagcgtttggcaaaagatgggcataaggatcttaagctaactgtgccaaagcacagcatcaacaagatccaaagtctggctatttccgctacggagtatctgaccacggtcgttggtgctggcgtttcgggggctgctgcaggttttgccgtatacagcggcgtgatggcttttgcagcagcctccaccggtacaccgattgcagcattgtccggtgtagcagcttataatgcaacgatggccgcgattggaggaggttctttggctgcaggcggctggggaatggctggcggcgcgatggtacttggcggtgcggtggtcgctccactgattgctattgcaggttgggcctacgataaccatgcggaaaaagctctcaacaacgcctataaaagctcccgtgaagtgaactcggcggtagagaaaatgaaggcggctgaagctcacctgacgagggtgcagaaatatgtagagagcatttatgagtcgatcattcgtatgcatgccgttttcgttcaacaatattttgagccgctaaaagcgatgcacgcactcattagtgaacgtcgtcaaaaaaatatcaccaccaatattgatgagcctgaagaaattttgacgctaatagatcacggttatctattagctggcatcatgacagacgtaattatcacaccactgttcaagccagtgacgaatgaaaacggagaggctgttattgaagatggagtgatccagttgcaaaccgacagtaatggtatgaacctgctgaataaagaggcgttggataaacaactgacgacatcagcctctggcttcgacgcattttcctctcgtatttaa

SEQ ID NO: 197576 - DNA, 1572 bp, Klebsiella oxytoca
atgaatgctgacagatttgactggagtgaagagttacatcgaacggtggtcaaaagccttaccacctcatttggattagattttctcttgttagatgataagttcggtggcgatgtgaacaccgttcacaatgtacgtcagggtgtgtatgccacagataccgaacgtcaacggtatgaacagcgagatgagtataattcacatcattatcatagccacgaaaactacatcgccaccaaccgggcgggaaaaaaatcgcatgaagtcggttcgttatccgatgcttataccggtaaaatttttgcacctaaagataaaaagaacctcgaccatactatttcagcccatgagattcacaacgatgagggacgtctccttgccgaatgtgatggtgcggacctagccaatgactcatcaaaccttactttcacaaacgagtcgatgaataaggcaaagaaggcaaagtctatggatgcctttgttcaaacactgcaagaacagtattccaccacgacgcaggaaattgcccgattacgcagcatgcccacactctccgaacaagaaaagaaacaactaaataagttagaaaataaagcttctgcggattttgaactcatgaaaaaggctgataagcaggctcgagaaaaatacaatagcactattaatcatgaatattacaccagcagcaagtttgcgaaaaatgtcaccagtgctgcaatgaacaatgctttccgcatgggtacaaggcaaatgcttgggctaattctggcggagacctggtttgtattccgcgagcgtattccggttattgttgaaaagcatcgccatacatttgatgccagtaatttccttctggatgctactgaagcattgcgagccgtctggcacagggtacaaaccaaattcagcgctttcatgacttctttcaaagacggtgcgattggcggcatactctccagtattactacaacactctttaatatattctttaccacgaagaagatgatggtccgtctgattcgagaaatgtggaataacctagtgcaggcttttaaagtgatgatctttaatcctgaagggttagcgccaggacaactggcaaaaactgtcagtaagttggttactgccggagtggccgtcgcagcgggtgtagtaattaacgaagcattagcaaaaatcctcgtctttccctttggcccggagctggccgccttctgcggtgcactggcaacaggtattctgacgttggtgatgaactatttcctcgaacacagcgctttgatgaaaaaggtctgggcattcctggatacctttaaggataaataccagaaagcacttgaatattatcaacaggttaatgctgaactcgatagttacttgctggagctttcaactctggaatttgccattgagtcatcagagctatcgagctttacacagcatcttaatgcggtaaatggcgagatagaacgcggcctgctgctaagagacgaggtcgagcgtcgaaatatagctctgccgtttgaagcagggaatacccgttctgtgcgtaactggttaagcaagctatga

SEQ ID NO: 197577 - DNA, 138 bp, Klebsiella oxytoca
ttgtgcacgatttatgaaactcgcccgctgatttgccaagtagagcggcagtatgaacttaactaccagcagctatatagctggcaggatttcattacgctgaatcgggaagcgtgtctgattctagagaagttataa

SEQ ID NO: 197578 - DNA, 570 bp, Klebsiella oxytoca
gtgattttgccgcccgggcaaggcgcttgcccgcggcccggggaaataacacttcccctgctcagacttcccccggtcgcgctgcgcttaccggggctacaggttcaccaccgtttgccgttttgtagcccgggcaaggcgcttgcgccgcggcccggggaaatagcaccgcgcccgctcagacttcccccggtcgcgctgcgcttaccggggctacaggttcaccgccgtttgccgttttgtagcccgggcaaggcgcttgcgccgcggcccggggaaatagcaccgcgcccgctcagacttcccccggtcgcgctgcgcttaccggggctacaggttcaccaccgtttgccgttttgtcgcccgggcaaggcgcttgcgccgcggcccggggaaatagcaccgcgcccgctcagacttcccccggtcgcgctgcgcttaccggggctacaggttcaccgccgtttgccgttttgtagcccgggcaagacgcttgcgccgcggcccggggaaatagcactgcgcccgctcagacttcccccggtcgcgctgcgcttaccggggctataa

SEQ ID NO: 197579 - DNA, 3075 bp, Klebsiella oxytoca
gtgaaaatagcgccgtcaaaaaatcgctttaacctttctgcatgggcgctggaaaacccgcaaatggtcagtttctttatgctgctgattatggttatcggttcgctcagctatacgctgctgccgcgaaatgaagatccggctttcactatcaaaacggcggtagtctctgcgcagtggccgggcgcgtcggtaacggataccacgcatctggtgacggatgtcctggagaaaaaattacaggaaacgccctggctcgattatatcgaaagtgaaacccgagccgggcaaacggttatctatattaatctccgcgatgacaccccggcgcacaacgtcccggcgatctggtaccagatccgcaaaaaaatgcaggatattgcgccatcgctgccggaaggcgcgcagggaccgagcgtgaacgatgagtttgacgacacgtacggtaccatttacggatttatccctgacggatatagccttgaggaggtgcgacagcgggtggagacgatccgccgtgaactgatgtccgtgccggatatcggcaaaacggtcctccttggcgagccgcaggagcagatagtcatcgctttttcgcccgcccggctggccggtatggggcttaccattcagcaggttgcggacgctctgaaggcccagaatgccgtggtgccggcaggaaccctgcgcaccgggcaggagaatatcacgctaaacgtcagcggggccctcaggaccgaagcgagcctgcgcgccgtcatcctgcacatcaacgatcgctatcttcccctgaccgatattgccacgattgaaagaagcgcggccgaaccgccttcagcggagtttcgcgtcaacggacgtactgccgttgggctggcgatttccatggcgccgacgggcaatatgctgcgctttggcgagacgctgaataacagaatgcgcgccatcggcgtcgggctaccgcacggcatcgagatagttaaagtggctgaccagtcggcggtggtcagcggcgccgtaagcggatttgtccgggtactggtggaagccgtgctgattgtgctggcggtttcttttgtctcgctgggattaagggccgggctggtggtggccgcggcgatcccgctggtgctggcgatgacctttaccgggatgatgctggcaggcattggtctacagcgcatctctctcggggccctgatcgttgcgctagggctgctggtggatgatgccatgatcgccgtggaaaccatggtatcccggcttgaggccggcgatacgcgacggcaggcggcgacgtacgctttccaaaccacggcatttccgatgttgaccggtacgctggtcatgattgccggatttattcccgtcggttttgcctcatccagcgcgggcgaatactgcttttcgctgtttgccgtggtgctgatggcgcttctgaattcatgggtcgtggcgattctgttctcccctttgaccggaacgtggctgctgccggaaaagctgaaacatcgtgccgcaggcccgggccgcatggcgcggggatatggacgacttctgcgtacggtgctgcgccaccggcttgccaccctggggattgcgctggccgcgctggggctgtcggtgtacgggaccacgtttatgcagggggagtttttcccttcatctgatcgcccggagctgctggtcagcctgacgcttccggccaatgcttcgcagacggaaacggagaaacaaacggagaggctggaaagggcgctcgccgggaatcgcaacattgaccattattcgacctatattggggcgggcgccatccgcttttatctgccgatggatgttctgctggataatgaaaatacggcgcagctggtggtggtggcgaaagacctggccgcccgcgaccgcctgcgggaacagttaaacacgctgctgaccacgcaattcagcgatctgacttcgcgcgtttctcctctggagctagggcctccggtgggctggccgatcaaataccgggtcagcgggccggattatctcaaggtcagagagtatgccgggcgtctggccgaggcgatagggcgctcgccgttaacccgggaggtaaaccagaccgccggcgagccggagagaaccatcgtcctgcaggtgaaccagactgccgcgcgggcggcgggcgtgtcatcgcagagcctggcgcagacgcttaataccgtctggtcaggcacgacggtcacatcgctgagagacaatgaccggctggttgatgtggtgctgcgggcgaacgacagcgagcgattgaatcttgccaccctgtcatcgctgacggttgaagggcgcggtggagaaaaagttcccctcagcgcggtggccacgccgacctggggagtggacgatccggtgctctggcgtcggcaaagattgccgtttatcaccgtacaaaccgacctcgcgccggggatgcgggcagaaggcgtatcgaacggtctgcgcccgacggtggatcaactgcgcgcgggtttacccaccggttacagcattgtcgaaggcggggtggttgcggagtccgaaaaaggcaacagctcggtattgaatattttacccgtcaccctcggcattatgctgttattgctgatgcttcagctgcggcgctattcccgtatgctgctggctctgttcatggccccgttcggcttgccggggattgttatggccatgctgccgggcgacacgccaatgggatttgtggctctgctcggcgtcatcgcgctggcggggatgattatccgcaatgccgtgatacttatcactgaagttgacggcaatctggctcagggcatggaaagcgatgccgctattattgccgccgcagagcaccgggccaggccgatatttctgaccgcctgcgccgcgatactgggtatggtccccatctctcaccaggtattctggggaccgatggcgtatgccatcattggcgggctgattgtcgcgacgctcgtcacgttaaccgtgctgccggcgtcctttagcctgctgttggagagggggagataccggaaaaaacgtcccgccgcttaa

SEQ ID NO: 197580 - DNA, 165 bp, Klebsiella oxytoca
atgacaaaaaaaaggcccgacgagcgggccagtttttcgatgagcattgacgtcagcaaagacgtggcgtcaggcgcgcatcacacccttttaaagattagcgagccgttagtgccgccgaagccgaaggagttacacagggtatactccagatcgctaacctga

SEQ ID NO: 197581 - DNA, 360 bp, Klebsiella oxytoca
atggccgtctgctggccggtagcttggacagatgcgcagcatcgcctccgggaaattatgccactctgcgcgctgctcccgggggcggcgcaaggcgcctgcccgggctactgccgtctgagatccggtagcccgggtaaggcgtttacgccgcgacccggggataacattatttcatcgaggttaactcaccagctgcttgagcagggcaaaagcatctttcatgcgatcctcgctgaccacaaaagcgcgcagctggttctcggcgtcaacgcctttcgcgaccaggccgtctttggcggcaacgatattccacgtcagatcctcgcgccgggtatcgcccgccaggtgcagcggtaa

SEQ ID NO: 197582 - DNA, 651 bp, Klebsiella oxytoca
ttggccgatcgggcggtctatcgccgcctgctaaacggtagcccgggtaaggcgtttacgccgcaacccgggaaatgcgccgggattgaggctttagtgcggcttcgtcccgggccgcgctgcgcttgccccggctacggcgactgtctgcggaccggtagcccgggtaaggcgtttacgccgcaacccgggaaatgcgccgggattgaggctttggtgcggcttcgtcccgggccgcgctgcgcttgccccggctacggcgactgtctgcggaccggtagcccgggtaaggcgtttacgccgcaacccgggaaatgcgccgggattgaggctttagtgcggcttcgtcccgggccgcgctgcgcttgccccggctacggcgactgtctgcggaccggtagcccgggtaaggcgtttacgccgcaacccgggaaatgcgccgggattgaggctttggtgcggcttcgtcccgggccgcgctgcgcttgcccgggctacggggccacggctgtctgcgggccggtagcccgggtaaggcgtttacgccgcaacccggggaatgcgccggggttgaggctttggtgtggcttcgtcccgggccgcgctgcgcttgcccgggctacggggccacggctgtctgcgggccggtag

SEQ ID NO: 197583 - DNA, 582 bp, Klebsiella oxytoca
atgagtgcaatagacactttaagggaatacgccgaagtatggcatttatttggtaatatgccagatgatgcaactctaagtgctgaagtttcggctctttatcttggtgtgagtgtcaaaactcttgctcgctatcgccagaatggtaatggcccagcttatatccagtaccaagcagaagacagcaaagcacggaatcaacgagtaaattatctactgggtgatttaagggcttggcgggatagtcataaggtaagcagtacaatggaggctgcacaggtccgaggattggcttttacttgtttgaatgattttactaagccagaaccgttttggtctattgataataaaatttactctcatgccctcactatttctgacgaaatattcaaggagctattaaatacaactcgtgcagaagttatctggatctctgttgaaaaagttttatctgaggactggcatagtgcgagggaacggcagatatggaatgatttttttgttatttttttaaatgagcttgtgttgacatcaaatttgctacaggaaaaacatataattaatgataaactcttagaatag

SEQ ID NO: 197584 - DNA, 1584 bp, Klebsiella oxytoca
atgaaaaaaataaatcagttgataaccccttctgttgatgcgacagattatacatcaccagataaaaaaatgttttttaaggactcatatcttgctacaagtttttctgagaaagcttgcgatcctaattgctattattttgtcggggagaaagggactggaaaaacagcattagcatttcatatacaaaatgatgagcctaaaaatattaatgcgaagttattgccaatctctgattctcagtacactagattcattaatttaaaatcagcaggaaagttgtcatatactgattatcccatcatatggcgagcaactattctttatcttatctgtaagttgattattcaaaaaagaaagaaatggtatcataaattaacgtataaatttcacaaattggaagcagcaataacatcttatgataaggatgcacatattcctgagcttgagtatgttattgaatttgctacttccttaagtgaaggaggtaaactatctgcaaacataccggaagcattaaaaatagcatttgagtcaagtgaaactaattcaataaaaacaactcagacatcgataaaagcttcattattggaatgtgaaaaaatattgaaagatagtttatttagtttgaaattaaataagcaaattgtattatttttagatggaatagatgctaagccaagcggtattgacttttcggaatatcagaaatgtataactgggttggcagatgcggcttggagtctcaataaggactttttttcaaatatgccaaactcacctcaaaagccaagagtagttctccttttgagaccagatgtttttgattcactaaatttacataattcaaactgtaaactttcagataattcagttgtatttgactggagtacatctaaacaaggctataaaaattcagatctttataaaatgtctgacaaatattttatctcacaaaataatgacaatagtggctgggagagatattttcaagaggaaagacctggcagtaaaaataggtcgtatagacgacttcttcgcatttcatatcaaaggccgcgagatgtattttcagcaataaaaatacttattgatatatataaaaaagatgggagaggctcattaaaccatttttcatggcaagattttatcagccctgaattcactaaagtgtattctcagtatcttttgggagaggtcaaaaattatgctaattactatatatcaaatgcacagtttgatgttttgatttcattttttcaactattagatggcaatagcaattttactgaagaagaatttagagaagctttcaatacatttaaaaataggcacgaaaatgaaatacaagagacatcaagtattacaaatgattatagttcctttttgcagttttggtatgatgtgaatgtaattggttataaggaaagagtggcagaagaaaataataatttctaccattggtcctatcgtgaacgaaatgcactcaatgtcatgccgaaaattaaaaaagggtgcatgtacatgatacatccaggtatagcgaaagctattgatatcggtaagcctactgtccgagaataa

SEQ ID NO: 197585 - DNA, 510 bp, Klebsiella oxytoca
atgataaatacaaatgttattctaaccagagaacaaaaatccgcgattgcagaagcattagacgtatcattagacgatttagaagaacttagaattaaagccagtaataaaaggaaaacttcctttaaggatgatttttccatgatttttaaaactaatatcggcactctggcaaaaatgaagctaacaccaacttcttttcgaataattatttatcttttttcaattattgactatggtaatattcttgttaacttctctcaatcaagagtagcaaaagatttaggactacaaaaatctaatgtttcgagagcattcaaagagttatttgaaaagggaattctaattcgcaatacagaagacgatcatgtttatttgaactctaatttatgcgtgaaagggattcctcataaattcaatgaggagcaaatggatagattcaaaaaatcaaaaatagaaacaccagatcttatgaattcatttaatttttacaaatcaaaaaaaagatag

SEQ ID NO: 197586 - DNA, 2403 bp, Klebsiella oxytoca
atgctaaaaaaattcaaccacattaaaaaaatgggagtgttcgataacttcatttgggatactcaggttttaagtaaaggaggtgcagttcaaagctttgttgatattaatataatatatggtaggaattactcgggaaaaacaacactttcccgcattgtccgtgctttagaaaagggagagatttctaataaatatggcacgccttcatttaatttaaaattttcagataatgttgaagttactaatcttaacttatccacacatgataaaaaaatacgtgtttttaatgaggactttattcgagataacttgcgattcatcagtaatcctgaagagagtattgagtctttcgctatccttggtgacgataataacaaaatagaaatggaaatatcggaattaaattctgaattaggaacaaatgaagaaggaaaagaaacaggtctatatgcaagaaaaaaaacggcaactgcaacctataataatgctttcatgaagcataaaagtgctagcgataacttggataagcagctaacaaataaggctacaggaaaggatattggaataaaatacaaaccagagcgttttggtgaccagaattacactatagtaaagcttaaaaatgaaattgcggaagttaataaaagtagttataagccactaacagaagaacagttgggacaatacgataagttgattacagagcgagtattgccaaatttgcctcaatttaaacctcctactcttaatctcaaatcatttgagatagacgctgagaaactaattacaaaaataatcagtgcgtctgataagattgaggaattagttaaggatgcaatcttaaatagatgggtgaatgaaggtagaacacatcatagagatcaccatgataaatgtgcattttgtgataatatcatttcgcaggaacgatggataaaactagacaaacattttgatgaagagtcagaacaactggaaaaagatattgatgttctgaccaagaaaattgcagaagaaagaaaatcaataaaaacggttttgtcagtcaataaatcgttcttttactctaggtttcataatgaattagatgaattagttttaaatcttgaaattgcgggtaaaaattatgaggtatcgctggatagccttattcagcaacttcatgataggaagaaggatactttaaatgccaaaaaatttgatactcctctcgactctacacctgagttgatcgatgcatgggacaagtatttagatatttgcagtaagaatgatacatttactagttccttgaattctgaaaaaactaaggcgatgaaacttcttagatatagcgaggtttttaattatctaattacgatagattaccaaaatctgaccagttcaatagctgaattgaaaaataagtccgatgaagcaagtagtgaactatcgctcattaccgggatgatttcccaaaagcaatcattgatcattgaaaagaaacgtgagttaaatgatgaggaaaaaggagcaaaaaaagtcaatgaatatttaaataatttttttggtcataagtttctatctcttgaagcccaaaaaggtcagaacgatgatatgaactccactaaaattcgatttgaagtaatgagagatggaaagaaagcttaccatctcagtgaaggtgaatgtagtcttctggcattttgttattttcttgcaaaattggacgatattgaaacacgtgattccaagccaattatttggattgatgatccaatttcctcacttgatggtaatcatatattttttatttatagtttgttaaatgctgggattgtatctactggaatatttaaacagttatttatctcgacccataatttggattttttgaaatatttgaaaaggttgaaagatagctttattgataatgttggcaggaaaattagtttccaaaaatcttactttgttgttataaggagtgaaaaaacgtctaccattcaagttatgccatcgtacttgaaggaatatgttacagaattcaattatctttttcatcaaatatataaatgctctactattgatgtcattgatgatactaattacattacgttctataattttgctaataacgctagaaagttctttgagatatatttgtactataagtaccctgaccagggtatgagcgaatcaacactcaatttattttttggggaagacaaaattccggccattctatctgacagaattaataacgaatactcacatttgtgtggtgtatttgaacgggctgcaacgcctgtggaagtacctgagatgaaaacagcagcatgccaaataatcgaaaagcttaaggaagatgaaggccagtactcagcactgcttaaaagtgttggagagtatatagagcaatag

SEQ ID NO: 197587 - DNA, 726 bp, Klebsiella oxytoca; identical to SEQ ID NO: 77570

SEQ ID NO: 197588 - DNA, 483 bp, Klebsiella oxytoca; identical to SEQ ID NO: 77569

SEQ ID NO: 197589 - DNA, 150 bp, Klebsiella oxytoca; identical to SEQ ID NO: 77566

SEQ ID NO: 197590 - DNA, 222 bp, Klebsiella oxytoca
atgttgatgaaccagagaaatttgaaggatttacagaattttgactttctcgcgaagagttttgcccgcatgcatgcggcaggttaccgcgtagatattaagaagattacaggcaatatgtcagcagagttgcgggtatggtttcttgagcgttacgaacaatactgcaaagaggcactaagcgacagggacgcagacgcaagagaaaccgggattcattaa

SEQ ID NO: 197591 - DNA, 945 bp, Klebsiella oxytoca
atgacgatttccctgcatactcagacctgcgcccctaacaccgcagcggcgaccagcgtatcctcgctggacccgtcaggctcctcaaaaacgaaatttcccagaaccagaacagatatttatcagactgttactgacaacatcattaccgcactggaagccggcgttaagccctgggtgtgtccgtggcagcgtgtggcggggatgtctgggttaccttccaactacgccaccggcgcggcttatagcgggatgaatatcatgttgctgtggtgcagtgcgtcagaacagggattcagtgactcccgctggatgacctggaaacaggctcaggcagagggcgggcaggttcgcaaaggtgagcacggcacgaccgctattttctataccacgctggagaaggaaaacgacgccggagacattgatcacattccgatgctgaaaaccttcaccgtgtttaatgttgaacaaattgacggcctttccctgactactgaggctgtgagtcctgctgagacgtttgacccgttgccgcaggctgaaaatctgtttcgtaacagtggcgcaaccatcatcgagaaaggacaaaacgcctttttcatgccgtcaacggatgaagtctggctaccggaacgccggtttttttccgatgcggccaatttttatgccaccggtctgcatgagctggtgcactggagcggtggcaaaagtcgtctcaaccgtgaaatgaaagggaagtttggcagtgaagggtatgcatttgaagaattatgtgcggaactgggaagcgcgttcctgatggcggatctggggattgtcggagaggttcagcacgaaagttatatcgcttcctggctgaaagcactgaaaaacgacaagcgctatattttcaaagccgccagcgcagcatcaaaagcgcatcgttatctgatggataaggcctga

SEQ ID NO: 197592 - DNA, 1221 bp, Klebsiella oxytoca; identical to SEQ ID NO: 77471

SEQ ID NO: 197593 - DNA, 711 bp, Klebsiella oxytoca; identical to SEQ ID NO: 77480

SEQ ID NO: 197594 - DNA, 234 bp, Klebsiella oxytoca; identical to SEQ ID NO: 77481

SEQ ID NO: 197595 - DNA, 588 bp, Klebsiella oxytoca; identical to SEQ ID NO: 77483

SEQ ID NO: 197596 - DNA, 927 bp, Klebsiella oxytoca; identical to SEQ ID NO: 77485

SEQ ID NO: 197597 - DNA, 243 bp, Klebsiella oxytoca; identical to SEQ ID NO: 77486

SEQ ID NO: 197598 - DNA, 1269 bp, Klebsiella oxytoca; identical to SEQ ID NO: 77487

SEQ ID NO: 197599 - DNA, 324 bp, Klebsiella oxytoca
atgtttcagacaaccgatatggtttttatccctcgttccagcaatctttccctgccgaggaactttaccgaccttgataaagatcgtgctcgtcgcgagggttttgattatgtcgctctttattttgaaaactcgctggatgaacttaaaaatcgtcacgctgggttagagattgatctccatcgtcttgatgcagattctttcacctgtgcggtatatatcaatggcagcaaggttggtcagtgtgccatctggcgtggcaatcaacaccatgggatgggtgatatttgttatagccaggatagcgatcagacgttacagtga

SEQ ID NO: 197600 - DNA, 768 bp, Klebsiella oxytoca
atggtaagttgctccagagccataaccgtcattatggctattttgcctctgaagcggaaaaaaatcacggaggtcgatagcaaaggcaaaatgtgttttgtcataaggccatatgcctcaatttcgcgtatcataacggagtttttaaaccctgaccgtggaaccattatgaccgccaaagaatatctgggtgacatcattggtggcagcctgatgttgcgtgagagcagagtcatcgcggagctgctgataacttcaccaaatgaagctcaatggcatgatgctattgtgaatgacaatgtgctacagaagacctcagtgcacagtgttaaacgcatggcttcaaccctgcgtaaaagacttcaaccgatgggtgagactttctggacggaactactaaaggcccccgatgatgcagccaaacaaatattgctaatggcgacaatgtgccaatccccagtgctgaccgatttcatggcaacgacactgtctgatgcccggcagatgtttcgcgaatcactgcgcagcgaagactggcaggaatttattctatcccgccagcgtgccgttgtcggcttggatcaatattctgaaagctcaatccagaaaatgggcaacaatgtatttaagatcctcgcagatagcgggtatctggaatcaggccgcagtaaaaggctgaaaaatgtctatctacaaccccagataagagaatgggcaagtagtctcgactgccaaaaagtctacgatgtgatggagtccgtcagatga

SEQ ID NO: 197601 - DNA, 615 bp, Klebsiella oxytoca
atgagagcgaaactggatagtaagccgcaattgtcagctcgtctggaacaaatcgaagacaggctaaaaagtgaaggctttctgaaaaaccaagagctcggtggtgagatcggtttttatatctttgattacccacctcagtttgaactaaccgtacgggaatatctgagattgactttgccccgcctgtcccggcaggggctgaattttgttcatctcaatctgttcgaagagatactggcaattttgcaagagcgtaaattgctggataaagcttttgatctggagatcaaaaaaggtaccgatgagttagccaaagcacttaaaggacctcttgaacaaggtcgaattgctaggcatctgatagataaagtgcttccggcctcgcctcagtttgtattgttatcaggtcttggccaatgctggccattgctacgtggtcatagcttgcttaatgcattacatgcccatatgggggcaataccactggtattatgttatccgggcagttacaacggcctcgaactttatccttttgatctggacagcgcagaagtggcaacagccaactactaccgagctttccagctggtgccacacgcatctaagtactga

SEQ ID NO: 197602 - DNA, 3723 bp, Klebsiella oxytoca
atgatagagacggaatttttaatgcagataagagagctgtttaccaaacaactggatcgcccaatcaatggtgtggtgaaagccgaacagctggatgagcaaatcatctggactgagcttgacgagtatgtggtgacacgtgaacttgaccgccaccttcgtcacttttttgagacctacctgcctggtgtcagccatccagatgatcctagtgtggcgggtaaaattgggatctgggtatcgggttatttcggttccggtaaatctcactttataaagatcctctcttatctgctcggtaaccagaaagccgttaacgatggtcaaacaaaagcagccatcgagtttttcaaagagaaaatcagcgatcctcttctttatggtgacatccatgctgcagttaaccgcaatactgaagtaatcctctttaatatcgacagccgcgcagatactgaagacaaagaagatgccattctcaaagttttcttgcgcgtcttcaatgagcgcctaggatattgcgctgatcatcctcatattgcacatctggaacgtgagttagattcccgtggccaatacgagccattcaaagcaaaattcgctgaactcacgggctcaagctgggaagaacagcgtgatgcctatggtttctgtcgtgatgaaatggcaaaagcctgggcctatgctaccggccagtcagatgcctcatcagtgcagagtatggaaaatctcgaatccatgtttactctcgacattgccaacttctgtaaatgggtgcgggagtatctcgatcgcagcgatccatctggcgacagtaaacgcatggtctttctggtggatgaggtcggacagtttatcggcaacaacacccagatgatgctcaaactgcagacgataacagaaaatatcggtaccgcctgtgggggcagagcctgggtgatcgtcacctcccaagaagatatcgatgccgtactaggcgatcttagcgctaaaaaaggccaggacttctccaagatccaaggacgttttcacacaaggatttccctctcctcgtccaataccaatgaggtgatacagaaacgtctactcgagaaaagcgaagaagccaaaaactgcctagccgaattgtttagtcaaaaaggcgacatccttcgcaaccaattgacctttgataccagcactacagctgagcttgctaactacagtgataatgtcgagtttgttgatcactacccttttattccctatcaatatctgctggtacaaaaggtcttcgaagcgatccgcaaagtaggggctaccggtaaacatctctcccgtggtgaacgttctctgctggatgcattccagaatgccgcacgccagcagatgaacaaagagatcggtgtattggtgcctttccatgccttttatccggcaatcgaatccttcctcgataccaacgttaaacgaatcttcgaacaagcggctgagaaagcaagcctcgatccttacgacattaatattcttaaatcgctgtttttgatccgctatgtcgatctggtcaaatccactattgataatctggtcacactctctattgaagaaatagataccgataaagtggcactgaaaagccgaatcgaggccagtctacagcgtcttgaaaaccagctattgattgtcagaaatggcgatgaatacgtattcctgactaacgaagaaaaagaagtcgagcaggagatcaagcacactcagattgaagcaactgaagagaaccgccagttggcccggttggtgtttgaagaggtaatgggcaatcgccgtcagtatcgctacccggtaaataagcaggattaccctctgactcgcttttgtaacggccattcaatagacggcagccaacaaacagatctggttctcaaagtcatttccccactggatgccaattttgacagttataacgaacaatcctacaaggcactgagccaggaaggaaatggttgtattctggtacgcctgtcgagtgagaagcggatctgggctgaatttgatacgtggttgaaaaccgagaaattcctggcagggatacggggtaaacgacctgagcaagagaaattgctggcggaaaaagcactcgaaaacacccagcgtcgcagccgcctgaaattactatttgatgatctggtgaaacaagcacagatattcgcactcggtaatgagctgctaagtaaatcagctagtgtcagcaatatgcttgatgaagcttgtgcctacgtaatcgaaaactcattccaaaagctatctttactacaaagctgtggtaataacccggtgcaagagctgaagtccgtgatcatggccgatgacatggcacagctaaatgttaatctcggtggacaagaccccaatgctgctgccaaaaaggagattgaactcttcttaaatgtcgcagatgaaaaaaatcagccggtctaccttaaagagttgttagagcgattcagtgctcgtcctttcggctggaaccgtgacgaagtaatgctacaagtaactcatctggtcttgtttggtaaggctgcgctatctacaccgaatggtgatttgcccctcaaacgcagttacgaacattttatctctgtacgtagccacagcacactacgtattcgccgagtacgtcagcattccgaacaacaagtcgccaaagcggctaaactggcgaaagatatttttaataaacctttcgaaagcagcgaaaaagagttggcgaataagcttcttgacgtactaggcgagtggcagcggttaattaaagaatttgattttaaagctaaagatgggaattgtcctggcaaaagcaccttgcttaccggcagtcgattgatcgccagcctgcttgagctgggtaacaacagttatgccctgatcgatggattctgccagcaaagcaaagaatggcaggattttgccgaagattttgaagaagtcgaggagtttttcactcgtcagtttgatatctggcaacagttgcgtcgcgccctcaatgatcaattcaaatccaatcgccatgcactagagcaaaacccagaagcagctaaagcattagcagcactgcaggctatctacgatgataaatccccgtacaacaaacttcgccaggtgggatcgttaattgatcaactcatcgccattaacctgcaactggtggaacagaaacgtaccgcagctttggagacgatcaatgcgacccagcaaggtattgcaccgctggttgcagacttaccagctgagttacaaaaccaggcaatgcgtccctttaacctgttaaaagaacgggtcagtaacagcttatccttgcatgaaattgttagcctgcaacaagaggctgatgatgaagaagataaggtcttagaactgatcaaccgctacagcgccgaacttcaagctcgtctggaagcggagcaagccacagcccggaaaaaagcggctgaaccgcctaatagcgatgtgggtactttacgcgaaccagaaccatcaggctcatcaactaccgctgcgaataactctgctgcgacagtggtcaaccacaaaccaataccaaaacctattgaactggtttcacccgctgaattgctcggtgccagccacatctttatagaaacggagcaagatatcgacacctatctcgcgacccttcgcagccgtttgcaacaggcaataggtcaaggtaaacgagtgcgaatcaaatga

SEQ ID NO: 197603 - DNA, 1755 bp, Klebsiella oxytoca
atgtaccaaaccggtggcaccatcgaaacgctgctgaacaaagttgaacagcatgaatatattttgcctgcaatccagagagaatttgtctggcggccagatcaaatctgccagctgtttgactctctactacaaggctacccgtttggtaccttcctgttttggaaaattaaaactgagaatctgcgtcagtatcaattttatgattttatgcgtgactaccaccagcgtgatcaagtccactgtaaaaaactagagattatcggtgaaaatgatcgcatcgcggtacttgatggccagcagcgaatgactgcactaaacatcgggttgcgtggttcctatagttggaaaactcagggtaaatggtggtccagttcagacgcctttatcgaacgtcgtctctatctcaacctttttgaatgcacagaccctgacagcggaactcgttatgagttcgagttcttaagtgaggatgaggcaagccacaacgatgaccaacaccactggtttttagtctcccgtattctcggtatgaatgcctatgacgtaatgatgtcagtcatggaaatgaaaatgcctgatgaacgcaaatcagcagcaggtaaagtgatttcccgttttcatgacatcattcacaataaacctttgatcagttactacctggaagaaggtcaggagctatccaaagtactcaatatctttatccgtatgaatagtggcggaacaacactctcctattcagatctactgctctccatcgccgtaacgcaatggagcacgctggatgcgcgtgatgagattcacaagctagtagatgaaatgaaccaaacaggtaatggcttttcctttagcaaggacctggtgctcaaagcaggcttgatgctgagtgatatcggcagcgttgggtttaaagtcgagaactttagcaaagagaacatgtgcaagctggaagataattgggaacgcatccggaaagctttacttcttgcagtcaatctactcagcagtttcggcttcaacagttacaacctgggagcagacagttccctacttcccatagcctattacctctaccatcgagatctggataacagctacctatcccgtagcgagtatgctgctgataggcaggggctcagaggttggctcattcgctctatcctcaaacaatccggtatctggggaagtggtcttgatacgcttctgactagcttgcgaaacaagatcaaggaacatggtcagcaagagtttcctttgctagaaatgtccattgcgatgacagaacgcggcaagagtttacgctttgaagaagaagagctacagtctttggttgaactcgactatggtaaccgccgcacttttgccttgttatctctgctctttccgggacatgacttctcccaccacttccatgttgatcacatattccctagagcccgctttaccaaaagccaactgaaaaagatagggatgaccgatgaaacacagattgaagagtggatgatcatggctaaccggctgcctaacctacagttgttagaagggggccagaacaatgaaaaacgtgagaagttaccgcatgaatggtacgaggtgatgtggccggagccaactgcccgtgctaatcatcttcacttacaggcaatcgactcacttccagagaatttggttggatttgaggggttctattatcagcgtcgtgaaataatattggcacggttgcgtcacattctgagagaacctcttacgacataa

SEQ ID NO: 197604 - DNA, 1950 bp, Klebsiella oxytoca
atgaacactgccaatctagaaaaaatagcccctcgggctcgtaaagcatttatcacagctatcaaagcacgtgcagcagaatttggtatcactaccaaaggccatgtagagccagtaattagcggtgaagtgctgcaagtcgctggatttactcatccagccagttgtgcctctgcccttaagcgcctgcagcaaaggcttgcaaacgatagttatgagaccctaatagagcatatggcatacacttggtttaaccgattctgtgccatccgctttatggaactgaaaagcgaagagggatatttagaacacggtgtgcgtctgctatcacacccgtctcagccactaggctttgaggtattggatcgtgcccctgaggtgatcgattccctgataacagaaggtgtggctttagataagcccgctctgctggacctgctactggcaggtaatgagcaggagactctctttcgtgagctgcttctgggtcagtgccaccgactgcatcaggcaatgccctttttgtttgaagccattgatgatgaaacagaactcctgttacctacaggccttacccgcaccgatgccttctggcgcgaactggtagatgaaattccagaacctgactggcagcaagtagaggtaatcggctggctatatcagttctatatctcggatgaaaaaaagagagttgataaaaaagttaaaacgggaaaaaccgttgatagttcagaaattccagctaaaactcaactgtttactcctaactggatcgtacaatatctggtgcaaaactctgtagggcgtcactggctgcaaacctatcctgagtccacactcaaaagcgcgatgccctactatatcgaccaaggcgaacaggcttccgaggttgtggcgcaactggctgaacttacaaccgccagcatcgaacctgaatcgatacgcgtactcgatccagcctgtggatccggccatattctggtggaagcctataatgtcctctatcgaatttatgaagatcgcggttatcggagccgcgagatcccagagctaatacttaagaataatctctttggactcgatatcgacgaccgcgctgcacagctagcgggttttgctttgttaatgcgtgcccgtcaggatgatcgtcgtctgttttctcgtaacaatggttgtggtattgaattaaatgtttactcactacaggaaagtcgacacctcaacattcagaaactctggcaagcacttaatctcaatactgatgcgcaacatggccagactcaagacctacttacaatagctcaagctacagatgacccccgcctgacgcttctaaaagatctgtatcaatgctttcttaatgccaaaacactgggttccttaattagtatatctactgagcaagcctcagctattgaggagctctataccacgattaaggaactcagcaagaatggcgataatatgcaacgacctgaatctaagaaactattgccgctgctagcacaagctcgactactagctaaacgctatgatgcggtgatcgcgaatccaccgtacatgggtagtaaggggatgaatgcggatctgaaagagttcgctaagaagcagttccctaatagcaagtcagatctgtttgccatttttatcgagcgaaatctggatttaaccaaagagtcaggtgtggtagcgatgatcaccatgcaaagctggatgttcctctcttcatacgagtcattgcgtacccgaattttgaatcaacacactatcctgagtatgacccatcttggggcaagaggatttgatagtattggtggagaagtcgtctcaactactgcattcgtattagggaattttcacctttcaagctatcagggcacttatctccgtttagtggatggaaactctgaagcagaaaaagcagccatgtttaaagcagctattgcttaa

SEQ ID NO: 197605 - DNA, 513 bp, Klebsiella oxytoca
atggaaactctgaagcagaaaaagcagccatgtttaaagcagctattgcttaaagaaatagggcttaagcagataatgtcaaactctaaccttcacaaattgactcgcgccgagttagccgatatctatgaaaaattggtgctctattacgagcagcaccaagggctaacatctgaacagttatcaacccaggttaaaggatataccgacacgtttaatgcattggtggaatccgctgcacttgatatccatgcctacatcatccaatgtaataatcgcctttatggagatagccgtattcgcgcaccttacaaagaacgctaccaacgcgacttaatgcgcgtgaaaggtgggaatcatgattactgcatcaccggtgaaattgatataacggccttacgccagttccagtccagccaccgttcaccaggaaaaccctttaagcccgttccggatggatttgctcaggatatggcttatagcagaaaagcattaccgaaaggagactcataa

SEQ ID NO: 197606 - DNA, 1782 bp, Klebsiella oxytoca
atgagccagaaagaaaataacaatatggacaaacacttttatcgagcttccgctgcggatttcaataaaattccggggagtcccattgcttactggccaagccagagattaagagattgcttttctgaccacaaaagtcttgctgaggtcgcgaaaccacggcaaggattggccacaacagataacgagcgcttcctaaaattttggtttgagtgttcggagcaaaacacagctttccctcattcatcacaaaccgacgttaaatggtatccatgccagaaaggtggcgggtttagaaaatggttcgggaataatgaatatgtagtgaactggaagaataatggcgaggagataaaacaaatcgtcaaagcaaggtatggcagcgcatcaaaacgcgttgtcaatgagcatttatacttccacgaaggtataacttggtcctccctctcaagtgcggctctttcaatgagatatgtaccatcgggatttatttttgagacgaaaggatcaatgtgtttcttcgatgaaaaagaaaatctcttgcaaacactaggattctgcaactcatgcattgtaaatccactgctgcaatgtattagcccaactcttgattttcacgaagggcctgtaggtactcttccaatcagtaataacattaattttcgtgctgtggaaatagttaacaaagcgatcgaactcgcaaaaagtgattgggattcctacgaaatctcatgggacttcaccggactgccattgctgtattccgactaccgacagccaacaataagtgccagctacaagaacattagaacacactggggcaacctgacgcaggaaatgcagaacctcgaagaagaaaacaaccaccattttattgatgcttatagcctgcatgatgaacttactactgaagtacccctaaaggaaatcacactcacctgcaatccgcactatcggtacggtggtattctcactgaccaagagcgtgagaagcgtttgcaaaacgacacaatagcggagatgatttcctataccattggctgcatgatgggtcgtttttcccttgaccgtgaaggattagtttatgctcacgccggtaacgaagactttaaaacgctagtagaagaaggcgcttacatccgtttcccagctgatggcgatggtattctgccactaacctcaaaggcttggtttgaagatgatattgccgctcgggttgaagcgtttgtccacactgtctggggtggtgagcatctggaagagaacctgcaatttattgccgacagcctgtgcctagcagcgatcaaaccggtgaaaaaaggaggtgaaacctcccgtgagactattcgccgctatctctcgactcagttcttcaaagatcacttgaaaacctacaaaaaacgcccgatttactggctattcagttctggtaaagagaaagcttttgaatgtctggtctatttgcatcgctacaatgaaacaactctcccgcgcatgcgcaccgagtatgtcacacctctgctcggccaaatagatagccgtattgagcgcctgcgtctgcaacagaatgaagcagaaacagccgaagccaaacgcatcggtaaagagatcgatagccttaccaaacagcttaccgagctgcgttcttttgacgaccagctcaaacactatgctgatatgaagatcaagctcgatctcgacgatggtgttaagatcaactatggcaagttcggtactttattagctgaagtgaaagttattactggcgataaagccgagtaa

SEQ ID NO: 197607 - DNA, 2604 bp, Klebsiella oxytoca
atggatatcactcagcttcaaaccgggcttaacaacaaattcaccgcagaccggattgttttctggcacgacccagaacagagctttactgtacagcttacagagctcgtcttactgtggaacgggttgccagtaactgtgctcaatatggcagagcagtcacagcttcagactcgcaaacgcattgaaatcgatgaacctacgcaggggttccttctctactggcccagctcagaaccatcaccagccaaagactggttgctcgatatacgtcgttatagcaccacgttttatgctgatccagcctcaattctgcttaatgatctcggcctcgccaatatggcgctgcgcgaccacattgcgtcgcgtaaaagctttttcgccaacaaagagcgtactgcagcctttaaacgtcgtctggacggccgtggtggcatagaagatccgctatcacttgatatgaagatgataagtgtcgtgctggcctgccatgctcagattgccgaaataatgaaaaacattggcgaccggttacttgagaatgctgaaaccgctcttgatccgttagaacagcatggattgctgcctggattttggcatttaatgacccgtgaatatggataccatattgcagaaggggcagaaccatcactacgcgaactgattcgtaagttactggtgagtgaatgctacgaacagcttgataccaaagagcgccctgtctggctacagtcacaactattagccactcccaccggacgtgcgaatgctatggctctgctatctggttggcgtgattctaaccagtacagcagcaattttgccgacatctctgcacaggtagcggatcagctcgaacttgcttcgcgcctgacagcgcaagatatctggctctggggagaagtcgaaggctttgaagcggtcgagcaaggtttgatccgtgagctgatatctggattaaacaacggtgacctgagcctgaatcgagtagagtttgcccaactaatctctcgtcgtcgacatggattctgggccagaactgtacctaaatatgcatatatttaccaggcgctgcaacaagccgaattgttgctagaactgcgccgttcgaaaccggatggttttcattactcttcagcgcaagaaatgtatcttgcctatgaagctgaattgttccagtttgatgcagcctatcgcctgtttaatgaagcactattgcatttgcaaggacagtcggtagaagtgctggcagtactggccagtaaaatcgaagatctgtatgtgaactggtatctataccaactgggactgacatgggatggcttgctagataaagagcagttgcttgataactggcaacttggcctcccttctcagcatcgcttctatgatacggtcatcaaacaacgctttgcccaaagcggcgtcaagcgccagtttgttattatcagtgatgccttacgctatgaagttgctcatgagctccagggacagataaatgaagccaagcgcttctctgcgcagctcaagagtcagctcggcgtactaccgagctacacgcaacttggcatggccgccttactcccacatcagcaacttgactatgccgctaccaactcaacagtattagtggatggacagagcagctctggtttagaaaatcgcagcactattctaagtaaggtaggtggtatagcgatttcagccaaaagtctgcttagctggacccgggcagaagctaacgaggcggttggtgacgctaaggtaatctatgtctatcacgatgtcattgatgctcagagtgaatctcagaaaagtgagcttaaaacattcattcatgcccgccaggctatagatgaactgaatggactcatcaataaaattatcaatgggtttggcgttactcgcgtagtcatcacagccgatcatggattcttattccaacaggcctcagttgaaaatggggtaaaatcgcctctgaaacacgagccatctggaactctggaagcttcaaaacgctatctccttggtcgcaatttaccaacaaacgaagatgtctggcatgggcaattgcgtaatattgttggtggtaactctgatgtggaattctggcttccgaaaggagtgagccgtttcaattttgttggtggagcccgcttcgtccatggtggtgcaatgttgcaagaggtctgtgttccaatacttgaagtacaagagctgcgtggcaagaaacaaactctgcataaaaaaaccaaagtcgacatagttccggcataccaacccattaagctggtaaatgttatcgataaaatccgcttcctgcagaccgatgccgtggatgaacgtcataaatcaagaatggttcgtttctcggtggtagatagttcagaacaaatcgtgtcagctattgagaagctactttttgaagcgacatctagtaatctggatcagcgccagcaagacgtgcgcttaaaactgaccggtgcgcaatttgaccgcaaggtacagtatcaattgctgctcgttgatgatgaggatggtattgaaatggcacgctatccagtcactattgatttggcaattcaggatgaattcggtttttaa

SEQ ID NO: 197608 - DNA, 1794 bp, Klebsiella oxytoca
atgccacatgatgagataaatcctactgaaggtgagtttgtaggaaaggaaaccgcacaagagccagcggtgaatgtcacacatatcacgaataatgtagtgatccagcaggtggacgtttacacggaaaagcttgcccagcagagcggttctaatgttgatgaggcttctatgctcagcattgacaatgagttatctcagcaagccagcatggatcttgatgcccgtctaaatcgttactttaagggtaaagttgttcgtaaggatttgaccaaacagctaaaagaaggggctaatgtccctgtctatgtactggaatatctgctcggtatgtactgtgcttcagatgatgatgaagtggtacgcgaaggtctggaaaacgtcaaaaaaatcctcgctgagaactatgttcgcccggatgaggctgagaaagtaaaatcgctgattcgtgagcgtggcagctttaaagtgatcgataagatcggagtaaagctcaaccagaagaaagatgtctacgaggctcagctttcgaacctcggtatcaaagatgccgtgatccccgccagcattgttaaagctaacgagaagctgctcaccggggggatctggtgcatcgttactcttaactatttttatgaagaagggcaaagaatttcgcccttctcaattttcaaccttaagccgatccagatgccctccatggatatggaagagctttttgccgcccgggctaatttctcaacagaccaatggctggataccctgatccgctctatcggcatggagccaaccaatctgaagcaacgggtgaaatggcacctgttgacgcggatgatcccctttgttgagaacaactataacgtctgcgaactaggcccacgtggtaccggtaaaagtcacgtctataaagagtgctcgcctaattcattgctggtctctggtggccagacaacagtcgctaatctattttacaacatgagttcccggcaggttgggctggtaggcatgtgggatgtggtagcttttgacgaagtggctggtattaccttcaaggataaagatggtgtccaaatcatgaaggattacatggcatcaggctctttttcccgtggccgtgattctatcgaagccaaagcatccatggtatttgtcggcaacataaaccaaagcgtagaaacgttagtcaaaacaagtcatctgctggcacctttcccggaagcgatgatcgatacagccttctttgaccgtttccatgcatatattccaggctgggatatccctaagatgcggcctgaattttttaccaataactacggtctgatcaccgactatctggccgaatatatgcgagaaatgcgtaagcgtagcttctctgatgctatcgaccgcttctttaaactcgggaacaacctcaaccaacgtgatgtaatcgcagttcgccgcactgtctcaggtttgctcaaattgctgtatcctcatggtgtgtttggtaaagaagcggtacgtccttgcctcacctacgcattggagctacgtcgtagaatcaaagagcagttgaaaaaactaggcggcatggagtttttcgatgtgcatttcagctatctagacagcgaaactctggaagagtttttcgtcaatgtacctgagcaaggggggagccagttgctccccgaaggtaagggtaaaccgggagttgtgcatatggttaccaagggtgttactggccaactgggcctgtatcgcttcgagactcagatgacacccggtaatggtaaacactcgacatccggctga

SEQ ID NO: 197609 - DNA, 321 bp, Klebsiella oxytoca
atggtgcatcactggcgattacggcagaacctgctgggacaggccgtcacggagctgaatttccagtcaccggaaacggtcatcagctggtaccgccggtgggccggtgagtttgacgcgcgtgagcttgcccctgccttctggcactggcgatcgcgatatgcctcgctggcctctctggactggctgcgggatgccggggagccgctgtatggtgtcatgcatgaaatcagcttcattgtgagagagacgccggagtctgtgcgtcaggcagaacgctggcaggtcccgaacaagctgacacaccggagccacggatga

SEQ ID NO: 197610 - DNA, 822 bp, Klebsiella oxytoca
atgtcacaagacgctttttttcaggagcaaagtgaagttcagccaaagcttaatcctcccatatatcgctggcaggaggatatgccagagaataaccagcctcagctagtgcctccccagctgatttggttaaatacgaaaaatagtatctggatggaagttccacgctacgaaggggttgtctggggggggatgattttgggtgccattatgacattggctattattgttttcatgacggttctaggatggttaattgagcaggagcttaatggggagggaattttaattatttatgcttttggtgatttctttctcattacgctgatgtccatgtttttaaaaatttatttttttgaaccccgagatcagcctatacgactgaacaagcaacgacaggcgatttatactttcaattataaaagaaaatggtggaatccctgggccagatggccagccactgtcaaagcctatcactggcccgatattcacggcgagatgcggttttccagcgaccgctataccgggggttttcagctgtttgcttccgtctgtcagccaggaacgctgaacgtgacggaacgcttccagattgccagcggctcgcctgctcagctgcagcagctctggagctatctgtgcctgtatatgaaaggtgagcccgtgccggatgaggcggtgaataaaggccgccctgatttctggtgtccgcgtaaagcggataaatggcctgcagaaatggaacgtgaatccactactgcgccggacagtgaactttctgctctccgcgcctgtagcgaactatctgataagacgagttaa

SEQ ID NO: 197611 - DNA, 492 bp, Klebsiella oxytoca; identical to SEQ ID NO: 179607

SEQ ID NO: 197612 - DNA, 639 bp, Klebsiella oxytoca
atgaaaaggtttttatacatcctgggagcgggtctctgtgtcctggttgttttgttggcgctgttgtttattctggcccagacaactcatcttttttttgaatggacggaggaacgcgtattctggatttcgctgttgggtgcggtttttctgaccagtctgttgagcgtgctgattttttttcttatccctttccaaaaaaacgacaccccgctgactccgcagtacagtcgcccggcaggcgagggggctggtacacaggaacgggatatctccctttcttcgctaaaaaagcacctccgccgtcgctacaaccttttctggcgcagtaaggtccgcctgctgctggtctgtggcgaacccgaacatatcgccgccatcgcccccggccttgccgaaaaacagtggcttgaaggcctccgcacggtgctgatttacggcggcagcctgtcatcggcgccggataccgggcgcctgaccgccctgcgtaagctgcgccgcagccgtccgctggacggcatcgtgctggcgctggatgagagacagaccaccgccggtacgctggacaaccatcttcgcaccctggagcaggtcgggggggcctgcgctggcagccgccggtgtacctgtggcaggtga

SEQ ID NO: 197613 - DNA, 768 bp, Klebsiella oxytoca
atgacccttgaaattgtaccgggcagcctgaccagccctgacccttccattaaaaactatgccccctacgctcccgctattggcgtgaccggttataccgaccgctggcgtccggcgctggattttgcagtcagcgcagtcggtgatgcagtcaccacgtatcccagcccattgatgccggacaacatcctcgtaggtgacacaaccaatcatcctgtgattgtcgaacaatccggtattcgtatggtcgactgcgcgacacctggcgcactggcggcactgacagacattaaccggaaattcggtgatgtcagtttgctggcggtatggtatgaagtacacggctccgcatcccactccattctgaccatcggaggattgcggttcagccgtgcaagtgccagttggggtctgtccaaaatgtccggtgctgcggggagcacgctgagcatctccaacgatccggctgccggaggcgtggctatttccgcgcgtcgttatgccgctattctgaccataccgactgatggtgctgctgctgtaactatgcaactgatcggcgcaggaacggcagccgtaacgaaatcgggtgtggtgacgcgaggtggttcaatggatgaacagcggcgtctgcgtttcggtaaggattcgggcggctcggcgaataccggcccgcagtttgccgaaatggttatttgggaacgcctgctgactatggaagaaatctcggccgctgctcactatgcctcagacaaatacagtctttga

SEQ ID NO: 197614 - DNA, 1971 bp, Klebsiella oxytoca
atgtctgatttaacccccccgctgggtactgcaggatttagcgttcttaaagagaacgtagaaaatttagatatcgctttaaataccgacggtgaaagttggctcgatcgaggaaagcgagtcaacatttcgtggaaggggcttttaaataagaatgctgaggccctcaaagtaacccaggacagtatcacaattcttggactgccgtttaccactctggacgaagctcaggccgcggcagatgaccgaaaaattcctgttggggcggtaacatgggtacgaaatgctggtgatgcttcgctggcggacgagtacatcaacaacggcggtacgctggaggctaccgggcggaaaatgccttctgataaaaatcttgttaaaacaaccgatgagtttaccgacggagtaacttacgcctggggaaaggttatggagaatggagacgttctgccagggaccttgcaggcaatggatggcctacctgctgatgaaaacgtcgcggcatacgctgccaaaggcgtggcggtctatcagcttaatcccgcagatattccggcaggtcacgcgattgtcaaagacggggtggttttgctggaagccgaccagtcagggcggattaattacctcccaccgctcaatcgtcgcgcccggcaatcggtgaatcaacggcctgaaatggtcctcacgccgctacccgcatcagtacgcgcggcagtagagccactcgccgagcgtgcctgtaaatacatgctttcaacgtgggtgccgacatgggttcccctggctggcggaaccggactgccgacgagcggttcaacgatggacagcatagagcaatacccgctgatgctggccggggtcgttcactggataagctggtgtgatgcgggttatgccacgtgggatgaaacgtttattggcgtcagttacaacaccgctgtttcatggattgtgcaggggctggatttggtggtcagtgcgcacctggcgaacggtggttggtggggaggcccgccgccgccgtggagcgaagcttctgaggatgttgcggtgacgttcggttcacaggcggcagagctggcgcgtaacgtggccagccactgcgacctgatgggcgcacacctgacggcagcccagaaaacaaaagtcaccgcaatggtggtgcatgaggctaatcgctttgtgaaatacacgcccaaataccgctggacgcgcccggatatccgggggcaggtgacggataactacccgacaggtgattccaaatcagaagaaattgcctggaatctggctattctcgcccgcgcactgattctggccccggataacgccaacggtgaacgatgggcagagcggctgattaccatgcagattgcggcgctgggtgacagaaacgacctgtccgagacgatgacgattaacgggctggctccctgcgatgtgctgaacgggacaaacgttaacccgacccgcctcgttgaaaaccacggtgttgctgacggacaggacgtgtcccgctggtacacgatggcttcactgtccggcagtgaatggatgctgcgtacctttctgctggccgggaagccagtgccatcagcagcactctggcatatggctgacaccctgcgggcgctggcttacaacccggatggttcggtatggagtatggactggagggagcctgtcggcgaactgtcctatgcaccggcgattgcctacatgtttgccgagccgcgtcaggactatatcgatacgctgttgcaccgcctggcgatttttgccgggcagcaggacgacactaccggggcgctgcccgccggggcgtttaactggccagtctatggttcttcccagcccggcgaattcctgagttacatccgtatgtctgaccgcatgcaaaacccgctgacctgtccgcgtgccaccaatgcgcattacaccagccttgccgctatttaccggagcgtttaa

SEQ ID NO: 197615 - DNA, 579 bp, Klebsiella oxytoca
atggcttttgaaatgtctgacaaacttaaggtagtaactgtttatcatatcagtggcgatacgggggagctggtgggcgttgaagaaatgtcgatcccgcctcacactggcttacctgccagtagcactcaaagttcaccacccgaaacagccacaggagaagcggctgttttcaatattgctgcgggcttgtggtctattttcgaggaccatcgcggaaaaatcgtatacagcatcgtatctggagaacccgttgagatttcagagctaggtgccctgccggatgatgtgacggcaatagctcctgctgacagctaccaaaaatggaatggcgatggttggattagtgacccggaagctaaacaccaagccgatgttaatttagcaagtgaattgctgactaagttgatgcgggaggcaaacgaaaaaatagctcctctaaacgacgctgtagaaattggcatccagactgacgaagaagttacacagttggctgagtggaaaaaataccgtgttgctttgagccgcattgatacagctaccgcacccgatatcgcctggcctgaaattcccgtctaa

SEQ ID NO: 197616 - DNA, 723 bp, Klebsiella oxytoca
atgctaaaaattagtgatgtagaatctacggctcttgatggcctttttactgatggaaaaatatccggtggcattcctcccacaaggctggttgctgcatggtttaatgcaattcaaacagaacttgtcaatgttgttgaggggtttggtcttacactgaacccggatgattcgactcagattttacaggtattaaaaacaacatctttcgcaagcgtgcctacgggtagtcctatcccctggccatctgacactttgcctgccacgggaactttcgcatttatgcaaggacaggcatttagtctgacagcatacccgttacttgctgcggtatacccatcgggcgtaatccctgatatgcggggatggaccatcaaaggtaagccttcatccggtagaacggtgctttcgcaagagttggacggggttaaatctcactcgcatacagcatctgtatcttcaaccgatctcggatcaaaaacgacaagtagtgacggcgatcatgctcacacatgggggggcgcgatgcagaagcagggcggtagcgaccaggacgtcggtagcaatagcgctaataactttggtactacttccacaacaggcgctcacacgcacacagtagcgcttggtgcgcacacacacaccattactgttgatgctgcaggtaatacagaaaacaccgtcaaaaacatcgcatttaactacatcgtgaggctcgcataa

SEQ ID NO: 197617 - DNA, 288 bp, Klebsiella oxytoca
atggcaaaatttagtgttcgtgtcgaattgagaaattctcaggatgctgattacgatgagcttcaccaaaaaatggaggcccaaggtttttcccgaacggttgcaatgacgacgagtgatagcgttctcatactacctaatgccgaatatagctatgaaagcgagacaaaagataaagctgctgtcggtgagttagctgaatcaattgcagaaaaaatacgcaagaatcccaaaatcatggtgactaaatcaggtggccgctggttcgctaatcttgatgatgcttaa

SEQ ID NO: 197618 - DNA, 144 bp, Klebsiella oxytoca
atggatgaaaaagaatttaaaaatgttatcgcgctgctgcttgaggatgtaaagcgtcttcaggagttagagccaaatgcaggcactgaagcccgcatttggttagcaaataacgcccttgattcaggtgatcatgagggttaa

SEQ ID NO: 197619 - DNA, 222 bp, Klebsiella oxytoca
atgcacagcagactgttagccatatgcctgatgacgatgttgatcgggagctgcgcgaaaactttacccgtcccggcagtcgttgataccgcctgcaactgggtgcggattatctatctgacagaccatgatattgacgttctcgaccgtcagacgaagcgcgacattctggctcataacaaatcagtgctggcgaactgcccgcaaggtataagcaaatga

SEQ ID NO: 197620 - DNA, 951 bp, Klebsiella oxytoca
atgactgaccttagtacattagagcttcatttctcgggccatgaaacgtttccactacgaaacatgtggctgaaacgtgtctgcgatcaggcagatcaggatgggagaattgccaaatccgttttcaccgatgaagaagcaatagtacggtttggtgttggtaagaacatggtgtcttcaatgaagcattgggcacttgctaccgggatgatacttgatgaaaactcatcaaaatattatcgtctgtcatctttagcaaaaaaaatcttcgctgtggatggtttggaccccttttctgaaaatattgctacgacctggttgttgcattggcagctagccggcacttctaaattagaaacgagttttaaaaccagaagtacgacatgggtattgctattcaatacatttataactgctgatttttcaaacaaagatttgttaaataatatatataaatttatagctaacaatgcacgaaagaaaatatctgaaaatagcttacagcgtgatattgatgtctgtttaagaagttatatttcgttacctaaaaataataattctgatgatatttctgagccggttcttgcagaattagccttaataaggcccactacatctggaaaactaggtttccagcgtggtacgaggagtacattacccgatggaatttttgattattgtttgattatcttttggcaatcactctcaaaggatctgaatgctttatcgctgtatgatatttgtcatgcaaaaggttctttaggtttagtgttcaagatggatgaagatgcaatagctgagagattaattggaattggagaaagaactggtgatttattgatttgggcaagtacttccgggatacatcaagtaatgaaaaagcaaggcctgggaggtgatgagtttactaaattggcagtttcaagattagagagtagctataatgaataa

SEQ ID NO: 197621 - DNA, 504 bp, Klebsiella oxytoca
atgaataatgaaaataaaatggggaataaagttgagatctcccttcaatatcagaagtctattcgtattgattctgattttctgaaagaggaagcctttgagggttatatttttcatgaaacagctaatcaaattatagctaacttggcaaatcaaaaacttttaaataaccagggggcgtttacctttacaggaccatatggtagtggaaaatcatccttggcattggcttttagttcagctatttgtagggcagtacatataagagagcatgtaaaaaataaaattaaacctgagttaaaagagcttatagaatctgcatttcctataaaatctcagggatggcgtgttttgccaatagttggtaaaaaaaacaactatattgaagagattattaattcaattaataataatttttcttgggaagaaaaattaccaaatgacttaactcctccagagttagtgatcttgaccctccatctccgaacagcttttgtatcttaa

SEQ ID NO: 197622 - DNA, 726 bp, Klebsiella oxytoca
atggagatatcggccattctcgccgagtacatagacgacgataagataaggcgtgctaaggggcttcgtgagtcatggatcgacctgtatagagaggcgcaatacgacggcaaagttccgcatggctgcaaccctgcagaagccacccgtaagcccattgctaaggttaagcgccggcgtctttcattggatgaatggaggcagatctatgatatggccgatgcccattatattaagtctgcgatgctgctggcgttaatcaccggtcagcgacctggcgatatcgtcaacatgaaattcaccgatattaaagacgatcttctatacataaaacagagcaaaaccggtgcaaaaatcgcaataccattagagttaagatgcgtggaaattgacatgaatttgcgtgaagctgtcgccatctgcagggacagggtgttaagcaagtaccttatccatcacacaaaaacggtggctaaaatcaaggctggtgaccctgtaactgttcatagtctcggtcgaaagttcgccaaggctagagacttggccgggatagccgcagatgacgaacgcgaattaccgacattctatgagcagcgatctctttccgggcgtctctataaggcccatggtctggatgttcaaatgttgtggggtcacaaaactgagaaaatgtcggagctgtatctggatgatcgcgccgacaattggcaggtaatttctctatga

SEQ ID NO: 197623 - DNA, 351 bp, Klebsiella oxytoca
atggatgagcgccaatacgagcgctgtgaggaaatgtttgatttggttcaataccaggcccagcaacaagcccagcttcaacagcaggagcaggctcaggagaaagcgcaggagctagagcgccacaggatgatacaggagaaactgagctccccggaaatgcagaaggagctaagatccgattcactgaaagacctggttagctgcgccaaaggtgagaggggagaaaagctaccgcctgatgttttgagtatggtggagggtatgtgtaaaggagagattgataggagggtggattcagggaaagtaagccgggccaaggtggataaaatgattagccaaggaacgtaa

SEQ ID NO: 197624 - DNA, 141 bp, Klebsiella oxytoca
atgaaaattaaattgctgttttcgattgtcggtctggttctggttgtctcatcttcggcgttcgcttgccctaaaggcgagcacccgcacggcggaacggggagtcatcataagggagggtattgttcttatgagcaataa

SEQ ID NO: 197625 - DNA, 315 bp, Klebsiella oxytoca
atgatgaataccgcagaaaagaaggctgcagccagtgttgacgccctggagaggtcgcagcaggcaccgcgccggacgagcagtgccagcacgcagaacgagctaacggccagcgctccagcgctgtaccaggtaactaaaatcaacgtgcctgcgagcctgggtgaggtgggtaagctgatccatagtgaatgcaccaaaatccagcaatcgcaaaccatcattctaagcctgtggcagcagcaggaggccaagacagaaatagccaggctcagaggtgctctggaggtcgccggaatcggcatacctgattag

SEQ ID NO: 197626 - DNA, 306 bp, Klebsiella oxytoca
atgacaacccaggacctgcagtgctacgtcgagcgccgcggcctggactttaacaccggctatcgagagatgatctccgaggtctatttaaatggcaggggtcaaaacgatattactctcagtattggtcgggccgacaaccccgacgccggttatacatgggaaaagcagacagttaccctgtcagcgcagcgccttaccacctggtgcgcagagggcgaaagccacgggtaccgcctggagatatccgggcagggggatattcccgccggtattaattttaaaattgtgcagacggggcaatga

SEQ ID NO: 197627 - DNA, 486 bp, Klebsiella oxytoca
atgagtgagcgtccagagttcactacccgtgagtaccgcgatcgtgttcgccggcttgctgcaatggttgtctcgcagggcaaggagcgtaactacgtattcaccgggtccgatgtaatacggcatgacagcgtatcccgcgtgagtgtagccgatggtaaagttagagactggcttgctgcttatatgaacgaccatgaaactggcatgtgtcgtatgctggtttttcctgaactgtcagaaatttggatcatgatttacggtaccgaccaggccagtggagactatagcaagaccatcgcccttacctacaattacctgaaagagacctggagccgaaaaaccctcccatatattaacgatacggcctttgcgccccttgccccccgtcatacccgcgaacatgggatagcatggatattacatgggatagcgataacaccgtttgggatactgacagtgttaaaaccgcccagggaaccgtga

SEQ ID NO: 197628 - DNA, 237 bp, Klebsiella oxytoca
gtgttcctgcagcgtggcggtcttatgtccacgctgttcgacaagatgcagtcaccgggcatcaaatccacggcattcgccaatctagccacaactgcaactcgccttctgtcgctggcaccaacgcttgcggataagtcgcgtactgaccttggctcgcatgttgacgcccatcttactgatcatgagcttgaccagcttgagcgcgacatcatgaagggcgtaaagcatgagtga

SEQ ID NO: 197629 - DNA, 1080 bp, Klebsiella oxytoca
atggcaaactttcaagtggcagctagaaccttacttcacctaggttcggaacttataacttcagatgaagtggcgatttacgaattacttaaaaatgcattcgatgccgaatcgccgagagttaaaataagaattatgtgtccagtaaatagcaaaatacttagagagtgcaatacattacttgctgctcagtttaacaaaaaaaacattgtgctatgcgaactaaaagcagatttaattgacaaaataaaaggaggatggattttaaaaggtgaagatggcagtatcattgacagcgaaaataaattatacaacatacactctgccgataacatagacactttaaaaaatgcttgtttaaaattaaactatattgaaatcacagactcaggaaaggggatggatgaaaataatttattggatgcttttttaaagattggcacttcttacaaagatataaatggaataaagacagatggtaaggcagtactaggaaacaaaggcattggacgtttatctatgatgagattaggtggaaaatcactaattgaaaaatggtgtaaaggtagcgaatatttgcatgcaattgagtttgactggcaatcatttgactcatctgatttattactaagtgaaataaactttccgatattaaaaatgaatgataagccaagcgagcaagggacacgtataactatctattcacttttttccgactggacagaaactaagattcaagatgaaattgtaaataattttttaagacgcatgaataacccatttgaaaaaatgccgacaaatttcccagtagatttatattttaacaatgataaaagagtacctattaagccgataaaccctgagctattaaaattagcagacagagatatgagtcttgagttctttccacgtaaatcaatgaaggactctgatgaaattttaaaaagcacaatcgagactccaagcaaggaattttcaaaaaaaccacaatcaagaactttaagagatttcaaaagcaaatttaattgttcactggatgatttagaaaaaataggtcctttttcaggctttgttgaataa

SEQ ID NO: 197630 - DNA, 315 bp, Klebsiella oxytoca
atgaacccattcaaaggccggcattttcagcgtgacatcattctgtgggccgtacgctggtactgcaaatacggcatcagttaccgtgagctgcaggagatgctggctgaacgcggagtgaatgtcgatcactccacgatttaccgctgggttcagcgttatgcgcctgaaatggaaaaacggctgcgctggtactggcgtaacccttccgatctttgcccgtggcacatggatgaaacctacgtgaaggtcaatggccgctgggcgtatctgtaccgggccgtcgacagccggggggctttgttgaataaataa

SEQ ID NO: 197631 - DNA, 921 bp, Klebsiella oxytoca
gtgccgaagggcgatgcgaatgatacccgcgagctggtgcttcgcctggcggagattcgcgcccggaaagcggaactgctgggcgtggcggattacgccagctggtcgatggccgaccaaatggcggcaacgcccgaggcggcatttgcgttcatgcgtcggatagccccggccgcccgggcaagagcggaacgggagctggcggatatccaacgggtgattgatggtgagggcggcggttttaaggctgaagcctgggactggttgtactacggcgaacaggtgcgccgggcgacattcgccatcgatgaagcccagttaaaaccctacttctccctcgaccgcgttttagaggatggcgtgttctggacggcgtcgcagttgtttggtctgcgctttgtcgaacggtttgatattccggtttatcatccggacgtccgggtatgggaaatttttgacgccaacggggaaggtctggcgctgttttacggcgactacttctcgcgggattcgaaaagcggcggggcgtggatggatgtcttcgttgaacaatccacgctgctcgcccggcatccggtgatttacaacgtctgcaactaccagaaaccgaaggccggccacagcgcgctgctctcctgggatgaggtcatcaccttattccatgaatttggtcacgcgctgcacgggctgtttgccagtcagcgttacgccagtctgtcggggaccaatacgccgcgcgattttgttgagtttccgtcgcagatctttgagcactgggccagtcagtctcaggtgttcgcccactatgcgcgccattatcagaccggggaagcgatgccggatacgctgcgtgagcggatgctgcgcgcggcgaagtttaataaggggtcgtctcagaaaacggaaaataaagcacgctaa

SEQ ID NO: 197632 - DNA, 1485 bp, Klebsiella oxytoca
atggcaaataacgatcacagagaaatatacaatttacgatccgctctggcgctgctgcaacgcaccccgggtgaatatgttgaaaccagcgtggaggtggacccacaggcggaactttccggcgtttaccgttacgtgggcgcaggcggcacctgcgagcgcccgacccgcaaaaatggcccggtgatgatgttcaacaccattaaaggcttcccgcagactcgcgtggcgattggtattaacggctcacgcaaacgtgtcggcctttttcttgggtgcgcaccggaaagactgggccacctgctgaaagattccgtacagacccccatcgacccggtactggtggaaggtaacgccgcctgtcaggaagtggtgcattacgccgaccagcctgatttcgacctgcgcacgctgcttcccgcaccaaccaataccgaagaagacgccggtccgtacatcaccatggggctgtgctatgcctctgacccggataccggcgagtccgacatcactattcaccgtctctgcgtgcagagccgcgacgagctttccatgtggctaactccggggcgccatattgacgcgtttcgcatgaaggcggaggcggcaggcaaaccgctgcccatctctatcagcatcggcgttgacccggcgattgaagtggccgcctgctttgagccgcccacaaccccgctcggctttgatgaactgagcattgccggctccctgcgtggccacgcggtcgaaatggtgaaatgtaaaaccatcaacgagcgcgccattgcccacgcggaaatcgtgattgaaggcgaactgctgccaggcgtgcgcgtacgtgaagatcagaacaccaacaccggtaaagcgatgccggaatttcctggctacaccggcgaagccaaagccgcgctgccgattattaaagtgaaagcggtgacgcaccgccgcaaccccatctggcgcaccactatgggcccgggtgaggagcacgtcaacatggcgggcatcccgaccgaagcgagcattctggcgatggtggagcgcgccatgccgggcaagttactgaatgttttcgcccattcggcgggcggcggcaagctgctggcggtgatgcagttcaagaaagtcgcgccggttgacgaaggacgccagcgccaggccgccctgctcgccttcgccgccttccctgaactcaagcacgtgattctggttgatgaagatgtggatattttcgacagtgacgacgtgatgtgggcgatgcagacccgctatcagggcgatgttgacaccgtgtttattcctggcgtgcgctgccacccgctcgacccatcgcaggcggctggctacagcccctccattattcaggacggtatgtcatgcaaaactattttcgactgcactgtgccgtttcacctgaaaccgcactttgagcgttcgcgctttaaagaggtggatgtgaaacgttttctgccggatttcgaataa

SEQ ID NO: 197633 - DNA, 609 bp, Klebsiella oxytoca
atgaccacacaacgcattatcgtcggcatcagcggcgcatcgggttttcagtatggcgtaaaagcgctggagctgctccggggccaggggcttgaggtgcatctggtggtttcgaagggtgccgaaaagacctgtgaactggaaaccgactaccgtcttgacgacgtgctggcgatggcgaatgtggttcactccatcggcaacttgggagccgcgatatccagcggctcgtttaagacgctcggcatgctggtggccccctgctccatgcgctcgcttggcagcatcgcccacagcctgacggacaacctgctgactcgcgcggcggacgtagtgttaaaagagcgtcgccgcctggtgttgatggtacgcgaaacaccgctcaacctgagccatatccgtaacatgcagtcggtgacggagatgggcggcattctcttcccgccggtccccgcgctgtatcagcggccgcagacgctggatgaaatcatcactcacagcgtgacgcgagcgctggacctgttcggtcttgacgtacgcgccattccccgctggggcgaagagggcttacctgcgcagccggagagcgttacctgtactactcgctga

SEQ ID NO: 197634 - DNA, 717 bp, Klebsiella oxytoca
atgttgatcggaccgtatgttaatggtgcggcggtaattatgggcggcctgctcggcgctctggcaagcagcgctatttcggaaagggtcaaaagctcgctgccgctgattttcgggctgtgctcggtgggccttggcattaacctggttatcaaggtgcagtttatgcccgccgtggtactggcgatgattatcggcaccgctattggcgaaatactttatgtggaacgtgggattggtaaagcggctggctccacccgctcgcttatcaacacctttcttccgccggttaagggcttaacccaggacgcgtttacagagaaatttgtggcgatcctggtgctgttttgcgccagcggcaccggtgtatttggcgcgatgcacgagggcatgaccggcgatccgtcaattctctatatcaaaacggtgctggacttcttcaccgccgggattttcgccaccatgctcggtttcgcagtgatgaccattgggctaccgctgatttttatccaggtggcactggcgatgctcgcctcgctgatcctgccaatgattacgccggcgatgatggccgacttctcttgcgcaggcggtttgctgatggtggcgaccgggctgcgcatctgcaatatcaaaaccttccccgtggccaacatgctgccagcgctggtgctggtgatgccgctctcctggctgtgggcccattttattggttga

SEQ ID NO: 197635 - DNA, 579 bp, Klebsiella oxytoca
atgacgttgcacttagcctcttgcgagcatgtagtgcttctggacatgcagaacaggccgcttggcacgcaagaaaaattaatggctcatcatgcatgtacgccgcgccatctcgccttttctacttggttgttcaaccgcgacggcgactgcctgctgacgcggcgcgcaatgacgaaaaaggcctggccgggaacctggaccaattccgtctgcggacacccgcagtggcaggagccgtttgaggtcgccattcaccgccgttgcagttacgagacgggcgtaaaagttgatgccgtcacgcttatcgatgaggacttttcatactgtgaaactgatcctgcgggcattaccgaaaatgaatattgcccggtctatgctgcctgcgtgaccagcccgctcgcgcttcgcgagagcgaggttatggatgcctgttgggtagcgcttccggcgattatcgcggcggcgaaggccctgccagggctgttcagcccgtggcttgtgcagcaactgcgcgcacctggtaacgccgacagactttcgcgctatgctgctcatgccctaacgcgtctggtgtga

SEQ ID NO: 197636 - DNA, 450 bp, Klebsiella oxytoca
atggaaaccttatcccgtatcgccaactggcttgacgcccagcatgtcgtggcgtactgcgtgagtgacaaagagtcgttgtggtgcgcaaatgctttttttgtgtttgatcgtgatgccgtggccttttatctgctgacccgtagcgaaactcttcacggcagaatggcgggaatacgcgctctggtagcaggcaccgtcagcgatcaacccaagacagtgatgcgcatccgcggcctgcaattccgcggtgagcttcgtcagctcaacggtgatgaagccgaacgcgccagtaaacgctactaccagcgctttcccgctgcccgcatgatgcactcccccatctggaccattgatatcgacgagatgaaatttaccgacaatacgctgggatttggcaaaaagttgaactggtggcgtgaaggtgcctcatccatttctgcaaactga

SEQ ID NO: 197637 - DNA, 441 bp, Klebsiella oxytoca
atggaaaatgtgaataatcacgcggcgacgatgacgcagcgtagcgtatcactagcaggtgcacgagatatcattcggacggcacaacgaaccgcgcgggaaaaaggctggcagattgccgtcgcggtcgttgaccgtgcgggcgaactggtagcgttagagcgagacgatgcagccatcggcattagcccgattgtggctatcggtaaggcgcgtaccgcagcgctgctacgcgctccttccggcgaatttgaatccttcatcaacggcggtcagcccagttttctcgctacgccaggcgtgacgcctcttgaaggtggtgtaccgcttcggttaggcgaagaggttataggtgcagtgggagtcagcggcgcacatggtgcgaacgacacgcgggtagctcaagccgctgcagacgctctggcaaaagaggataaataa

SEQ ID NO: 197638 - DNA, 729 bp, Klebsiella oxytoca
atggcggagttacagggtaaaaaattgctggtaataggcggtagttccggcattggatttgccgtggcgcaccgcgccgggctggaaggcgcggtcctgacgctgctgggccgcaatcaggctcgtttggacgaggcgcgcgccctgcttgtcgcacaaggagtgaaggttagaaacataatagcttgcgacgctcacgatcacacggcgttgaccgctagcttcgcgcagttagagcctttcgatcatctggtctcgatggtaggagacgtgatggccggtggttttctaaaggcagacatgaagactatagaacatgtcattcattctaagtttctaaccaacgttctgatcggcaaactagcggcgaagaaactgcgctcaggcggttcacttacctttacggccggaactggcggccgggcgcaacatgcctgtgcaagctatgtcggtaatctcggtattcaggcgctggcgcaaggaatggcggcagaaattgcgcctgagggacgggttaacgtggtggcgcccacatggactgtcacaccgttctggcgtgaccagcctgagttaaaggtggaagaaactcgccagcattttgccaacctgattccgttgggccgcaccgcggaaattgacgagcttgcgtcagcctatttgtttctgatgaaaaacgattttgttaccggtcagcaattggcgatcgacggcggcataatgctcggctaa

SEQ ID NO: 197639 - DNA, 1809 bp, Klebsiella oxytoca
atgaaaaaagacattaaagaaatggaaaggatgattgatatcattaatgcatgttctatggacataaattcatatggtgatatatcttataatttgttagtgcataaagaaatttcttcgagcgatttatttaaaaaaattaatacaatattgaatgctcggatacatcttaaaaagaaaaatacattttatgtagaaccatctactgggaagaatttatctgacttgttaagtgaagatgatttagataatattgcttttttggcagaaaagataactcatttacctgtacgtggccgattatatgatgtgttgtggctttataagaaaccaaggcaacgtaattttgcttcagaggcattaaatgctttttcatccttagatatcaaggaagataattggtatggatacgtaaaggatgttttctacagagctctttatttaccaaagttcactcaagagttctcggcgtatgatgtgattgaatcaaaaataatgacttgttttcatgaggctaataatccctacttgttctgtgaaatggcggatataataacatcaaatagcatcaaaaatgaagatgatgtcttaatcaataaagtaataaggacatttatctataaatcaaaaaaatcaaaagactatgtgtctgcttatcgttgtctaacaatattatatgagcggtataaaaatgatatcttccaaggaaatggtgatcataaatgccaattagtgaatttataccatgccagattgttagatgaagaaggaagggagtatcaaggcctgcatgcagtaaattgctttaatgaatccttgaaaaaatataaagcatcaaaaattacacttcgtgggatctttgatgtagatgaagctattacagcattaaaagctatgattagaaaagaaggtaaacatgcctatgagtctatggcaataataaaaacagaaccattagacatttccgttgaagtaaatcgagctatagaacttgtttcagaacaaaaggatataattcattctctttacaatttttgttttattgcccatccagtcaataaaaaaagaatgattaaagatgcggttgacagtattaggaatcacccatttcaaagtatatttccttccatagtaactgatagagatggcagagttcttgctaaaacaaacggtgttgaaattgatgaattgaaagatgaggattatagcttagagaatattataattccattatcacaaggtttttcaatatatatatcgctacaaatacaggcaagaattgctcctgcacttaaacaaatttgtgaagagtattatattgattataaagttattaaagatctttgcgaacattgtggatttatacccgatagtaaaatagcccttttctcgcaagccctgcattttggctttgagtacaatttttctgcatcagtgcacctattggcccctcttttagaagatataattagaaagatactttatgatcaaggtgaatactctgcaattatagatatgaatgcaaaaagcactgaagtatctatatcaactcttttagataaaccaaaagctaaggaagtttttgacgagaatttcctttttgagttaaaaatgctgttaactaataacattggctctaatctgagaaatgcagtagcacacgggttattagatgacgatactgccagtgggggggatgttgtttatctctggtggagaatattaagatgggtaatgctatctgtcgtgattggtcataatgaatatcaggaactaaaaaatgctcctgtcattgaggaatctgaatga

SEQ ID NO: 197640 - DNA, 1266 bp, Klebsiella oxytoca
atgaaaggtatgcagaaaatcaagagaggtaagcaatttacaggagtagttgtctatgcacttgaaccggcttcacaccataaaactgatcccagggttattggtggcaatatggccggtaacaatatcgtcgaccttatccgcgagtttgggcaaacaaaaattttacgaccggatatcaaaaaaccagtatggcacaattctcttcgcttaccgcatggagaaaaattgtcagaagcacaatgggcaaccgtagccgacgactatatgtcccgtatgggttttactgatacacatcttcgttgctatgttcttcataatgataaggctggacagcatattcacattattgccagtcgtatcgatattactgacggaaagttgtatctgggaaaaaatgagaaccttatcagcactcgaattatcagtgagctggaaagaatacatggtctcacagaaacagcgactacttcaaaccgacgagctcagggcataaagaagctttcgcgcaacgaaaagatgctctctgaacgaacggcaactccctgcccaaaagtcgctttgcaaacttgcatcgataatgtgttagccaatcgcccagatttgttatcgttcattaagcaactggaacaagtgggtgtaacctgccagcccaacattgcttcgacgggcaaaatgaatggtttttcatttgaatttcgggggattgccttcaaggcttcacagcttgggaaaaggtatgcctggtcaaatattcagacacttattgattactcgcctggacatgtaaaactacttaatacaggatctaagtttgctcctgctccttgtaaacagccagaagcacaacgtcccagcagagaaactattctcgataaactactgcaactcaacgagcaagtcagaaatgaaagggagaatgaacttgcccataccatccaattgaaccaaaaactacgctttacggcccatcagatatccagacaacaccaatcccacttccaggtgtggcttccatttcttagcaggctcatacaactgatcagacagttgggtagttctgtgttgtatgcgacctctcgtccctttagacaaatctatcatcttcacttacttacctcctctcctgaacctggcgatgaaatacattcagaacaattggttagcaaaggatccaactacaaaccacattcaaatagttcatttttacaatttagtcaagaaattattgatcgtttatatagatcgataattcatttacgatag

SEQ ID NO: 197641 - DNA, 180 bp, Klebsiella oxytoca
atgagtaagcaaactgttcagtgccccttttgttttaaagaaagtccccacggcgtaaaaatatgcaccggatgccatgcaaaagtggcctatggtgaaagtccgctcagtgtggccttcctgtttcaattcgtggccttcggtctcgcatggttagtattttcaggctttgttgaataa

SEQ ID NO: 197642 - DNA, 684 bp, Klebsiella oxytoca; identical to SEQ ID NO: 141516

SEQ ID NO: 197643 - DNA, 1431 bp, Klebsiella oxytoca
atgacattgctttcaaatgccaaatggaatatggcatcacaatttattaaaatgttggtgcaactaacaaacatagtctatttagccaagattatcccaccaagcgaatatggattaatggcaatggcacttgttgttgttaatttaggtattttgttacgagatttaggtacgtcagctgcattaatacaaaaaagagatcttacagaatctctaataaatacagtcttctggttaaacctccttatggggttaggtctctttgtacttgtttttgctggctcaagcgtaatttcaaatatttatcatcaaccgaagttaactctcgtactgatgttgctaagttttacatttccactttccagctgcgctgctgcacatcttgctctgcttgagagagattcaaagttcaaaacagtctctagaatagaaatttcttcctctcttacttcgttagtattagcaattactctagctaatttggggtatggtgtttttagtcttgttggacaagctgtaatacttaatttgatgtcggctattcaattttggcatgcttcaaagtggcgtccttcatttaaaattttcatccattataaagatttaaaaagtatttttagttttagtgcaaatttatccatgtttaattttataaattatttttcacgaaatgcagatagctttataatagggaagttcatgtctgcttcaattttgggtagctacaatcttgcatatagaatcatgcttttcccgttacaaagccttacttttgttgctacaaggtctctttatcctatattgagtaaacaacaaaataataataaagatatatcaaagatatatatgaattgcgtttatgttgttttatttattacatgtcctttaatgtctggtttggcattctatagtgagccttttatccgattggtatttggagaggaatggcatcttactggtattgtattaaagtggcttgctccgacagcaataatacaagcagtactcagtacttctggttcggtgtttatggctaaaggccgtacagatactttattgaagttaggtataataggaatgatattacaggtgggtgcttttataattggcgtccaatattcgataacgacatttgctatgtgttatctcattgccaatataataaatttcttccctgttatgttctttctaatgaatttgttggaagagaatcttattgttttttttaaaaagaactattcaattgttttagctacgttagtcatgttagcttatctaaaaatcattgattatttctttttttctggggttgttaatagtctctatttgctagcgtcattgtcatttacaggtgctatagtttattttgtggcatcttttatcctatctgcctcacttcgaaagatagttcttgcaaaggtaagaggatga

SEQ ID NO: 197644 - DNA, 543 bp, Klebsiella oxytoca
atgcttaaaaattacaataatcaaataggactacaaattcctaggattgttgattcagaacaaaagctaatacattatccattatgcaatggtcacgtatttgataaggtaatcccttatattttcgaaagtcatgaaaaaatcatttcaattggctctggcttagtcatttataaaagtcttgttgaatcttttaatgcggaggagcttaccctctttgacgaacgttatgccttatacggtgttgattacagtttttttcgcagaattgaaaaaataaaaaatcgttacaacattcatatccaaatatttagtacaatggaacactcactttcaaaaacttctacaactttttctgattggcgtcaccgcgaacatctttatgactatgcgatttcttgtcgcttttattctaagtcgatttttcatatgattttaggtatgtcaaggtgtatttttaaagaagttattgctgggagatataaaagtttaaagttacttactttaacttttattaagggacatcatccaagatgtcactga

SEQ ID NO: 197645 - DNA, 858 bp, Klebsiella oxytoca
atggagtcagaaaaaataatccatgaaatacaggaaatttcccccgaggcgaagaaacatgttacagcccttcatcaaaatattcagtttataacaaacaatgtaaaaaaattccaaaaagcaatgactgaattacaggaaagaagagaggacatacttgaacttgctggtgtaggtaatgttatgcgtagtattatgcatgaattgacaagaactactggacagactcgcttattacttaaccaagtagctaaaaaagcagataatgaaacagcagacctccttaagaaacttgagtcagagattaagtccttaaatataagattaagtcagttagatcctttaagcacaaataaaagaaatagaagtggtgattttgaattaatgggtttaattaaaaccatcataagtggatacacctcaagatttgaacggcataatatagattatataataacattcaatggtaaaattttatcatctgagactctaatggtcaaaatggtaaaaggttttgtcagcttaactatcgaaaacttaatattaaattcgatctattggctaaaaacaggatttttacaacctggcgaagaaaaagcaaaaatcaccattaatgtagattcatactccaaagtaatagaagtttatgataatgggccaggaatttctccaacagataaagaaagaatatttaaccctgggttttccttaagaaaagacggcagaggttatggtttatacatagcaaaagaggtatcagcaaattatcattctaacatttatcttgatgatcaaccttttcaagatggtaggcttagaatgtttattatagagctaccaaaagaggataataaataa

SEQ ID NO: 197646 - DNA, 1875 bp, Klebsiella oxytoca
atgattaaagttgctattatcgatgatgatttcaacgaaaaaataacattatctgatttaaaaaaaacagatgatgataatatacttgatgcattagaagatattaactctccagaatatgaaataatttacaattattttagcgaaatgaagttggtatataattcattagaagatatcgtcaacatatttaacagcacaaaagatatatcgtcattaccgcgtgcgtttttaaggttaagagataaagcgttagagcgaaaagaattacttattgctcctgtaaaaagaataattaattggctttgcacgtccggtttaagcataaatgaatctgacattgatatatattcaagcccctcaagttattttaatgaaagaaaatcattaagctatgatttaatatgtattgactatctacttgttaacgactcggagcaagaaacaatacctttcattaataatattaagaatgaatcagcagagcagggatacactccctcatttattttaatgtcttcacatgaaaatcttattacgaacgatttccttgatataaaatcaaagttaagcatgactagctctcgctttagaattatggaaaagccgagtacaaatttaaattctagggaagtcatatggaaaacaacctttaaacagatatttgaacaaaaaaaatttatacatgatatagagatgtttattcatggttggattaaccatttccaaattgcttccttaagtctagcaaaaatactttgggcgctagatgcacatagcttagatgtattacgtcgcacagcaaaagatgacaatataagtttttcagaatattttacagaagtaattttcaaaaaggtattagctgagttcgaatcctcattaaatactggtgctgaatcagttagatcttcaggggaaacattgcaaaccgtattagaaaataatattttaatcagtccgggaaatgaggttcaggactcacgattgatattaaagacacttcttaaggatacaaattggcatgaaagaaactggtatcaaattcaagaatcatatccagtcttggttaacgaggcatgtgatctaccatcgctttatcattaccaattaaaatggttgaaggaaaatttaagattcggaattgttttaagaaataaagaaacaaaaacactgctagtaaatttaactcagccatgtgacttagcacatttgaagccgtatcaaattgataaaataaatttattttttatgcaaggtctggatatccatatgagcataaataatacaacagataagcaagcgttatcaaccgctctctttgttgattcaagctggagaaatgttcattgggatttatcaagaccattgactccacctataatttcatttatgcaaaaaatagagaattacgaaacaattggtcaactgaggcatgaacaatctcagcatatactcaaccgatatgttgcaaaaataagcagagtcgctacaattagaatgccatatctttttgatataaaatatttggttatcgcctttgatgaaaaaggagaagttaatataaaaacaaaaggtgtaggccatgcgataaaaacaagtgaaaaaaatataacagtgagtttttcgccagaacatgcgagtactattgagtcaaatcttcctctccccaaaagtatatttgaggatttagttagtggttttgttataccccaaaagggtaagcttagactcccagcgtcttacagtatggacaatatctaccttttgaataagtgttactcagaaaaagaggctttaaaacaaatagatgcaaactacaaaagttcattgatacgcgaaaaaataaactatctttttatttataatgattaa

SEQ ID NO: 197647 - DNA, 840 bp, Klebsiella oxytoca
atgaaagatcggcacctccttggattgtccgggggaaaagatagcgctgccctagcgatctatatgagagaaaactaccctcatttagatattgaatatttctttactgatacaggtaaggaattacccgaggtttatcagtttttagaaaaaattgaaggatatttaggcaaacaaattaatcgcttaaatccaaggcgtgactttgatttttggctaaaagaatacaatcatttcctaccctccccacaaactagatggtgtacgagacaacttaaactactaccatttgagcaatgggtaagacctatgcttgccgagggagcgacagtatattcttacgtagctatacgttctgatgaaaattatcgagaaggatattcatcgtctaataataatctcaaggttgtgctgccttttagacaagataatattgataaagctgctgtaggaaatattttagtaaagtcgggggttggctggcctgattactatcaatggcgttcacgtagcggttgtactttttgcttttatcagcaaaaaatcgaatgggtaaggctaaaagaaaaacatcctgatgaatttgataaagctaaaaattacgagaaagatgcgcttgaacatggttctccgtttacttggtcacaaggtgaatcactggctgatttagaaaaaccacaaaggataaaagaaataattactgactatgaagctaggctaaagagagatagaagtcgtcggccagtgaaccctttacggcctgaggagttgttgatagatattgatgatttgtattttgaggatgaaggggggggggcttgtaatatttgtcataaataa

SEQ ID NO: 197648 - DNA, 2766 bp, Klebsiella oxytoca
atggggaagtttttagaagaagctttgtctgcgggccacgacatacattttttccaagaaattgcagaggttgcagcaagaagtaatggtcggttagttgttataggtatattgcatcaatcttttcgacagtatgcaataaaatcgggccagaatattattgatgaatggtcgaaaatacaggggcgatatgctgatttacctgtcattgttggatctgatgaagttgttgaattaatatccaacgcaataagttgtgatattattcctactaagtctgagatttttaaagatgtttttgatgaaatatctaaacaccgcccagctattgataaagggtttattgatacgttgaaggggtgctggcccttacatcctgtgatgcctgttttgttaagttcagtttcgagaaaacagtattcgcaaaacgaaagaagcatatttacttttttatcatccagtgaggtttgcgcttttcaagattatttgaaagttacggatttaactgacaattcctgctacagaccacaccaattttgggactacattcgcgctaatcttgagaataccattagcacatcttcagatagtcataaatgggcacaatccgttgaagctgttgaaagggtggaagcacgcgttgaagctgaatgtgtgcttcatataatgatactaaaaacaatttctatcattaatatatttaagaatggtactgggctaagttctaatagtactatcttgaatgctatcttctttgattatagatcatcagaaattgaagaggcgttacaaaaattagaagagtggaaagttatcatcttcagaaaatatttgaattcttgggttgtttttgatggcagtgattttgatattgatgccacgataaaaaaagagcttaaaaatattgaacatttagattcaaaggaattaacaaaggtttgcgatattgtacccgttattgctaagcgtcattattatgaaactggtactcttcgtcgaatggaagttgtgcttgcaaacgaatatgaatttgaaaaagagtttcatagagaaatgcaagaccatgattctttcgggaagttcataatcctttatgacattgaaagtgaatattcagatattataactaaattatcaagcaataaaattaaaaatgatattgttgtaacattttctcctaacaaaaataaattgtattctcttggcaaagagttagtagcacttaatcgtatttttcaaaatggaggcgaacttgaaaatgactctgttgctagaaaagaggttgaaggaagacttaattcattgaaaaatagtatagaagctgaaataaacgctttgttgttaaaatcaaaatggatgtcaaaagaaaaagagtttacaacacataatttatcttgtatcgcatcagaaatagcagataaacgttattataaaactcctttaattaatagtgagatcattaatcgaaataagttatcttcgagtgcggcgaaagcaagaagagagcttatgcataagttggttttaaatagtaatattgaaaatcttggtattgagggttatccagcagaaagaggcttatatgaaataattcttagaaaaaatcatcttcacatccgtgataaaaaaaatgtgtggaaaatatcaccaccggataagaagctttctcctgttttatatgatctttgggaggaaacagatgctcttttttcatcgggaatagttgaagcaagagatatttataaaaaatggagagaatcaccatttggtattcaggtgggaattatacctattttatttcttatatattttctttccagaaagaatattctttctgtttataaagataaatatcttttgacagattttatggatgttgaagttgatgagttattgcaaagcgttgataggttttctgtcagaaaagttttgttaggtattaaggaaaagcaatttcttcaatcaatgaaattagcgattgaggaaagggtttctattttgatacaagatgactctcctttagaaatagctcgagggcttgtacggattgttttctctctccctggatgggtaagagtgactaatactctatcaagggaagcaaaaatggtacgtgataaattacttgaggctaacgatccttacaaaattctattcgtagatcttaaacaagtacttagtgttagcgatgaatatgattcatatcttaacaaaattaagaattgcttaacagaacttatcaaagcataccctaaaatgcttaatgcatttcagaagcatttattagaggagttgggttctgctaatgatttttctgcaaggtctcaagcaattgttaaaaaagtatcagatctgcagtttaaggcatttttgggcaggatgaatgaggttatttccaataaggctaatgttgaaacgattttgacatttttagcaaataaaccattatcccaacttgatgataatgatgtaaatttagcatatctatccagtaccgaatggataacacgattcaagcatcttgaagcatatttgcatgtagaaaatcgtgaagctcaaaatagtgtagttgcgctcgtgactggtataggtaaaagtactgaaacgagaattcataattttatagttgataaagatgttagtaacaaagttgatttaattgcgatggatattgtaagaaaagcaaaagatagcggaatcgaactggcaatgttattagcggctgtgactaaattaagtatccaagattcagaaggagaaaaataa

SEQ ID NO: 197649 - DNA, 1311 bp, Klebsiella oxytoca
atgaaaaacaggcgagaatttataatttccggtgcaagtgcagttggactgttagcactctcaaaacaagcaaaatcagggccacaacaggcacccgcttatcttaaggtggcgtctgggatatcacagacaggcatggccagcatcaggagctttcttcctgcatcgtttaatgcatcagatccgaacgccgattgcacgaagtatatacagaatgcaatcaacgagagggtgcaactatttatacctgcaggtgtttacaatgtatcgcctaaccctgattcacctgagataaaaaacgctcagtccaaaggtggaagttgcatcaatttacttcctgggtgcgcaatcatcggtgttggaactataaggcttttgtctggtagctatgcaggtgttggttcaatcataacaaattgggatgatgacgatttatcagatgttataatttcaggtgtgaggattgatggaaactctcaaaacgttgatggggccataaactgcattaatattatcggctcaagagggctaacgatagataatgttaatgctataaatcctcccgcaagaaaaggaaatgggggaataggaatagggcttcgttcatctaaaaataacaacgggccagttgatagtaacatcactaactgccgcgtagaaaactgcggatatattgggataagcattgataggccaaatggagttatcatcagttcttgcacagtagatggaacaaacgataacggaattgatatttttggaaacgattatagcggtggacggttcaattcaggagagtcgcgtaacgttattgttagcaacagtataataaaaaatgctaaaggctcaggtattttccttgagtcatgcggtgatgctgtaatttccgcgtgccatatagataatccggggtctaatggaatcatacttaaccggatgaattcggcttcattagacaatgttattagtgctgttaagattaagggcaacggaaaaggcattggagttaagttcaaaaatactacaggaagcactcaattatctggaatgcgttttgaaaaacttgaaagcagctatcacatggatggggctgagtttgtatttattgataaagggttgcataaggacatatcgggtgaattgatcaagatcaccaataaagacaaagtaagacttaatagctcgcttattgaaagacaggtgtaccaaggcagtcagcagccgaagcttctcaatgccgaatattccagcgccatagctaacaccacaaccgatgggattcactggctaaataacaataaagttatatga

SEQ ID NO: 197650 - DNA, 987 bp, Klebsiella oxytoca
atggcaagcattgtacttttttttgtttacgtaatgttttttataccgaaaatggatttgatttctctgggtggagggtttaatgctggcttaaggattgatgatttaatcatctgcttattgtttttctttttcttcttatatgcagcacagaataaaaagacaaaggtcagtaaaactgaattttatttcatattgtttttattcgtcacattccttggttcattctttagttcgacgcaatatggcaggggaacggttctttttccaattcgtttctttgaatattttgtttttttctacatgggtttctttttatacaaaggtggagcaaatataaggaagttacttttgcttttgcttattgctaactctgtagtagccatccttcaacactttggagttgttggtgggttcaacgtcagaggctatcagccaaatatgtcagaacgtgtaataggtcttacgagcgggccttgggagcttggtgttatacttaacttcattacatgttactttttggcagaggaaagaagcgaattcaagaaatacgtcatctttggcatagccacattaatcatcatgatgactggctcaaggatgtctatgcttgcgcagattgctgttctgatctggtatatgaagctaagtgccagcctggtaaccatcatcaaaagatgcctcgtggtcattcctttactgttcgcggtctatttcttctttagtgacagtacggtggcgactcgatctgatagtctcatgaacagtgataatattgaccagctattagactcatattcatcggttagaattactgaatcagtcccttcatggggcgatctgggcgttctttcccgtggtgatgaggttgatgccagctggagcatgaggggtattaaatggatttacgccgttaaactatatctgtcacaccctatgtactggatgatcggcgtgggagctggctcttttggtaacgctctttga

SEQ ID NO: 197651 - DNA, 231 bp, Klebsiella oxytoca
atgcacacaaacctgaacgtgaatcaggtctttatcggattcatgttcaggcccaaagagtggcgggtatttatcgccacggtgagagcggcgcatcctgataaggatgcagcaagcgagattttgaatttgcgtcaggatggaagcccgacagggcagagacagcttgctggctctgttcacgacagccgtgtcccgacagggacgacgcccgggtcagtatttatttaa

SEQ ID NO: 197652 - DNA, 834 bp, Klebsiella oxytoca
atgtcgcagctgagttttgccgatgtgttcaatatggccagagaaaccgctgacaacagccctgtcattcaggcagggcagcagatggcggaagcggtacccactgttcagcgcatgatgagcgagcagtacagccggagccgttttgttagcgtatttaaagacacgggccgccatcttgggcgctgggaagtgttcagtgattttctgtcactcgccgccagtgagctggatatggtccggataaggacgccggagagcatggagcactgccggaaaatctgtgcccggtacgaggccaccgacattgcgaacatgcagcaaatgttttgcctgatggtatgtgcgctggaggcgaaatttcatgatttcctcggcgcgatttttatggagcttgagctgggtgataattttcgcgggcagtattttactccgtactcggtgcattgtctgatggcgcggatgctgatgccaggcgtcagagatactatccgccgggaagggattgccaccgtcagcgatccggcgtgtggggccgccgggatgctgatcgcctatgcagagtgcctgcttgaagcagatatcaacccttccatgcacatgttcggcagctgcatcgatatcgatccggtggcagcagatatggccttcatccagctgtcacttctggggatagcggcggaagtggtcacggggaacacgctgacgatgcagttccggcgggtgaggtataccccggcttatttcctcaacgactttgaaaaacggctggcagacctgagccggttcagggcaatgcgggactttatccgcggaatacaggaggccgcgtaa

SEQ ID NO: 197653 - DNA, 924 bp, Klebsiella oxytoca
gtgactggtcaaggccgcataaaaaaattagtattaagaaatattaatgatctaaaggtatcttctttatctatagatcgtcttattatttctaattgctacagtattaatgttaataatttgaatgttactggactcagtgaaccatcaacagttaatataacgtactgttttggcaaaagtataatacagaatctaaagattgcaaattcagaaagtagtagtgataattcaactttgaaggttatgagttcaccacaacttgttttgtcaaatatagtcataagtgattcaaattcatattcaaataaacaaagtaattattctctctttgtcgatgctttatatacgccatattcctgctggaatgataatataattcttaacaatgttatttgtgagcggccgagatccaatttcaaacgtggaatttggttttacggtttacggaattcagttattgaatctatagtcggggctgatgtatttcttcaaggttcagtggattgtttttttaataatttcaatatatcagagtataaactagaaactaaggacttagttaggtgtaatttaagttttaaatgtcagagtgcaattatcagaggtggtacaggcaatatgctaaagttggattttggtggcccctcgtctgatgattctccggttaatagttattgctgcaaatttacaaagggaacagtaaatcctgaaacaggaactaaatatatccgaggtgataataatcatcttaacttcaataaccctacccgacaaaatagtggtaatgacatagaaattgaattccaaaatgatttaactattgagtcaatgaatgtgtcttttctaaaagttaaaaatcatttaagcataggcaaggaggtttcaaatgtttatgttaagagtgattttcagaaaatgtaa

SEQ ID NO: 197654 - DNA, 771 bp, Klebsiella oxytoca
atggatataagtgtagttataccatgttataatcgagaaggcagtattctttctgcagtactttcggtgttgaatcaggttgggaatcataatgttgaagttatagtcgttgatgatggttcaacagacagttcaattgacataattaaggatttaaatatcaggattttgaaaacaaatggtagaactggagcctgtaatgcaagaaatatagggatttcagcagctagtcatgattgggttgcttttaatgatagtgatgactattggagaatagataaactaaattatattgagaaagttatcaactcaaatgacgttaccattgattacatctttcatccatttgtgcgcatggttggactgaagtctatggttggtggggtttataatggttcatcaggtgttattaatgaagattttgtgaaagaattattagcatgtaatatgattagtactcaatgcttaattgcaaaaaaaaatacattgattgaatgtggctgttttgatgttgaattgaagaggtttcaggattgggagttggcattaagaatcgccgctaaagcaagaggtttttatatagcagaacttttgtctttatgtattgagtcacctgattcaatatcaaaaggattcaaaaaggggataattgctcgtcaatacattcttgataaacatcgttctctatttttaaaaaataagttgtcaatgtttaagtttttattttcacttcagcttcgaagcatcgttagtgtattaaagagagactga

SEQ ID NO: 197655 - DNA, 1251 bp, Klebsiella oxytoca
atggctatagtaaatgctataaggaattttaggataaataagggaaagttaacgtctccgttatttactttttgctttatatggcttggtgtctttattctttattctttgagtttatcagacctattaatttttcctataagtgaaattggggttacagtcacaataattattgtgcctttcctggcggggtattttcttttttcctttgtgaataggttggctcctaagaagaagaagaatggaccataccatgtggtcgatttccaatcaggcgccaaaaaagctttaaagaaaacaagaaatttgacgtggttttttttcgcacttgttgtggttgagattgctattgccggctatatacctttaatatcaatggctatggggcatacggtctcccaatttgcttttggaattccttcattacatggctttgtccttgcttttggctgccttttagttgcatctaattattatgattatatatgctttaaaaataaaaaatccctatggtttgccttattcattatttctatctttgtacttcttgtcactagaaaaatgattatggtgtcatttatacaattgggaatgatacatctcattacgacaaaagttaaaccaaaaactatttttttagtggttctatctgtattgcttgttttcttattatttgggtatatcggagatattagaactggcaggcagctctttatacaattggcacatccaagctttgaatatcctgattggatgcctagtggttttatgtgggcttacatttatattgtaactccaatagttaatttaacaaatgctatacacatgggacaaacagatacaaacctcaattttctgtgcagtcttttgccgaaagtagctaggggggcattacaatgtgccgttacagatgaagatgcatttgccagatcctatcaaattagtggagcatttaatgttggcagtggatatatcgagatttttctttcacagggaattcttgggatggcgattttcagttttatacatggcgtaatctcatcttacgtgtttaaccgagttaaaaagaaaaaatctacaattttactcttctctgtaattagtcagatcaatttactgctaatatttggtaatggttatttcaatcttaatgtgttagcacagctcccaatggccatgcttttttttaataataaaagaatagattatatttatgatgcaaatagtgacgatggagtaattcgtgaataa

SEQ ID NO: 197656 - DNA, 942 bp, Klebsiella oxytoca
atgacacttgaaagtattttcatcggtacccgcgtggacaaggggcgttacgggccacagagccgggaaatggcgatttcagatttaatttcccttattcatcgtccgagtgagcctacccggctcatcctgccggatttttctggtctcgcccggcatattgacggacagctccgggaacatttttctcagcggcaggaagatgagtatgcccgcaaataccgttatctgtcagatatctggtaccaggccggatcgcttagtaatccggataaccgcagccggcgttttgaaaaagtgatggagcagtcgcaggagttcctggtttttagccaggatgtcatgccgaatactaatctctatgacctgaaatataatgaaggggagagggtaagacaaaaaggacaaatgtactgcctggcactcctgtttcatattattgcccgggcagcgtttgagccggagtctgtcgctactgacactaccctggttgctcactgccgttggatgaaagactgggtcaaaaaaacgctgggggccagaccccttgacgaactgatggttcgtacagcaatgcttgatcccggtttttttcctgccttgcagcgcctgataggcgatacccaggcgagcagcgccgatgagtatcttgcaaactgcatccgtaccgcgtgtcaaaagaccagtgaatacctaaataatccccggcaaagctatcgtatgacattcaattatcacagttacgataatcaacagcttacaatgctgaaagtattgcgtgatcttcactaccgcattgaccgacttgagatgctgttgcaggaactggcgaaaaatacggaggtggatttcaccactgccgatacagccggtagatggatcactgagcagataggcaaagtagaagggaacgaaaacctggggataccggcgaacatctga

SEQ ID NO: 197657 - DNA, 417 bp, Klebsiella oxytoca
atgaagaaaacctatatgctcgacacctgcatctgttcattcatcatgcgcgagcagccggaagccgtgctgaagcgcctggagcaggcggtgctgcgcggtcaccgtatcgtggtctcggccatcacctatgccgaaatgcgcttcggcgccaccggccagaaggcatcaccgcgccatattcagctggtcgacgccttctgcgcgcgcctcgatgccatcctgccctgggaccgcgacgcggtagacgccacgacggacatcaaagtggcgctgcgcctcgccggaacgccgatcggcccgaacgacgcggcgattgccgggcacgccatcgcagccggcgccgtgctggtgacgaataatgcaagagagtttgagcgggtggcggagctgaagctggaagactgggttaaatag

SEQ ID NO: 197658 - DNA, 231 bp, Klebsiella oxytoca
atgcgcacagtttcgatatttaaaaacggcaataaccgcgccatccgtctgccccgggacctggattttgagggggtcagcaagctggagatcgtccgggaaggagaaagcatcatcctgcgtcccgtccggccaacctggagttcgttcgcgctgctggaaaaagctgacgccggttttctggaagagcgcgagaacgtggtcagcgatgaaggacgttttgagctatga

SEQ ID NO: 197659 - DNA, 864 bp, Klebsiella oxytoca
atgctacatgccttaaacttttcaatacctgatgattcttttctattggatggtacttattcgactacattaacagaggagttaaaacttcaaaatccgataagtaaaattagagaatcaataacaaaatcagatggttgcaatgattctattgataattctattaattatgaagaattcaaaagaatctggttccctgatgtaaatgcacatgttttcatttcccatagccatgtggataaagctaaggcaatagccttggcaaactttttattttcaaagtttggcattcgttcatttgttgattcagaagtgtgggggtatatggatgatgcactccgtgaactaaataataagcacaataagtttccggggcaagaaaatacttatatttatgagcactgcaataaacttgcaagcaatttaaatatgatactttcatctgcattaataaaaatgatacatgaatctgaatgtctgatatttattaatacaatcgactcatgcgttcgtgatggggatgagtttagaacccaatctccatggatattcactgagttattaatgagttcaatgcttgaaaagagcgaacataaagatcgtccaactgaactgcgcaaatcacttgatgaatttcgtgtagtagctgcgaatgaatcatttgaccaggctgtgttttcatatccattatatttacgacacatgcataatgtaaccaatgataaaatcaataaaatcaatgcgataaaacctagcggtctatctttcacaacgacctgttacagagacactgcacatcactttgaagtcgatgatgtattcaaaaatttagactcgatctataacttggtcatttctcgttaa

SEQ ID NO: 197660 - DNA, 651 bp, Klebsiella oxytoca
atgaacccattcaaaagccggcattttcagcgtgacatcattctgtgggccgtacgctggtactgcaaatacggcatcagttaccgtgagctgcaggagatgctggctgaacgcggagtgaatgtcgatcactccacgatttaccgctgggttcagcgttatgcgcctgaaatggaaaaacggctgcgctggtactggcgtaacccttccgatctttgcccgtggcacatggatgaaacctacgtgaaggtcaatggccgctgggcgtatctgtaccgggccgtcgacagccggggccgcactgtcgatttttatctctcctcccgtcgtaacagcaaagctgcataccggtttctgggtaaaatcctcaacaacgtgaagaagtggcagatcccgcgattcatcaacacggataaagcgcccgcctatggtcgcgcgcttgttctgctcaaacgcgaaggccggtgcccgtctgacgttgaacaccgacagattaagtaccggaacaacgtgattgaatgcgatcatggcaaactgaaacggataatcggcgccacgctgggatttaaatccatgaagacggcttacgccaccatcaaaggtattgaggtgatgcgtgcggctttgttgaataaatcagatttcgggtaa

SEQ ID NO: 197661 - DNA, 426 bp, Klebsiella oxytoca
atgtgtaataacattactctttcgcaggaagaaaaatttatccagttgattgataaatatatcactcagcatcgtgatgatgctattaatgctgtgttttaccgaaagctgtatgtgcttttcgtcggatatcaccttaaatattattactcacgtaagcaatactgtaactcgtgttttcatgtcgataatattatgcagatgttcacaggtgtagtttcatcactcagggctaatgtgctaataaagctcaacaacagccatacgatgctttattgcttgaatgggcttgtggattatatttctggtaacctcatggaggttgaacaactctatgcagatttgctggcacagtatgaaaggaagagcatttcacattcattgaattacgtaccaccacctataggtggcaggaaaaggctatga

SEQ ID NO: 197662 - DNA, 321 bp, Klebsiella oxytoca
atgaaaacatatgcaattactacactcattgcctcaatttttttactgagtggctgtaataatgagccctccgagcaagaactttataatgcaatgaataaggtcgtggagcagacgaatgccatcgtcacatccatagccggtaaagatgtcccaaaagacgcactgcgggaattaaaatcagtcaaaaagcatgactgtgtgaaagtatcggataaaagctataaatgtaatgtgacggttgttgtcaataacgacaaggccaccgcagctgtcacaatggtcaaaacggatgatggctggcagatcgtagataagtaa

SEQ ID NO: 197663 - DNA, 387 bp, Klebsiella oxytoca
atgaacagacttattgcttctgtattttttatttccgtttcctttacttctggttgctcaacatcaggcaatcaacatcttaaaaacgaaacatcacaaagtctacagtcgcaaattactaaaaataagacaacgaaatcagaaatcaccgccctcctgggcgagccagatacaagaaccactcttgataacggtaatgaagaatggacttactttatgaataacaatcagtttgacgccaccacattcatcccgatcgttggattactgacgggtggttcacagacacaggcaaaaagactcgaaatcgaatttaaagacgaaacggtcagaaagtggacgctctcagaaaataacagcaagatgaaaaccagtcttattcaataa

SEQ ID NO: 197664 - DNA, 360 bp, Klebsiella oxytoca
atggctttagaacaagttatctacaatcttgaagaggttaaagggttctctgatgaagagctttatcaacgcctttgtgagagttgggggattacgaatggaaaactggcagtttggggcaagattctaaatggcccagattccgatagcagaaagctcccaacccgtcttttagagattaaatccctccaaacgggactggatactgaatatcccattaatgttcgtttgacgatggacaaaggtgtttttgtttccttcaaaagtgtcgaagagttatttggcttggaagatgggagttttgtctcatgcgagcttgctttagcgctgacctgctccccgttgattaatacaccgtga

SEQ ID NO: 197665 - DNA, 213 bp, Klebsiella oxytoca
atggaattatatggccatcaaccattatcagtggctttcccccgggaagcttccccatcatgttctgaaccaaaagcggaaaaggtgattgcttttcacggaaaggaagccagctacgcctataacgtgctggccgatctgaaagctgcaggtgcttcatatccccgccggaatatcattgccgatatgttccgccgtctgggggtggaataa

SEQ ID NO: 197666 - DNA, 231 bp, Klebsiella oxytoca
atgtacaggaagacgttaagcgtatgggcgatgacgatgttgatcgcgagctgcgcgaaagatttacccgccccggtggtggttgataccgcctgcaactgggtgcggattatctacctgactgaccacgatattgacgtgctagataagcagaccaagcgcgacattctggcgtacaacaaatcagcgcaggctaactgcccgcaaccaaccgaaaaggctacgaaatga

SEQ ID NO: 197667 - DNA, 411 bp, Klebsiella oxytoca
atgatgaacatcattatgaatgctgtaactaatttaattctccggtcggggcccgtcgcgaagcgatgggagctctctctagcgcgcgcggtattcctgcaccgtctgggtgaaatcagggatcgtaaaccggaaaatcagagctaccgcgccagtggactgacgctgctgacagcaactatctcgctgtggaatacagtgtatatggaaagagcggtcgatgccctgaagcgtaaaggggtgaagatcaacgagcaactgctgtcacatttgtcgccgttaggctgggagcatatcaatctgacaggcgattacatctggaaaaacaacagaataccggcctccggtaagtttcgtcggctgaggccagctaaagtagaaaggtcaaaaaacgaccttaacgtacaataa

SEQ ID NO: 197668 - DNA, 339 bp, Klebsiella oxytoca
atgattattttcgctctgctggcgctggtggccgtgctggttctgttgctagtgcgcaaatatacccggctggagtttgttggtcatgcccggttgctgcttaaaacatggtctgtccgcctgggtgctgccggcgctttggtcggtgtatgggcccaatcatttccggacgcagctcttcatgcctgggcgatgctgccgccggatatcaaagatattctgcctgcaaacattgtggcaatgattagcccggccctggtggtgctcgccatcctctctcaatacgtcagacagccaaagctgaaagaaatagccgatgagcagcaggaggcgcaatga

SEQ ID NO: 197669 - DNA, 930 bp, Klebsiella oxytoca
atgcctgatgctgaagatctcattctatgccctgtatgtgatcatgagttagatgttgaatcaagactgaaaattgatagctccaaggttagtttaaaggattcgataagctttcttaaaagtcaacgaaacttatatgatatttatataagaaaatataaggaattggactctaactttaatgacgtgagctcttttttgtcaaaagaaatttttcttaagaaagaagagattaaaaatttaagaaaagatatctcatcatctcaagataaaaatattaggacccttatatttaatgaaataactataggtcaaaaaataaacgagtgcaacagacttttagatgatttcggtagaataaaaaaggaacttaaagatatattagtggaattgtcagaaattaaagatgaaaaaagttccttaaaagtttctgacgagcgagataatgtaaagatatctgattatattggtagatttaaacgcttattaagcaaggaatatttcttttatacaagcaacgatataaatcatataactatacagaataaacccccatcaagactgcttccagttgttattattcgagggaatgttcaacccattagacttagttcgtctgcaagcgattttatccgtgctcaatgggctttttatctgacattactagaatcatctaaaaatcatccagggttcttggttatggatgaacctggacaacatgctatgaatgttgagagtatgtctgccttactgaaatatgcgtctttaacgaagaaacagattattatgtgtatatcaaaagatacacggcataaaactgatactgctaacttgagcaaagtactaggcaacttaggtggtaaatataaatatactttaatagatatagaccctgatggtaagaagtgtgttcgtgcatcatctgaataa

SEQ ID NO: 197670 - DNA, 474 bp, Klebsiella oxytoca
atgcctgatttcactccatctttcattaagtcccccggagagttactttccgttcccttcagcgccgccacggatttcaccgtactggccgatcactgcgaaaacttcgccgaaaccctgattgaaagcaacgatcccacactcaaaatggcgctttgcggcagactcaatgcctgtctgtcgatgttgcagcccacgttgttagaacccgttccgccccatcttattgaaagcctgaccgttgacaccctccctgcaaattccccccgtttcgatcctgaatgcacagcgctttgccgctactgcctcgctctgacgcagatgctggcagggcaaggcttttactctgaaatggagaaacaccttagctgcctgctgtatgaactgatcaactatttcgctgcggaaatgaaagcgcctcgctggctccgcactgcaaacggcctgaagtttatcgacgaggtggccgcatga

SEQ ID NO: 197671 - DNA, 207 bp, Klebsiella oxytoca
atgatgcaacaggactggcattctgccgacattatcgccgggctgaaaaaacgtggcacttcgctgtcagcgctttcccgtcaggcgggactggcatcctccacgctggcaaatgcgcttacccgtcgctggcccaaaggcgaaagattgattgccgaagcgttagatgttgcgcctgagaacatctggccttcacgctatcgctga

SEQ ID NO: 197672 - DNA, 549 bp, Klebsiella oxytoca
gtgaaagtgtcaaaagagcaggttcgcgagaacaggatgcgagttgttgaaacggcttcagaactttttcgtgagcgcggttacgatggtatcgggatatcggaactgatgtctgaggcagggttaactcacggtggcttttacaagcattttggttccaaggcagatttactgtctgaagccatgaactgcggttttacgcgatccgcagaaaaaacggagggtgttaatcgggaaaaatttattgaatattatctctcccgacaacatcgtgatgacaggggaaaaggctgcgtgatgtcggctctgggtactgatgcggctcgtcaatctgaatcaatcaaagagacgtttgcggccggaattgagcggcaactggaagttttaggaaccgaaaatggcacgcgcgctgacttgatcaataccatcgcgcatcttgttggtgccctggtgctgtctcgtgcctgtccagataattccgctcttgctgacgaaattctggatgtttgccgcgcgcgtcttattagtcatgactcttgtaagggatga

SEQ ID NO: 197673 - DNA, 1092 bp, Klebsiella oxytoca
atgacgaaccaggcattatttcaaccttatgatcttggccccataacacttgccaaccacatcgtgatggcccccctgacgcgtaaccgtgctggtgccgggctggtaccgggcgaactggcagcgacttactacgcccagcgagcttcagcaggattattgattaccgaagccacgcagatttcgccacaagcgcagggatatcaggatacgccggggatctatacgcaagctcaaatagagggttggcgcaaagtgactgacgcggtccatgccaaaggtggacgcatatttgtacagctctggcacgtaggtcgaatttcgcatgtcgatttacagcctggtggcgctgcaccagtcgcaccgtccgctatccgcgctgagacgaaaacctttgtgaacaacagttttgttgatgtttctgaaccacgtgcgcttgaagtggaagaaataaaggggatcatcgatgatttcagaaaggcagctgctaatgccattgccgccgggtttgacggagtcgaaatccacggtgcgaatggttatctgctggaacagttccttaaagacggcgctaaccagcgtaccgataaatacggcggctctgtcgagaatcgtgcgcgcctgctgttagaagtcactgctgccgtaaaagatgagattggcgttgaacgcgctggcgtgcgcatttcaccagtatctcctgctaatgcaatttcatgcagtgacccacaatctcaatatgactatctcgctgagcaactcgatgcattaggtgtcatatatctccatgtggttgaaggtgcgacgggtggccctcgtgatgtatcacccttcgattacgactcactacgccgacgctttaaaaacacctggatcggcaacaatggttatgactttgcgttggcgtccgctcaacttgcgggaggtaaagccgatctgttcgcgttcggtaggccgttcatctctaacccggatctggtcgaaaggctgaagacaggcgcaccactggcaccactgaatcctgaaacgctgtatggcggtggcgcacaaggttacaccgattacccgtcgcttactgagaccagccagtaa

SEQ ID NO: 197674 - DNA, 783 bp, Klebsiella oxytoca
atgactaaagcttcagttcttattacaggcgcatcaacaggtattggtgctgtctacgctgaacggtttgcccgccggggacacaaccttgttctggtcgcccgcgacaaagcaaagttagaggtactggccgatcgcctgcgacaggaaaatagtatttctgtcgatgttctgcctgccgacctcacgcaagccgtagatttagcgaccgtcgaggcgcgtctgcatgaagattcgcggattggtattcttatcaataacgcgggtatcgcccagtccggtagttttactgagcaaacgccagattcggtagagcgcctcatcgcacttaacgtgactgcactgacgcgactggccagtgcggtggcgccacgatttgcaaaagaaggtgaaggttcgatagtcaatatcagttccattgttgggctcgcccctgaatttgccatgacggtttacggcgcaaccaaagcctttgtgcttttcctgtcgcagggaatgaatatggagctgtcatcgaagggcatttatatccaggcggtgctccctgccggtacttacacggaaatctgggatcgtgcgggtattgacatcagtcattcggcaaaattcatggaagtgggcgagttagtcgatgccgcactggtgggctttgatcgccgtgaactggtcaccatcccacctttgtataatgcttcccgctgggacactctcgatgcttcgcgtcaggctctgctttcagacatcaaacaagatgaagtcgccgaacgatataaagcactgtag

SEQ ID NO: 197675 - DNA, 936 bp, Klebsiella oxytoca
atgcagaacggtcttccggttgttctgcacagaggtaaatctgacatacattccttacagcgcgttttctcattccctgtgagaaatctcaaacaaatcaagaaggtctcgttcagcatgacaagaaaacgtgtagcgctggttacaggcgcttcatcaggtatcggcagagcgtctgcgacgaagcttttggccgcgggttatattgtttacggcacaagtcggcgtggcgcgctggcgggaacgcatccgtttccgttattgacgcttgatgtgacggatgacacctctgtcgcggctgtcattgatgagttgctgcgcctggaggggcgaatcgatattctggtgaataatgcgggtttcggggttgctccggccgctgcagaagaaagctctctcgatcaagccaggttcattttcgacaccaattttctggggatagtcagattaacgcgtgctgttgtccctcatatgcgccgtcagggcagcggccgtattattaacattggttcgatactcggcatcattccgttgccgtatgtggctctttatgctgccagtaaacatgcggtcgaaggatacacaggagcacttgatcatgagctacgcacacaaggcatcagggtttctgtcattgaacctgcctacataaaaacccagtttgaagccaataatatcgaaccggatgccaggcttgaagagtatgaccttatccggcctaagctggcgaaagtggtgagcaaagcaatggccgaagcggaaagtccggaagttgtggccgacgtcgtggttaaagctgctgaggctttacgaccaaaggtgcgttataccgcgggaacgctggccgctaaactgaattttcttctcagattcgcgccggcaaaaatccttgataaggtagtgcgaaatagccttcagcttgatgcgaaagaataa

SEQ ID NO: 197676 - DNA, 228 bp, Klebsiella oxytoca
atgtgtgttttagcgagaaatgctgagcctacgccaacccgatatgctctggccgccggtatcagcacgatatctttcatgttagccgtgtctggcatgttcgaatggtgcgaaggtcatgttaacgggcaaattctatttgctgtgtctatcgagctgctactgggaaccgcttttttactcagtaatattggcgcccggaaaatcgacaggataaacaacaaatga

SEQ ID NO: 197677 - DNA, 1020 bp, Klebsiella oxytoca
atgaagactaagacgatgaaagcgtttacgtttaaacgctatggtaaatcctctgaactgggattagatgacataaattatccttccgccggtcctgacgaaattctggttaagatttacgctgttggcctgaatccgattgacaacacgatccccaccgggattttcaaaccggttttgcactttaagctgcccgcaacactgggtagcgacctcgctgggattgtgattgcgacaggaagccgggtgacgcgtttcaagccaggcgacgaaatcttcgcgagtattttcgacagaggaacgggatctcttgccgaatttgccgttgttcctgaaaatctcgcggccataaaacctgcaaatatcgattttgtgcaggcagcttcacttccgatggtaagcctcaccgcctggcaggcgctcacagaaagagcctgtttgcagtctggacagaaggttttcatcccggcaggttcaggaggcattgggagttttgccatccagttggcgaagcaccttggcgcaaaagtggcaacgacgacaagtacagtcaatgtcgaatgggtgagtcgtcttggcgcagatgaagtggttgattataaaaagcaggagtttgaaaatgttctgagtgggtacgatattgttctgggcacggtgagaggagatacaatagaaaagtccactcacattcttaagcctggcggaaagattatttctctcatcggaccgttagatgcttcttttgctcgggatcgacaattaaatctctttcttcgtgcaatatttagtctgatgagccgcaaaatcatacgtcttgcaaagaagaggagcctagcctattcatttctctttgtaaggcctgatggcgctcaacttacgctgataagtaaactcatagaagcggaacatatcgtcccggtaatcgacaaagttttcccctttgccgctatcaaggatgctcttgactatcttgctggaggacatgcgaagggcaaagttgtcgttaagatacaagattga

SEQ ID NO: 197678 - DNA, 1050 bp, Klebsiella oxytoca
atgaaagcattaaatctttattcgatacaggatgtaagatatgaggaagtggcgaaaccatccttagtgaacgatcacgatgtcttaattaaggtcgagattgccggtatctgcggctcggatatttcacggtttggaaagctgggttcatatcatcccgggttaacctgggggcatgaattctcgggagttgtagagcaggcggggcctgccgttacgggcctgaaaaagggcgatcgggtgacggcatgcaactgcttcccctgttttgaatgtgattattgccagcaggggcattacgcgcgatgcaccgaccttaaagttcttggcggccataaaaatggcgctttcgccgagtatattctgattcctgcgcgcaacgttctgaagctccctgactcaatggatttcgcgacagcgagctttattgagccttccagcgtggtggttcatgggctgcgccaggttgatatcaaagccggcagtcgggtggccgtggtgggctgcggaacgatcggtcttttggccgtgcaatgggcaaagatatgcggagctggcgaagttttcgcttttgatactgatgctcagaagcttgctattgctcaaagtacgggagccagccatgtattctccgtacttgatgaaggatattttccccgttttcagacgctgaccaaaaacctcggcgtagatatcgttatcgagtcttcagggaacgccggcggtatcgccagcgcgttgcttcttgcggcaaaaggcggctctgtggttatgttggggataccttatggcgatgtcagtttgccgaggcttaactttgaaaaaatcgtgcgtaatgagctcaaagtgcttgggtcgtggaattccatatccgcaccgtttccgggccaggaatggcaaacatcaatacgctatctgagctgcggagcgatagatattaagccattaatcagtcggcgggttgctcttcaggacgccgctgccatttttccagagctgtacaatcgacagagtttttttgtgaaagtattgattgatatcgctagctga

SEQ ID NO: 197679 - DNA, 270 bp, Klebsiella oxytoca
atgattagacaaagcgtcagagtagtgaacagcaccggattgcacgccaggcctgcggcatctcttgccaaaattgtgaagaaatatacatcttcattaaccttagtaaacaatggcaaagagattcaaattaagggaatgatgagcattcttggcgcaggagtaaaaggtaataccatgattgaccttatctgtaatggtgaggatgagcatgaattaatgtccgaattaaaaacagcatttgctgctggtttcggtgaaaaggattag

SEQ ID NO: 197680 - DNA, 738 bp, Klebsiella oxytoca
atgagcagcgtactaaaggattcagaaattccgttgtatatgcaggtgtcggaatggattcgtgaaaatatctataagggggagctagggaaaggcgaccgtattccctccgaaaaccagattatggatattctgcatgtcagccggggaacggtaaaaaaggccgtaacgatgctggtgaatgagggcttgttggttcaggtgcagggaaaaggaaccttcgttaaaaaagagaatatttcatatgccctgggtgaaggattgttatcgtttgcggaatcacttgccagccagcatttatcttttactaccgaggttattgattcgcacattgagaacgcatccaaaagcgtcgctgagaagctaaaaattgaacccggcgcccctattctttatctcaagcgtgtacgcagcgtggaaggggaaagagttatgttgattgaaaacagaatcaatatcgcgctgtgcccaggaattacggagattgattttaataaacagaatctgtttccaacggtcgaggaactctccggacaaaagatagtgtattccgagagtcggtacgccgccaaaattgtcggtagcgaacgtggacattatctggaagttaatgaggatgccccggtcctgcatttagaacagctagtatttcttgaaaacaaaatgccatttgatttaggaaacgtctggttaaaatcagataaatattatttaggtactattctgcaacgaagatag

SEQ ID NO: 197681 - DNA, 1512 bp, Klebsiella oxytoca
atgtatacgatcggaatcgatattggcacgaccaactgtaaggtgtgtttgtttcaggttgctgtctttgagttaataggccaatatagcttcaggaccccaaaaattattgctggggacaatacggattttgatgttcgcctgatatgggatggcgttgttcacggtcttaaaacaataaccaggaatttgcctgcgggaaaaaatatcagtgccgttgcggtagccagcgtcggcgaagcgggcgtgcttctcgatgaacatgataacatcattggcccttgtttaacctggtacgatacgcgaccaaaaccgcagctcgaaaatattatatctgagctggatatcgaaagcatttatgagataaccgggatccctgcgcactcaaattacagcatcaataaaatcaaatggcttcacgataatattaaaaatgctaaagaaggccgcaagtggctgtgcctggcagaatatattgcttttaaattatcgggagagaagcgttctgaatattctctggcctcacggacaatggcgctgaatattgcgcaggtggcatgggataagaggatgctggaagccgctgagctttcgccgtcgctctttagccctctggtctatgcgggaacctctatcggcagcgtgactcctgaggtctgcgttctgaccgggctgacaactgatactcaggtctccattgccgggcacgatcatatgtgcggttccgtcgcggtagggttgaataacgaaaatcagatcctgaattctacgggtaccacagaaggtttactggtggtgaccgaggccgtcaacaatagtgaaaatttcttccgcgcccgcgtttcgaacggcgtgcatgtgctgccggggctgcattctctgtatgcctcattaccttctgcgggatattccattgaatggttcagaaatttgtttgagcttgatatgcccgcctttctgcggatggttgatacgctgaataatgagaaggatttagccgctgccgggaagatggacggcatttttattccgcacctgcgcgggagcggccccccggaccgtaatacttggtctcgggcgctaatctacggtctggacgataaatcacggcctgaagatgttctgcgttttgtcttccagggattgtgttttgaacttaagaatttgctcgatttgtatgaagccctgaccgggcgcaattatccggtggtcaacgtgatcggcgccgcctgcaaaaatccgtactggctgcagcttaaagcgaacattctgaatcgcgaaatcatcgcctgtaatgttgatgaagccgtgggtaaaggcgcggcgatgttagcggcaaaagccgttggcgttgatatcgatagccgcagcgttacggcaacggagcagctgatgtgttacctgccgcagagcgacgcggcggcgcattatcagcaaatttttactcaggtgtataaacctctttatgaatccaagatgcgtacagaacatctttgttatggagttaactga

SEQ ID NO: 197682 - DNA, 465 bp, Klebsiella oxytoca
atggcaattgcatccagtattgataacgattttatcctgctcaaccatccagggggcgagcgcgaagctctgtttcgcgagattaaccaacttttatcagataaaggctacgtcgaggagacctatctccaggcccttattaatagggaagagaataaccccaccgctatgcaacttgaaaaaatcggtgtggcaatcccgcacgtcgatgttgagcatatcaaagaagaaaagctggtcgtggtttcatgccctgaaggaattgagtttaaacaagcggaagatccggatgaagttatgaccgtacatgtcatattttttcttttgctaaaagaaaaagatgcccatatcgattttctaatgaaacttatcggtttattcagacaaaccgagaaaatggatacatttttaaccacccaatcacctgaagaagtgaagaaactcctcaccgcagcacttaattaa

SEQ ID NO: 197683 - DNA, 1149 bp, Klebsiella oxytoca
atgtctcagagcaaaaattggtctccagagcttgacggtttacggggttatgcctcactttgggttgttctaggccatatatgtaatttaacagaatgcaacatcccaataataagtagtccaagtatcggtgttgacgtatttattcttctttcaggctatttaatggcaaagaattacactgaaagacagcactttgaaccatggacttcatataaaacagtcatatcattttgggtgagaaggtttttccgtattgctcctttattttatgttttgctaatcgtagcaattttattaggtaatatgtttggtgacttcagggaagcaattggaaacgtatggctctccactcaaacagatgcaggcaaatatagtgactcatcagttgcaaacttttttgctcacatttcgtttgcctttggcttccttccttattactcagcgagaaccactatccctgactggagtattggccttgaaatgcaatactatgctattttcccagttataatgttgtttattatgtggtttggattcataaagacgtcgatatctctgatgattatctgcgtcatctcgtcacttttggctccagactattttagtgaattcaccagaccatcgatgattgcatttaagctaccgctatttatttccggaatgcttatttacaaagcagcggctgagaataaattcctgtattctttaattgctttactggcacctgtaagtgccttagcaattggttacttgataactccgttgagaatggtcattgaaatatttattgtattagggatggcaacacttcttttcccacacaagaatggctctcttttaaaaatcatatccgattctcttaaatcattcttatcagttggttttagtagattcttgggtgaggtttcgtactcagtttatctccttcatctaatgattgtattgccaaccatcggaatgttaattgagtatccagaattcatatcttttcatcctataattagattcctgatagccgctgcaatatcaatacctataacatatattctatcaatatatttatataaacatgttgaagtaaaaggcattgctattggtagaaaagttttgaaaccaaaaggcaatggaatgaaagaagttgcctaa

SEQ ID NO: 197684 - DNA, 1254 bp, Klebsiella oxytoca
atgaaaggatacagtaggcgtgatgccatagacatggcggttaaattcggaataggtgccgctttaatggcctcaatcccaaagatggcagtcgctgcaggatcattgaagctaagtgtcgctgactttggggcgaagggtgacggggtaactgatgactcttttgcttttcagaaggcctttctaaaggcaaatgaggccggtggcggtactgtgtactttccaccacctcaaaaggaatacctgcttaagtttcctgtatttatctttaacaatactgaagcttacggggatggaaaggatactcgaattgttttcgagaatccggttttcagtaaggggcgcggaggattcgttatcggttcaagcctggaggcaaacagagagctggcgttaacccgattcaataaccgttccctgtccactacgataaacaataacttcagaaatcccgttcagaggcattatattcgcgatacaccagagcttgctcaggcggatggtagtagcttgcatgatattttcctagaggccagattcactgccggctctgaaagcaactggggaggatatggaatcaacttcgtcaacgccattaactgccatgccagtaatatctggggtaaaggatggacccaacttatcggaatgggttctgatacaccgcctgaaacaccatcaaaccataactgcagcgcaaaaaatctgtatgttctcgagcctgatatggtcaggacatattactctatagggttcatggccaattcaagcaattgcactattcagtatgctaaacaactaaagcccatgactgaaggaagtaacaacggtagtggtgtggcgctgaatttttgcgaagattgcattgtttcagatattgatattcctgatttgggaagaactcaaacatcagaaggggttcttataaacaattcatccggttgtttaattcagaatataaatattggaaacgcaaaaaaagcagtttccatattttttaaatttaaggatacgcaaaaagaattcaagccaaaccttatcaaaaatatcaaaggttcaaattgcgatattgtattatctatctactcaaaatttaacgttataaaaaatataaaaggggaaaactcaagaagggtaatcgccctgatgaataccaatgcagcacgcaatgttatcagcgctcctgaggcggacatttccaccccaggaaaatcaccaattaatacattgatgaaacttaataaaatagaatag

SEQ ID NO: 197685 - DNA, 1206 bp, Klebsiella oxytoca
ttgagacttaaatttaaagtagacgacatagcaattagattatatctgtttgctcttttaataattacacttgtgccatttgggagaggcagtgtttctggtttggagccagcggttccatttattatcttatcctttattctattctcacttacaaagaaacatattgacaagaaaaaatggattgttatttttatgttttttctttgggctgtgtggataatatccgggatagcatttagctacatcaattatgataaattagcagatcacgagtcatcctttttgaggtatgtgcgacttcttgaaatgtattttccggcgcttcttgtctttgtctttatcaatgagttaagcccgaagcaaaagaaaatagtttacagattttttatattcctgttctttgtggttactattgaggctgcatggggctggttcatgcaaatggacattctagtggcgaagcaaaggtttagctatcctgggatgggttatatttatagggctggaggggtagctaatgactccagtgcttatggtagtcttgcattgatcttaggtgttgcatctcttattggcctcagacatacgagtaaaagcaaaatcctttatcttttgataattgttggtcttgtattcaatatttatatctctttaacccgaacccttatttttgctctggctatgtatgtgtttttcgatttgataagaacgagaagccttagcatatttaagatgctatttttcgcggcaatttgtactggaatagtattctatggtctaagcaatgattacatcattgccctacttgatagggttacaggttccgggcagatagacatcacgtcaggacgacttgcaacatgggctgctgtgcctgatattcttggggaaaacccaatctttggtgtggggtatcgcatggctactgacaagtacggcatcgtgcctgataatgtgttcatctcatcgatactggaaacaggtgttattggcgtggctttgtacatgggaatgcttgtatctctatgctactgcgtatacaaaaacaactcagaaagccttccgttgctcctggcatttatcgcttccggaatgtttgtcgatatatcaacattctggattagcatcccggcgttaatcttctttgtggcggttaacagtcagcgcgatgacgatggttctcgccaccgcgttagagaatag

SEQ ID NO: 197686 - DNA, 1071 bp, Klebsiella oxytoca
atgtctgatttaaatgctgtcaatgatcacggcgtgcgaatactgagcctgaatggaggtggtgtcagggggttgtttacaatcagtgtacttgctgaaatcgagaggatacttatcctcaaaaaccccagccaagaaatcagaattggtgagtactttgatctcattacagggacatcaataggtggaatattggctctcggcctcgcctctggcaagagtgctcgcgaattggaaagtgtttttttcagaaaagcaaaagatatttttccaagcaggtggtctctgctgaatttgttaaaatctctatgtgctcctatttacagcagttctcctctacgtgagacagttgaaacgatgataggtgctgaaaccacgttcaatgacttgagacgtcgggtgatgatcccgtcagtaaatctgtctacgggaaagccgcaatttttcaaaacaccgcataatcctgatttcacgcgcgatgggccattaaaactgattgacgcagcactcgcaacctccgcagcccctacatactttgctccgcactactgtgaagatctccatgcatactttgctgatggaggcttagtggctaacaaccccagttatatcggacttctggaagtacttagggatatgaattctgactttaatgttaaccaccaaaatatacacatactaaatgtcggtactgtcggtgaagaatactcacttagcccacggttacttagcaaaaaatggtggaatggatattgccgcctatggggagtaggtaaaagactggtgctcacaacaatgacggctaaccagcatcttcataaaaatatgctcctacgtgaactaacactccatgatgcattagaaaactacatctatctggatgaagtaattcccaatgaagcagctagtgatatcaccttggataatgcaagtgaaagttcactgcaaaatttaagcgcacggggaaaacaacttgcgaatgttcagtttgcccaaaaccagaagttaaagaatttattcactacacctgcaaaaccctttgagcgcacattagcgcaggagacaaactga

SEQ ID NO: 197687 - DNA, 1767 bp, Klebsiella oxytoca
atggaagacggacaactccataaagtgatgattggctgcgggtatcgctacacgcgtgcccgcaaccttcctgagaaagctattctgcacagcaaagagcgccgtaaaggctattacacgaaagaatatcaaactgaagccggtaactttaatgttgcattggtaatccgcccagacccttttattgaactaccaatagcttgtatatttgaacttcctgaacagttcagagaccaccttataccccatataactcaagaaggcttcctgtgctatgttgagcaaatggaagctgattgggattcaaacgatcttgaagggacctacagagaagttgatgcgcaaataaacaaaactctcatgaattctgtatctgctgctttagagggactgaatgacaagagagagttagaaggtgaattttctgcatactggcggcctagcgaaagtatctttattctgtcaaatataagtcgagaggcaaaactaaaaacctatttttcgaaatcatatggatctgatgggacggccagaatagagtatataacagtcgaaaaatcgtcaccggaggactcgaaaagcgttattgcaaaatggcttaaacaaagatatttaccacaaaattcgttaaaagaatatcccatcagcacacattacatttctgtaaaccccagtcgccttgcagggatgaaatggccaccggcttcattcagggatttattggattggcttgaaaaagcggatcataatgccagaaatagagttattgaacacatcaaagcagaatgtaaaaagcggtatattttcctctttgatgttttcaatcaagatatatttgctacatacgttgaatttaacacacagtctattgatttcggtaggcataaaaaatcagctaaaaattcgacagtaaaactagcgttaatgttacgtggcaaaagcgtttgcaccagttatcagagattaggggttgttcgtgcagatattatgacactccttagtcgaaacacccaacgcgaaggtgcagcaaatctttcagaaaaaaaaatcgcactgttaggttgtggaacaataggtgggtatctagcagaattattactccgaaatggggctggatgtagtaaaggatacgtacatctttatgatgatgatatatacaagccaagtaattttggtcgtcatactttatcgtcacatgattttggatggcccaaatcccattcacttgccgcaagacttcaagattccgtgtatttacaaacaaatattgtcggatttaacaagcaatttcctatcagcacagatataatacaaaagtatgacattattattgacgcaactggtcgtcctcctgtatcaaaacgcatagccgcagtagtcagagagatcccatcggggcaaaggccattcattattcatgcatttaatgatggaaatggacgagtatcaaaagtattcattgacaatggttcaagttgttatgggtgtatgatttctaaccctcaaaaataccgaaatgggatagattcccgtttttataatgtcgatatgtctaatgaaaaaaacaaaacctgcggtagtacttatactccctatgatgcggcagtaagtaacataacggcatctttggctcaaatggcagtcttgagtacactagaacctgaattaaaatggacttacaatgaacacgttcttgagggggggcgttcgctaaagcctcaaatgttgccatgccagcctaactgccctatttgttatgaacattaa

SEQ ID NO: 197688 - DNA, 486 bp, Klebsiella oxytoca
atgaacattaatgaactcgtttttatcgatgatttagacaatcatattgttattatgagtgatgtcgcacaaaagctcatttcatatcgtcaaatacattatgccagtactgaggcaggaggtgttctaataggagagcgcaggggacaacacattgttataactcatatttctgagcctggttatggtgatattagatcacgtactcgggtagagagaaagggagttcatcaccagcaaaaagttgatgttttatttcaacagtcaggcggctttcttatttatttgggcgaatggcatacgcatccagaagattttcctcaaccttcatatatagacataaaatcgtggttaactggactgaaagcgactgaaccaatggtcatgctcattgttggtagaaaagggttatgggtaggaaaaaaaattggtaacaacataaatattttaaaggagaaaatagcgttcaagagtagtgatttatag

SEQ ID NO: 197689 - DNA, 603 bp, Klebsiella oxytoca
atgtttagaataattaggttcgatcggcttctaaaaattgtatcattaacatcgttgcttattactatatttttctttgggctctttaaagcactccttgcttctgatttgagtttgttaaaattattatcaatttcatctgtaacgtcttttattgtaaatttcacccttctctcatcatcaatatccagaaaaatatggcgagcgttaaggtttttcaagaaagatatgtatcctgatttaaatggtatatgggttggtcatatcattacagaaaaaaatggtgagtttgaagttcgcgcaaaaataaagcaggctcttcttgttactacgattgaaatgcatgggccgactgttaagtcaattacattagaagcaactccgatcaaagagttgggcattaataaattatactacgtgtatagatcaacacccaaaaaccctgcttggagtgaatatattggttcgacaatattcgatgtaattgaagatagctctgcgctgcagttatctggaaggtattatacagacagaaagtctgtagggagggtatcaattaaaagaatatcgttacacactgaagctgatatatcatattattag

SEQ ID NO: 197690 - DNA, 417 bp, Klebsiella oxytoca; identical to SEQ ID NO: 84133

SEQ ID NO: 197691 - DNA, 525 bp, Klebsiella oxytoca
ttggccccacagaggataactaaaccttttttttggatattctctaaaagcgaatggtccggtttaccgggatgcttacatccgcagatcactcatgcaatggataaggctcaggacaacatttccagcggcgacactattaggattgcgttcggtgtggccacagttgcaattgccagcctggtctcaggttcgcaaataccagaagggaatcgcgtaatgcttcttggcctttacattaaggccaggcagtacctgttgacggctgcagccgtcatcatggtgcttgctggcgcctactatctcggtggccaggctgctcgccggtcaatggaaatcaaagcagagcgtgaagacagaaagcgcctgcggcacacattggatgtgaaaaatgacgttatcaatgcagtccgaagctcggatgatactaccgttgacgctcagcttgccgctgattggcggctcatggggtgttgttttgcgatgctgcaaacccgatttatgttagccatagcgatcagctaa

SEQ ID NO: 197692 - DNA, 396 bp, Klebsiella oxytoca
atgcacgacgtaatgaacgaaaaacgttctattcagacaattcgtgatcataccagcatcattgccacgcacacttttaagcagcatatgcttcaggtgcgcacacttgacaatgaagggatgactgcgcctgaagattttcacttcattgtcaccttcaaagatgacgtggacaatgctgatgctacggttaagccgttggcagaagcagttctgcttggtgatcgcgttcgtttcattgttaaacctgcgaaacagtaccctgagatggctcgatcaatggccgatctcgttgaggttattgaacattctattcgtcgtttctttgatactaatggtagaatcatgagcaatattaaagctaatggttctgctgagaaatggctcctacactaa

SEQ ID NO: 197693 - DNA, 744 bp, Klebsiella oxytoca
atggctcctacactaatagaatcctacagaaaagatctgagcgagtggcctcacacaggggacactcgttctgttcgtttcggcttcctccttgcctccaggtcacttttcaaaatctcagaacacgaaatcatcgaaccagaggatgatgtcgttcgctacgttctcattgagcgtgtaggcgcgaacatccccgatgttgaactgagcaacatgattttagactacgaagatgacgggctaaacgagcaggacattattcaggaacttctccgatctggcgtcgttgatgaggctaataacgtcaccgctggacgggttgggcttcgtaactatagcttcgttgaagatggccaggacatagattgtttccaggtcgctggagcttatatccagcctacgagccatcgtaaaggcatcatgagcaggacatatgttttcatgctgaactggtatgagcatttagtttgtgatgatatgcagacgatacctggtgcgcgcatttgggctggcccgatgattcgtgctggtgaagtgcgaatctataatgagaatggcggttcattcgaagatgtgcttggcgagaaaggtattggtaggcataacggcttcctgccctggaaccgaggtcgcttatttgacacctcccaatgggaccctaatcagctccaaactacagttcaaaaatttatcgtgctgattatatcccgaggaacctgcctcagaattggctttatcccctga

SEQ ID NO: 197694 - DNA, 1197 bp, Klebsiella oxytoca
atgtctttccctatacgccatactaaaaagaaaactgtctccgcaataaactcaattagttcattatgttctactcttagtataactagagccgaacttgaaacagcattatcaactcctgataaagaaagatatactccttctgaagttgaaaaaagtgatggtaccacaaggaatgtttataatccaaaatcattgattagaaaaattcaacgtcgcattaacaggagaatatttaatatatacactccaaaaggacgagaaaagaaaaaccctcctattatttgggcgtcgtatctatttggttcaataccaaatcaatattacattgcatgtgcgcgagttcattgccaatcgaaaagccttttaaaagtagatattaaaaattttttcgataatgttcaagcaatacatgttgagaatatcttttctaaatttttcttttttagcgatgatgtatcacaggctttgacaaatatctgctgttatgagggacatttagtacaaggagcgttaacgtcaagctatttatcctgcttatgtctacatgatgtcgaatggaagattgttgataggttatctcgaaagaatttaaggtatactcgcttagttgacgatataacagtatcatcaacagtgtctaattatgacttttcatatgcaaaagatataattattaatatgttacatgagaaagatttacctgttaatttaaaaaaaactcaacagtattatacatcgactactccattaacagttcatgggttgcgtgtttcattttccgagcctcgtctcccttcagacgaggcaaaacgaattagagcatccgtacgcaatattgaaagcttagccgctgaaagaaattaccgtacaactcatgcttatagaaaggatttcaacagatgcatgggccgagtcaataaacttaagcgggtaaatcactctcaatatgaaagcttagtaaatcgactttttaaacttttccctttaccatcaaaaaaagatcttgatagggtgtctatttccttagccaaccttgaagatgattttcataaaggtaagcatgatacttattggtattggaaaagatatcatagagtgcatgagcgtataaatattttacaacgaacctttgtccgtgaagcgattatatttcgcaacaaaacaaaagctataaaaccgagctacatacaataa

SEQ ID NO: 197695 - DNA, 747 bp, Klebsiella oxytoca
atgaaaaattttttcaaaaattatatccttctagaaaaaattgattcacactctcttagaatcttgcttctatgtttgattactattgttactctaggcattatactttttgtaacttcatttattttaactggagtgcaagaaggtttttttagtcggactttttgtttcaataatacctgtatttcaaatttcactaacggttactcacaatcaatattaatattgcaagcaacttttatattattggggttagtagctagcataggtggaataattgttgcattgcttgggtatactaatagtgtcagcgtgtcagctcttggcaaccatatatcacactttaagatatttcaagagtacttatcatacgaaataaataaaagagatcgtctatccgcatcttcatttgatatattcaaatggtataacatcatttttaataaatctcgttctggctctacatccatatctcaagactactgcaatctgattgtaaaattaaacagtgctataagtgactcaaatactgcatgttcactagccaaatcaggttctttctcttacgtaaggcatcaaaataatatcacgaatttgcttcgagattttggaataatccatcctcgattacctagaaatgattattatgaggttgaagatcaagtttttgaattgatagacaatatgaatagagagttttgctattcatcatccatagaaccactagcaaaaagactgtatagatag

SEQ ID NO: 197696 - DNA, 1242 bp, Klebsiella oxytoca
atgaatagtgatgctcgcgctcgctatgagaaacgtaaacagcggcgcgtgtatatctacattgataatattgagccgcaatcaaagaaaatgcccgaagccgaacgggataaattccaagaagcggtagccgaacagctaaccactttgaaacgagctacattcacaggcgacgttgcactgaaaattgatcttgcgacaacaagtaagaacgcgccgcaagcacacaccatcgctaagaacttgttggatcttctcggcgtacgccgctcgaatgtgaaatggccacgccgacacctcttgtataaagatgaccggcaaattcaggcgctctccgtttcctgtcgccacggagaaatctctcctgctatcagcatcggagcgcagccattcgggtctatgctcgatgatcttgaacttgcgactgaagcaaggcgctccatcgagatgagcagcgactatttttatgagcaagattgtgaggccgactggataaagacattccgtgacctcatagacaacgagacaaattaccgtcgaagtctcggtgacgatggatacgatgcttacaggaagatggtacgatggtacgcgcagcgggccttgctcaagagcagcggcgtcaccattcccgttttaaactggatgtacggtggtccgaaagacattcctacgggttttgggcaagaaatgtgggcgagcctcataagcgcatccaagatccgcctgcaggttggtgaactaccgattactaaaggcagttcggacgaatttaagcagaacgtctcgaaagaaatcaccgccttcaagaatcgctgggattggcttatcaatcctcttgtcgtttcggtagctcttgaagtcattatccgaccaaacccggcgacaccgccggccgtacttcatgatttggacaatattgtccgggactatctgcttcctagcatcgttcctaaattcggcacggtatcagatcatcgctggacaattgacttcaacgaattgcagagaaccaatcccgagattgcaaaatcttgggggccgaatcccatgccaccgccaggaacaaagtcaggtgtcacgcgatacgaagcgtggcggcttccacccgttgcgggtgagccgggattcgttagcgtagccctccttgcagacgtaggcgcgaccggcgatcacatggatgaaatcgacaaaagcatcaaaacatgggcatcttatagcgatcgtaatgaccgatactaa

SEQ ID NO: 197697 - DNA, 1113 bp, Klebsiella oxytoca
atgcaagccttcggtgttggttcgttttacttcagcctagacttttctaaaaccccatccaaccttacagttggatcatttgtgagtgaaattcatagagtttttgattccatacaatcagttagcgatttggagttagattttgatgaagaaatgtgtccctcagatgcactcataaatcatgaagtttgggatgataatacaatcccacctgatactatatttccttttattccgctacttgaggttaaatttacactaacactgctaaagacttatcaaagaaaattacttggttatatagatgaatcagaaaatagcatgtcgacagatttattttacgtagaaattagttacaattaccgatcaagtatatcaattgtaaaaatcgataacagcaatagaaaaagcgttggttccaatgcaattaaagttgttcgggattatcttaaatctgaatttagaagtgcaaacacttttgtcaccttcaatatattaggaccttcaccatttcatgcagacttttacctttctcatgatgacactttaaaaaccaataaaataaatcttattgaagaaattggctatgacgaaatagaaatcattcttggaagagatgatgaatcatcgtccctaagccaagaaaccagatttatgttggatttcaaaagcgaactggatactttttatgattgtattactatgcgtaactggtttatgcaccgctgggttgccattcgagaggacattgaaaaattagagacatatcagaataagcgctttagtccattgttttattttcaaaagagaagacttatatccagcatactccttgagctttggaaatttaacaacgataaaattgccgctgaaaatgaagtcttaaataaacactcaaagttcccctaccataaagatggtgttataaaaaatttcattgacaaagaaataagcagcgccccaaaatactccgtcaaagaaaccatagagttggtgcaattttttgagcaaaaaaactctaagtcatttgaattaggcatggctctgataacatcaattattggcggtgtcataggtgccatagttacttctctgacgtcattatccacttaa

SEQ ID NO: 197698 - DNA, 1200 bp, Klebsiella oxytoca
atggcttttactaaaatcagaatcgacaatcttttttgctttgaaaacagtgtccttgacctgagtttcacaagaaccccagttaatagctcactggaaggcgagtacattgaggggtatgaaaagttttacttcaaaaaagtgtgcattgtatctggcgcaaatgcatcaggaaaaacatcacttggccgggtaatgatctccgtactacgatttcttagcaccggggtttttaatccggaaccattaaaattaatggacaaaaagaaacctgcttatattgaaatggacttctttcaggcccatttgaaatctttattcaggactggtatttggcttaaagctacagacgactctgtcactgtagagaaaattgctatggcatcagttgatttacgcaagtccgattcttgtgcaaaaacgactaaaagattagacattgtctggaatgatcaaaaattcgaactaaatggaccaaacaaatatttctctactgagaatgctaatccaaaggagttttctcaatatctagataatttagggtttgttctaggatggcattttatactttctgaaaaccaagaaaatacgaataagatatctcgtattggaagcaatattctaaagagtatacttaaaacctttgacaatacagttaaatccgtttctggactaattgttaaagatgatgaaggcaatcaaaatctgcaagggtactctgtgattttcaataatggtgataaagtcattattgacatggagggggagataactaacaaagatagattatcccgagggacttatgatgctgtaaaaatatcgcacctcctttcagggatacttgaagataaaactgaagaaactgatatgaatttcccatgtagtggcctttattttttggatgagaaaatggccttcactcatacagagttagaaaaaataatggtcactttgataatatctaaactctgcagatatggtcagtttatatatacaactcataattacgatatattgagtttagatttaccgactcactcgtttacatttactaaaaaaataaacgggtcaaccacatttattgaagcgacctctcagcataaaaagaatgaccgaaatcttttaaataaagttaaaaacgattgtttcgcgaccatccctgatgtttcattaattgaagaaatgctttttgaggattga

SEQ ID NO: 197699 - DNA, 519 bp, Klebsiella oxytoca
atggcggccaaaaaatttgctattgtcctcgttgagggggaaacggaaaaggcattattcagtgatttcaaaacatcgcttgggtaccctataaaaaaaatagtgattgcaaacttatggaatgttagcataaaaaaaatcatgccagctttgactgaagttagtgagatcgtagtggtttttgatactgaccgaattgagaacatagaacgatttaaaaccaacataagtcttctaaaggccaagaagcatacaatctacttatttcaacaaacaaaaaattttgaagatgagattgctaaagcgtgcaacataaacaaccgtgctttgtattcttctttttgctcaaaaattgtttcctcagataatttcaaaaatgaatttattgctttacacaacagaatgccaaagctcgacggtctcaacattaacaaaagcttactatggagcagaggcataattccacaattgaatgattattcttcacatacctcatcccatgatgcttatttttcatag

SEQ ID NO: 197700 - DNA, 1773 bp, Klebsiella oxytoca
atgtgtaattctatcacagcagggaatgtaaatatggttgctccaactactattgagcggttaaggcttatcaccacccggcaagaattagctgctttattaaatttaaaagctcatttcttaaccaacatcctgtatagaaatggagtcaacacacaatacagccagtttcgaataccaaaaaaagatggaagctttaggctaatatcatctccttcatctaaactcaaagatattcaaaagcgtttagcagaacttctttacgaatgtcaggcgaatatacattttgaaaggaaaataaatcctgtattatcacatggttttgaaaaaaataaaaccattgttacaaacgcaaccagacatcgaaataaaaggatattgttgaatattgatttggaaaattttttcgagtcaataaactttggccgagttcgtggtttttttattgcgaacaatgattttaaattatcaccattaattgccacaactatagcgcaaattgcatgttttaataacagccttccacaaggaagcccttgttctccaataatcagcaatttgatatgcactattcttgatataagattaagcaagttagctcagaaaaatggatgtcaatattctcgatatgctgatgatattaccttttccacaaataaaaaagagtttccccaagaactggtaattgataatgatgttgtgaatgtcggggctgtgttacttaaagaaattgaacgtgcaggttttagaataaatcatagaaaaacaaggttactttattcaacttcccggcaagaagttactgggctaactgttaataaaaaagttaatgtcgacaatagatattacaaaaaagtaagagctatggctcataccttatacaaggatcaatcatttgctattataaaggaaaatgcaaaaccgcaaaaagggactttaaaccaattagaaggcatgatgtcctttatcgatagcatagataagtacaacaataaattaaaactagctaacaaacaacctcaaaagtatcaatcttttaattatggtttgaactatgaaggaaaacttaatcgtagagaaaaaacactgagtaagtttttatattataaatattttcatggattacatgtgcctaccatacttgtcgaaggtaaaacagatagagtctatcttaaatgtgctttaagatcactttttttaacttatcctacattagtgaaaaaaaacaatgctacaggcaatataaattattcgcttaatttttttagggaaagtacaagaacaagttattttctcgatatatcagggggggcggctgaatttgagaaatttatcactcgttatccagaacaatataagcgatttaatcatacccctttgtatccagtcattatgattttggataacgacagtggaactagaaccattgttcgaaaaatatctaaatccttaggtgtaactgaggactctattaaaaaaaatagcttcacccatattatacataatttatatattgtactgacgccgctccttcctggagatagggactcatgtatggaggatctttttgatagttctgtattaagtactgttattgatggtcggtcatttgataagtctaataattataataaaagcacgcactatggaaaaaatgacttctcattgaaggttattaaagttaatgaaaaaaatattaatttttcaggtttcttaccagtactaaatgctgtgcgagattgtttagtgcattataataacatttctaaatga

SEQ ID NO: 197701 - DNA, 849 bp, Klebsiella oxytoca
atgaacatggtcaatgccaaatatggttctgttcccggcctcaaagcgtatactcacgtaagcgaccagttcgcgccattcgcttgtcagtcgatcccggcgaccgtgagcgaggcaccgtatattctcgatggactactgatgaacgaggtcggtcgccatgttcgcgaacagtatgccgatacagcaggattcaccgaccatttgttcggagccagtagcctgctcggctacaatctcgttctgcgaatcagggatctgccatcgaagcggttgtacgtatttaatcccgatacgacccccagggagttacgcaagttggtaggtggaaaagcccgggaggatcttatcgttgcgaactggcctgatattttccgttgtgccgcgacgatgaccgctggcaaaatcaggcccagccaactcctgcgcaagctcgcttcttacccacgacaaaacaaccttgcagttgcgcttcgtgaagttggtcgtattgaacggacccttttcattattgagtggatcctggatacggacatgcagcggcgtgctcagatcggtcttaacaagggagaggcccaccatgcgctcaaaaatgcgctccgtatcgggaggcagggggaaattcgcgatcgcacgacagaggggcagcactaccgaatcgctgggctcaatttattgactgcggtgatcatttactggaataccgtccatcttggtcatgccgtcacggagcggcggaacgaagggttggatgttccccctgaatttcttccccacatatccccattgggctgggcgcacattctactgactggcgaatatctttggcccaaggaaccgaaagcttag

SEQ ID NO: 197702 - DNA, 252 bp, Klebsiella oxytoca
  misc_feature (182)..(191): n is a, c, g, or t
atggctaaaatcaaaattgctgctattgccgataccactcacatcagcaaatccgttcaaactttcattgatcgccatcctgaacttcaagatggtgccgttatcattaaggtagatgtcgaaggttcgcagggtcgccgtcgtactaatgaaataagacagttttttgttgaagatgaagnnnnnnnnnngtatcagaccagtccagcgttagcaaggttgaaattcaatggatttccagcaaggctttga

SEQ ID NO: 197703 - DNA, 237 bp, Klebsiella oxytoca
atgaaaagactgacaaatgaagagatgggacaagttgaaggcggaatctctttaatatctttaatttctgatttatttaacccgacgacaaataacaaagctgaaagccaaccgcaaatagatccttttgagaaaaatatgcgtaaaatgtttggcgccacagcaggtcgcgatctggcaaaaatagcacaaaaatacgggctagtgaaagtcgtcaactctattttcgggtggtga

SEQ ID NO: 197704 - DNA, 327 bp, Klebsiella oxytoca
atgaaagaacttaacgttttcgaaatggaacaagttgccgcaggagtagaggataatctgttaactcgcgcctgcgctgccattctgggcggagcaacctggggtgtttggggtactctgattggtggcacccagtctggtgcaaacggcggcctgctcggttttggtggttttggtaaccttgtcggcatgttctggggcctggctgtgggcatcgttggcggcgcatcatcagctttcgcgcagggctgggataaaacacttgctctgactgaaaaaacgtttaacaacatcttagacggtcagtttgttccttggtctcaataa

SEQ ID NO: 197705 - DNA, 327 bp, Klebsiella oxytoca
atgaaagagttagctacatttgaaatggagcaggtttcagctggtactttagacgagctggctggccgtatcgctggggcagcgctgggcgcagtaacagctgccgtgtggggtaccctgattggcggtacgcagtccggcgctaacggcggtctgctcggttttggcctcctttctaaccttgtcggcatgttctggggcctggccatgggcgcggttatcggcggagtaggcggatttgctgttggctgggacacgaccctgtcactggttgaaaaatcttacaacaacactgccgatggaaaatttgtcccttggggacattga

SEQ ID NO: 197706 - DNA, 333 bp, Klebsiella oxytoca
atgacagttgaagaaaagaccctttcgggtcttttctttatttatgctacggcattaatgtccccacgggacaaacttgccgtcagcaatgttattaagagatttttcattcagcgccaacatggtatcccagccaacagcaaagccgcctacaccaccgacaactgcacccatggccaggccccagaacataccgacaaggttagaaagcaggccaaaaccgagcagaccgccgttagcgccagactgcgtaccgccaatcagggtaccccatgccgcagcggtaatagcgcctatcgccgctccacccaggcggtcaagcagaccatctaa

SEQ ID NO: 197707 - DNA, 1359 bp, Klebsiella oxytoca
atgatgattactctgcgcaaacttccactggcggtcgccgttgcggcaggcgttatgtctgctcaggcgctggccgttgatttccacggctatgctcgttctggtatcggctggaccggcagcggcggtgaacaacagtgcttccaggcaaccggcgctcaaagtaaataccgtctgggtaacgaatgtgaaacctatgcggaactgaagctgggccaggaagtatggaaagaaggtgataagagcttctacttcgataccaacgtcgcttactctgtgtcacagcagaacgactgggaatccaccagtccggcattccgtgaagctaacgtgcagggtaaaaacctgatcgaatggttgccaggctccaccatctgggccggtaagcgcttctaccagcgtcatgacgttcatatgatcgacttctactactgggatatttctggtcctggtgcgggtattgaaaacatcgatctgggcttcggtaaactctctctggcagcaacgcgttctcaagaagccggagggtcttataccttcagtagcgacaatatttatagtaaatccaaagatacagccaatgatgttttcgatgttcgtttagcgggtctggaaactaacccagatggtgtactggagctgggggtcgattacggacgagccaatacaactgatgactatagcctggcaaatggtgcatcaaaagatggttggatgttcaccgcagaacatacccaaagcatgctgaaaggctttaacaagtttgttctgcaatatgcgacggattctatgacgacgcagggcaaaggtgcctctcaaggttcctatggctcttcttcctttacggtcacgaatccagacggcagtacaaccaattatgcaaataacgtggttaacaacaacggtaatatgtggcgtgttcttgatcacggtgctatttcccttggcgacaaatgggatttgatgtacgtcggtatgttccaaaaaatcgattttgacaacgacctgggtaccgagtggtggaccgttggcgttcgtccaatgtacaaatggacgccgatcatgagtactttgctggaagttgggtacgacaacgtgaaatctcagcagaccggcgatcgcaacaatcagtacaaaatcacccttgcacaacagtggcaggcaggcgacagcatttggtctcgtccagcaattcgtctttttgcaacgtatgcgaaatgggatgaaaactggggctacatcaaaagtggcgataatgtatccaagtatgccgccgcaactaactcaggcctgagcacgactagccgtggcgatagcgacgagtggactttcggtgcccagatggaaatctggtggtaa

SEQ ID NO: 197708 - DNA, 438 bp, Klebsiella oxytoca
atgcttgattactggtttgatttggatgcgaatatgaacttcgaagaacggctgttaagagctcttgatgaggctggcatatctcaatctgagttaggccggcgagtgggtgtaaactctcagacagtcagcaattggtgcaatacaggtaacttcccgcgaaaggaaaaactagaactattcccgcaagcgcttggaaaaccactgtattggttctttatgacggatgaagaagagtcttcgttacaggctgtcacagccagcaaaacagtactaaataagaagcaattagaattattagaagtctttgaccaactccctgaagttgagcaggacagatttattgaactagcaaggactcgcctggaagagttagatcggtttatggctgagttcctaagtaagcgaaaaatcacccctcccttcgaaaaagactaa

SEQ ID NO: 197709 - DNA, 225 bp, Klebsiella oxytoca
atgcaagaaactgttcaaaagaaaatcatttccctttgcggcagccaatctgagctggctcgccgtttggggaagaactctcaaacagtatcggtctggtttcgaactcaggttgcaagtactgaggtactcaacgcatgcagggttctggattggcaggtaacacctcatgagcttagacccgatctctacccaaatccgactgacggacttcctaagggctaa

SEQ ID NO: 197710 - DNA, 1065 bp, Klebsiella oxytoca
atggatacttatcataaaatttttcttgagaatatagaaagcatttataaaaataaaccggagttatgtggcagcattgaaatcgataagatggttgataatctaattccagagatggtgtccacccttaaaaaatccctagctatctcgactcgcgaaatgcttgaggaacatcgctcactttccgaaggatttgtctccagaaatatttcaagatgggcagaagcttttgatttgttcgaaacactcatagtaatatgtacagaatccggtgaggaatttaatagttcttatagagcgcaagctgtttctgaggatgatttggtttttgatttagttgttcgacatcatgctagagcttgccatatcgccaacgaaatattatgccttctaaaaaatggattcgcggatgcggctcatgcaagatggcgtgcacttcatgaggtagcggctacagctatgtttatagcgaagcatggaaaggaatgcgctgaacgcttttatcaccatgaagtagtcgactcatacattggaatgcttgagcacaaaaaatacgagcaccgattacaggcaaaaggtccgagtattgaagtaattgctgagtgtaaggagcaatttgatctattaattaaaaggtatggtaaaaaatatgcagataattatggatgggcttcttatattttcccaaatcataaaaaagtagggtttggagccattgagaaggacgttaatttagagcatatgcgtccttattataagtgggcgagccagaatatacatactggttctaaggcaatgagaaatagattggggctctgtgaaactaatgaagatattttgctggtgggtcaaagtaattcagggatgactgatccagcacatgctgctgctattagtttggtgcagattactgtaacgcttttattattaaaaccaaatattgatcatttggtaatttctaaggtaatacaagattattctgcggaagttggagatactttccttagaatcgataaaaataatagaattgatcacgataacatcttcattgagatagataactaa

SEQ ID NO: 197711 - DNA, 393 bp, Klebsiella oxytoca
atggcgcaaaaaaacttacaatctgatgcggaacaggctggcgatcatgtcgatggcgctggtctttcttcattccaaaatctgacaccacgccagcaggaagtttttgatctgcttgtggcatatatcaatcagcatggctatccgccgaccgttcaggaactggctgggcttatcggcgttagctcacagaatgcagtcactttgcaccttcgtgcgttacataaaaaaaacttcataaaactgtctcgcggtgtttcccgtgggatttctgtcgtcggaaaaaaggagccattacttgccgtgcagctgctgcaggaaatgatcgctgacgagcctggggcgcgtgatcgggcgctggaattcctgcgagtgtacgaggcccggctatga

SEQ ID NO: 197712 - DNA, 2700 bp, Klebsiella oxytoca
atgacagcaaagttacccaaaatcagttaccccgtaccgtcaaacaaaaatggccatgccttttcctctgtggaagagttgttatcgatggtcggaggggaaagctcaggactgtatctggtgggaagtcagggaatgtggcatggcggtatccatattactgatgccactattccctggtgcgccctgagtactgacagcgaagctgagaatgaatattgtcgcgagctctataaaggggaacaatttattcgttgtatggcggatggtgagatagttgcctggcgcgtcagtaaggactatgagagtgctgcgattgaatggcgcggtgaaaaactgttcctttcgacctcttttgtgctggtgaaacattatatccagccgggtgatacagaagagagcggactgacatttttcactctgtatatgaatctggcgccttatgctgcttataaacaacagggcagcctggcggacagaaaagtggcaggcgtccagcgctattactccagtgcggaagaattgcaggcaggtcgcacagccggaaaactggagaaagacacggtagtctcgttgagtgacactattgtgacccgcagcagcgaccagcgtcagtttaccgaagtaaccattaccagagaaacgaaaaatgcagcaggaaacacgcttgcagcgggtactaaagtctggacggtatcagaccaggggaatctgaaagcaacagaatcggtgcctgttccgtcctggtgggcaaaatgtactccggcttacactaatgagtcagaaggcgttgtgaactgcacttcgcgtacaaactggtcgtactatctgagcattgacgatgttctgcaatataaaaatgcaggcagcctggtagccgatttcccgctttcatacgagcccggtaataccgcacagcaggtcatccgtccaggtaagaatccaggcgatgtagcaaaaacattcagtctggtcactctgggccgggataaggataagttgaaaaagggtgaccgggtatgggtagtatcagacggcgacagtctgacaccggttgcaccggcagcatccggtagtgaacccgtttttaatgatgtgtatgtaccttcagcgcctgtaccggtcaatgccggagacagtctcgggcatatgggtttttatcagctaccggaagaaaacggcaaacgctcgcgctaccaggcacatatagagtgcctgagcatggatgatatggagaagttcatcactaatcccggaagagcaggggaggatgcgccggtgtatctgacctggaaagccgatgccccattatctgacaagagcgataccggaataacatcaggcggtcgaaaaacaaaggctccggggatcctgacgcttgcaaaagtaccaggcgttgatgctgaggggaacacgctgagcaataacaaggatgcggcatactatcagatacgcccggaaggtggctggctggccgctgccagtgttcagaaggtatcacagtatgcgtttggtgagctcgggtttgtgacgctgaataaggcaccggagagttttgacctgattgatggcataaaacaaccggataacgtggtgaaggggattctggagcagttgtataaagcggcacaggatgaaacgcgtaccactcatgccctgaacaaatataactaccagcgattgctggagatgatcgacagtaaccaggacggctattactcggaacaggaatatcttcaggcagttcacaatgtttcctaccgggaccacctgtaccgtgtgatagcgaagcatgccagtgaatggtactacggcaaggatgacccgctctggaagacataccttgatacgttaaccagggatgcgccgttatggaaaacgtatctggaagcgtttctggataagatgacatggatgaaggcagtgtccgaaaagggagtagtgctggggcccgaaccgtggcatatgcatccgattgtatttttaaatgctataaggaaagggaagccaaaaattacgcgagaaatgctcaggaggatttggaatagcccaggcaatgtttctgacgctgttcttgatattgttgctgaagagttttcgaataaatttgaagcgtgtaatattaataccaaaaatagactttatcatttttttgcgcaaatttttcaagaggtagggcctgcgtttaatttaaatgagggttttaactatagaccacaagtgcttatagataaatttgcatactatgctaatcatcctcaagacgcgcaaaccgatggttatatcccaagaagacaagccgcaaataaacaaaatattgccaacagggcctatggtggacgagagggaaataatgatattgcaagtggagatggatggagatatcatggaaggggaatgaaacagttaacattcagaaataactataaatcttttacaaactatcatgaaaaagtttggggagaacgtgttgattttgaattgaatccagagcttttacttgatacggtttatgcggcaagatctgctttatatttctgggaccagaataatctatacagaagagctgacaatggaatcagcagggttgtatctgactcaataacgagaattgttaatctttatgataatcactatgaagatagacataataatttaattagattcctgcaagagagtatttttgatgaaatattttaa

SEQ ID NO: 197713 - DNA, 1590 bp, Klebsiella oxytoca
atgtctaaggtaaaagttaaaacactcatcggctccgttgtgactgtcgcattttttctgacggtcatcgtggcatttctgttttatgcctttccggaaaacgtagcttcggccaccggattcggtccgtatgacggccagcgcatactcacattctgcgccatactggttgccgcgttgtttttactcggctggctgatagagaaggctttcgaccacgcgggtaaatccgggttgtatttccagtgggggcagaaaaaggctgagactgccgctccgttgacgaacccaattcccagtgaagaagacaacgatgaacccgttttcagcgaagacgtcgtgtccgaacacctgcgctttcgctatggacgccgctggaagcgtaaagtgcgtctccttttggttatgggcaacccggacgacgtccgcaaagctgccccgggcctgtgtcatgacctctggcaggagggcgacggcaacgtactgatttatggcggcgacgcccagtcactcccggatgagatcttcctgtcaaaactgcaacgcctgcggcccaatcacccgcttgatggcatcattcaggtgatgaatacttcaaccctcccgaccgatagtgagcgggatgcctttttgcgctgtcgccagaaagccgaccatctgctgggctggcaggccccagtctggctgtggctgactgacaaggcaacgggggctcagcaggacgaggaaaccactgcaacaggggttattttcggaccgggaggcaccgtaaaagaggcggatgaggcgtttagcatactgacgcaacgcctgcaaaaagccggtatagcacagatactgaataatccggcgcatggcagcctgctacagttatcctcccacctgcggcacgaactgaaaggcagtctgaccgttttgctcagcgggttgatgcagggatctgcggcctttcgtttacggggggtcatgttcagccctgaactggctgttgccggaacggtgccgaacacacgtctggacaccccgacatggaaagccgtcattgatgactgtgatgcggtcagcggcaggaaactgggtatcggctggctaaagatgctgcggttaattttgctttccctgattgtcctgtggggggccggtacactgttgtccctgatcgttaaccgtacccagatttatcaggcgcaggaaacggcgaggcaggcagcggatactgcaaaaacactggctgaacgcctgcacaaccagctcgtactccagcaagccattgcccgtctgcaacatcgtgaggcgaccggcgctccatggtacacacgatttggtcttaatcaagacagcgacacgctggccgcactctggcccctgtatgctacaaataacgcacagctgatgagggatgccaccgcagagaatctcaggcagcagctgaatgcctttgtgcaacttcctcctgccagtgatgcccgaacacagggcacacagcacacctatgacatgctgaaaagttatctgatgctggcccgtccggataaagcggacgcaggttggtgtagtggtcaagtaatattggccgcggttttacagtaa

SEQ ID NO: 197714 - DNA, 174 bp, Klebsiella oxytoca
atgattatagcaatagcaatgatgcttctttgtataatgcttggtggcttcatgatccgtagttgtatgggtaaaaaagactcttcaagcgaagcaaagcaatcaatatcagatgttagaaaaatgatagataaaaaagcactgattaaatataagaggattaatagaatatga

SEQ ID NO: 197715 - DNA, 210 bp, Klebsiella oxytoca
atgaaagagattgtattaaatgaaaagaatgaaacggcattatgtcttatcgaaaaagtattacaggggtattgtgaaacgatttataccatatttcaaaaagaatctgaaactgcaatgactcttttattgtggcaaatatgttcagagattctttatgatgttcagattgcacatgaagttgcagtgtgtgaagaatggcagatatag

SEQ ID NO: 197716 - DNA, 291 bp, Klebsiella oxytoca
atgtctaaaaaaaatggtgttgaaaataaatctacagagttgttccttgatcttgctattagatcgtttgaagcaagttgggagttttttcagaaagtgaatggagagagcatcgagttgcttgatgagcccgattttatgagtctattcattatgtatattattgaccatatccagaataactttgagagattcacaacccaagaagggaatagtggttatattggtgaggttaacgttgagcaagttgcggaaaagttggtgaagtattcggatagttttagaaagtaa

SEQ ID NO: 197717 - DNA, 1215 bp, Klebsiella oxytoca
atgaagctcaatgccagacaggtcgagactgccaagcccaaagagaaaccctacaagatggctgatggtggtggcctctacttattggttaaaaccaacgggtcacgctactggcgtttaaagtatcgtatcgatggaaaggaaaagttattggcgctgggggtatatcccgatgtgtctttggctgatgccagagcaaaacgtgatgaagctcgaaaaggtatcgctgggggtatcgatcctttagtgcttaagaaagaacataaagctgaacgtgaagcgcaggtcaaaaacacctttcagcaaattgcgctcgaatggcacagcatgaaagtgaaaaaatggtcagttgggtatgcctctgacattctcgaagctttcaataaagatatttttccttttcttggtcaacggcctgttgcggacattaagccattagagcttcttaatgtgcttaaaaaaatcgaagccagaggtgcaacagagaaagcaaagaaagtgcgccaacgatgtggtgaagtgtttcgctatgccatcgtgacaggcagagccgagtataatcccgctcctgatctcaccagtgccatgcagggacatgaatctacacattacccgttcctgaccaccgaagagcttcctgtcttctttaaagcccttgctggctactctggtagtgaattgatggtgttggcagcgagattgttgatccttactggcctaagaacgggtgaattgcgtggtgccttatggtcggaaatcgattccgagaaagcgctatgggaaatttctgctgaacgcatgaaaatgcgccgtcctcatatcatccctctatctacccaagcgttagccattatcgaaaagatcagagcaatgacaggacaattccctttgctgtttccgggccgcaatgatccaagtaagaccatgagcgaagccagcatcaatcaggtatttaagcgaatcggctatacaggacgggttacgggtcacggcttccgtcataccatgagcaccgttcttcatgaacagggctacaacacagcgtggattgaaacccaactggcacatgttgataagaatgctatccgtggcacctacaatcatgcgcaataccttgatggtagacgtgagatgctgcaatggtattcagactatatggaaagtcttgagaacaacgacaatgtggtgcagggagcgtttaatcggcgtggataa

SEQ ID NO: 197718 - DNA, 201 bp, Klebsiella oxytoca
atgccaccgctgttgattgccgccatcaccccggacgaacccggtttttcggcactgcgcgccgaaagccaggcgcaaaacctgaatatgctgcgccgctggcggagaactggcaaaatggggaaaatcgctttaacgcccccggagaaaagctactgggggcctttgcctacgggcagctggtcggcgtgtgcgggctga

SEQ ID NO: 197719 - DNA, 1293 bp, Klebsiella oxytoca
atgttttacttaaaaaacaggaatttttggattttcggtgccttttgctttttctatttctttatcatgggcgcggtactgccgttttttccgatatggttgcatgatgtcaaccagctcgatcagcgacaaaccggactggtgtttgccagcatggcgctgtttgccctggtattccagccagtttttggctttgttacagacaagtttggtctaaagaaacacctgctgtggatgattatcttcctgctgctgtttctggctcctctgtttatctacgtgttctcaccgctgctgcaaagccacttttttctgggggctctgttgtgcggtatttatctcggactggtctgcagcggcggctcgccagccattgaggcctatattgagaaagtcagccgccgcagccagtttgagtatggccgcgcccgcctgtttggctgtatcggctgggcaatttgcgcctccattgtcggctatatgtttactattaataaccagttcgcgttctggctggcgtcgagtttctcgctggtattggccggtttgctgtatctgtttaaaccggaagaaaacgcgactctggcggtagcggatggcctggcgctgaatcaaaaacccatcaagcttaaagcggcattgggattgttaaaaatgcgcaaattctggtgtctggtgatgtatatcgtcggggtggcgtgcgtgtatgacgtcttcgatcagcaattcgctaacttctttacctcctttttccgcgaccgacacaccggtacccaggcgtttggctatgtcaccacgctaggtgaatttcttaacgcttttattatgttttttgccccaccgatcattaaccgcattggcggcaaaaatgcgctactgattgccggtatgatcatgtcggcgcggatcatcggttcttcccttgccgactctgtgacggaggtgattatcctgaagaccctgcatatgtttgaagttccgtttctgctggtaggcattttcaaatacatcaccacccagtttaacgttaatctctccgcatcgatttatctgtgggggttttgcttctttaagcagctgtcagccatcggcatgtcctacgcggcagggatgatgtacgtcacttacggtttcaaaacctcttatctgatccttggctgcaccgcgttgctgtttaccattatttcagccttcgcgctgagcggtaaggtacggcgagctaccgggcaacccgcacaggacgtatcgttatcgaatataaaaggcgaattcggatcggaagcgcaacgttaa

SEQ ID NO: 197720 - DNA, 1161 bp, Klebsiella oxytoca
gtgactctgactccgacagcgactcggattctgacagcgattccgactctgacagcgattctgactctgacagcgactcggattccgacagcgattctgactcggacagtgattcggactcggacagcgactcggactctgacagcgattcggatgctgacagtgactccgattcggacagcgactcggattcggacagtgactcggattcggacagcgattcggattccgacagcgactcggattcggacagtgactcggattcggacagcgattctgactctgacagcgactccgactccgacagtgactcggattcggacagcgattcagactctgacagcgattcggattcggacagcgattccgacagcgactctgactctgacagcgactcggatagcgacagcgattctgactctgacagcgactcggattctgacagcgattccgacagcgactcggattcggacagtgactcggattccgacagtgattctgactctgacagcgactcggattctgacagcgattccgagtcggacagcgactcggattctgatagtgactcggactccgacagcgattcggattccgacagcgattctgattctgatagtgactcggactccgacagcgatgcggattcggacagcgattcggactctgacagtgactcggattccgacagcgattcggactctgacagcgactcggattctgacagcgactcggattctgacagcgattccgattcggacagcgactcggattctgatagtgactcggactccgacagcgattcggattccgacagcgattctgattcggatagtgactcggactccgacagcgatgcggattcggacagcgattctgactctgacagcgactccgattctgacagtgactcggattccgacagtgactccgattctgacagcgactctgactccgacagcgactcggatagcgacagcgattctgattcggatagtgactcggattccgacagtgactccgattccgacagcgattccgattcggatagtgactcggactccgacagcgattccgattctgacagcgattcggattcagacagcgactccgatagcgatatcgaggctgtaccggatagcaacagcccggatgtggtga

SEQ ID NO: 197721 - DNA, 264 bp, Klebsiella oxytoca
ttggctaatatcaaatcagctaagaagcgcgccgttcagtctgaaaaggcccgcaagcacaacgctagccgtcgctctatgatgcgtactttcatcaagaaagtatacgcagctatcgaagctggcgacaaagctactgcactgaaagcatttaacgaaatgcaaccaatcgtggaccgtcaggctgctaaaggtctgatccacaaaaacaaagctgcgcgtcataaagcaaatctgaccgctcagatcaacaaactggcttaa

SEQ ID NO: 197722 - DNA, 1131 bp, Klebsiella oxytoca
atgataatgtcacaagttaataaaataaaagatgttatggcgtttgttttcattgatgatgaattcaaaggttgtgcagtgatttttaaaaatgagaattatatattggtagtcactgcatatcatgtaattagtacagctgtctctcatatggataattgtttacatagaattaaaataaaaaatgaaaacggttctatttattcagtttctgattgcaagttttgtgctgaaaaagatattgcaatactctatctaattggtggtattaatgaattaaatactattgtgtttttttcagggactttgaaaccagaaacggatttaatttctaaagttaaatcaaaaactatgtctatgcctgcaattctatactctcaagagcaagtagaacaacatgatgattcgtgttttatgattaatgtgagtaaggatatattaggtgattcatcaggaaattggggagcaaatgcaatggaaggcatatctggtgctggcgtttttcttaagacacatcagtatttaatcctaaccggtattataacatcaattcctgatgaaggaatgttggcaaaagtagtgtgtagtaatgctaatggttttttaagtttagagtcttcattaaaagtttataatgatagtgaatataattatggtcgtgatgtaataatagattctgtaaatataatgagacaagaaattttagattctactattgatgaatgggaaaaagactcaaaaaacattgagtatgctaataatatcaacagaaagttgggtgttttgcataataaaaacaaattaaatgttgtaaaagggaaagtaattagaggtcttatgattggtgattatttatatggcgaaagaatgagggttacacctgaatttgaaaaaggatactcatatgctcattcggctttttgtgataaagatatgattttttatgctaccagtagagttgaggccaataatcgatatcataaaataagtgatgattatttcactacattagcaggagccctgcgccctttagggttatctgatgatgatattcatatgctttgtaacagagacattgctttttggcttgccaattgtgatttagattttatggatgaaaatgatgattga

SEQ ID NO: 197723 - DNA, 999 bp, Klebsiella oxytoca
atgcgagttttagtccttaaggctggaaaaggtgattcgttgcttttatcatggaaaaagcatcatatgctcattgatagtggaacccctgccaccttaaggaaagatcgaaatcctttattacctcctataaaagatattgactttttcgttcttactcatattgattatgatcatataggtggttttctgcatgtatttagccattcagaaataaaatcatttcatcctaacttgaagttttttgttaacactccagaattaataagatataaaaatgatgacaaggtaggttatcatcatggaagtttgttaagtgaaagcgttaaaaaattaagaataaatatacaaggtatgaattctggtgattattttaatgttgatggggcaagcttttttgctctgtcacctgataatgaacatcttaaaattttagctgaaaaatggaatgagttccataatggacgataccagcatgatattgttaatgaccaagtctcagcaagaaaaaaatctttttctgtaacgtctgatatcatggtggaagaatttgaaaataatccatgtaaggatattataaataccagttcaatagcgttgctagctgaatataatgataagagaattttattattaggggattcgcatcctagtgttatatcaaaatcattaagaaaaatattgtttacacgtaaagtcgaagttctagatgttgatttaataaaaatatctcaccacggcagcaagcataatacgactgttgaatttcttaatcttatatcatgcaatagattcatcatatcaacagatggcagtagaccgtatagccatcctgactcagaagttctatcgaaaataataattagtgtcagatctaaaggatttacagaggtttatttctattttaactatgaatatccgtcatcttttgatgttcttaatgaaaatgagctgggtataaaaattcatagaataatatctaccgaggtgttcatatga

SEQ ID NO: 197724 - DNA, 156 bp, Klebsiella oxytoca
atgaagcgtggtaagggttgccggatggtggatgtggtgatgctgtttacacgttggaaaaaaggtcgagaccagggccggaagctgggctatatcgccagccgcgaggttgccactggcaacaatgcggccttgttgtgggatgcagatccatga

SEQ ID NO: 197725 - DNA, 636 bp, Klebsiella oxytoca
atgagcaacagagcagcagaaaataaacctgaattatggattgaagaggatcgccgcctttcctttgcagaaagcgtcactatcaaggcaactggtgagtgtttcaaggttgaggacaaacttgcaaaaattcatacctatatggtggatcaatacaacagttaccgggccgatggtaagaacttctatgaagatcagagggacatagcgactaaatgcaaatgcacaccaaaaacccttggcaagtggataaaagttcttgaaacgcttggtttactcgtcattgatgagagtcagaaaagccattcatacactgttcgctcggtagtgagccaggaacacaacctgatttttgattacccgaaactgttaaacggttcaccgtcctacgatcatgaaaaagcacttgagcggcttagggaaagccgtggaaccggtggggaaactgacggtaaggttatcctggtcgatttcaaaaaacagacaaaaacacctgagccgcagcctgccgttgtggaaactggctataaacccccgactatacagagcaaagggacgatctacactcccgagcagatggcccgctttgctgctgaggaacgtacaaagtatgccgatggtggcacacctttttaa

SEQ ID NO: 197726 - DNA, 555 bp, Klebsiella oxytoca
atgacgaatgatgatcgcaacggcgtaagcgccgaaccagaaaagattgacccagaagaacaactcccagacctacccggcccagaattacccgacctcacccgcctatataaacgtcgatgtcgtgatggcaacgttatgcagagatgcaaacacatgctcattgcgggatattctccaggacgcgtggcattactgctgcgtctgccgctggaaaaggttaaagaactccaccaggcgagttacaacccgcgatgtaggcgctttgcgaacccgaacaacgggaaattgataataacgatgtggcacgagggcgcaacgctcgtggaggtctgccagacgctgggcttgcccttgttcactgtggtgatgtcacttcggcagaatggcgttaccaatgccgcaatggctccacggatgccagagtacaatgatccgctgtatgttgaatatcggcaggttgtggcccgaaaagctgcgagcaaatcgcggcctattcagataaaccctgttcgacgcatatgcaaatccgcaggaaaaactgcgacagcctga

SEQ ID NO: 197727 - DNA, 246 bp, Klebsiella oxytoca
atgttgaggttgaaaaggtttttaaaaaaacaagggaaatcaatcaggcggaacaaagctaacaccgaggccgctaaaagctctggacggttttatatcgttgatgaacttaaaggccaggtggttgcaaccgctgaggagattaccccttggatgcgtgaatatggagcaatggaggattgggaatatgtgatcggagaagagacaatccgggacatcatcaggaaacaaaattccagcctataa

SEQ ID NO: 197728 - DNA, 345 bp, Klebsiella oxytoca
atgaaaatgggcgaatcccaacgcacctttaatgatgtcgtgacctatcaggccgacgctaattttgcagtgaaaacaatcaacatcccaaacctggccgtcgaagtgcagcccggttcggttattaaggctgatggcactgtatttacctcaggcaatgatgcattactggttctgagccatcaccgcgctggtacagatgcaaacatcatcgttgctgaccgtggcgtctacatccgcccggaaaccgtcatcgccgttatgggcgcgactgtaggcgctgctgcaattgctgctctgactacatccggcaacatccgcgtagctctggctgacgctcaataa

SEQ ID NO: 197729 - DNA, 210 bp, Klebsiella oxytoca
atgcgactaaatctattaggtgtcggaaatgcagcgctgctatcggttaagttcaagacgttggatgatgccgggttactgaacgtatcagcgctcgccagagcgttgggtgtacaccgcagcacctttttatcacgtgtggcgactcatggccttgaggccgcgatattgtactacgcgactgatcagaaattgaaagatctaaactaa

SEQ ID NO: 197730 - DNA, 123 bp, Klebsiella oxytoca
atggctaagattggtcgtgatgctaagacgggtcagtttatcccggtaagtgaagccaaaaaacatccaaacacaacagtagttgaaactatcaaagcaccgcctaaaaaagggaagaagtaa

SEQ ID NO: 197731 - DNA, 279 bp, Klebsiella oxytoca
atggcaaataatctttttgttacttatgatctgatcaaaaccaaagactacccggcagtacataaagccatccaatcattaggggcatgggcaaaagttacagaatcgaattggtatgtgaattcaacctataccgcctcacaagcaacggaaattgtgcgaaaatccatggatgcggacgataaattaatcgtagtggatgcaagcaacaatgttgcaagttggtacaatttgtcagcagaggtagctaatttcattaaagatcaatggtataaataa

SEQ ID NO: 197732 - DNA, 732 bp, Klebsiella oxytoca
atggaacaaataaaatcatgtgttgattcaagacttttaaatggttgcatttattgtggcggttttgctgacaccagagagcatgtaccgtcaaaagtatttttagatataccttaccctgaaaacctccctgtggttgacgcatgtctagcttgtaataatggtttttcttcggatgaagaatatttttctgcatttatagaggttgcatattcaggaactacagacttacaaaaaataagaagagaaaagattgcaatgcttttaaaaagatcaccggcattgagcgcaagaatactaaacgctatagtcataagttcttctaaaattgaatttcatatggaattagaacggattaaaagggttatcgttaagctggcaagagggcatgcagcatttgaactgggtgaatgttgtaggcatgatccttcgtatatatggtggggcgatttgaatttattgggagaggaacaaagaaaagaattctgtgcgcctactaaaattgacctcttaggtgaaatagggtcaaggcattcaaggcgaatagatgttgttgaattatctctctgtggcgtagatgaacgtaatttaaaaaaaatatccatttttattaatcattggattgaagtgcaagaaaatagatatagatatatttcagatatcattgatggtggtgtaaggataaaaatgattataggaggatatttcgcatgcgaagttacatggtcttaa

SEQ ID NO: 197733 - DNA, 1053 bp, Klebsiella oxytoca
atggcaaaaattgttgctgtagatttgttttgtggtgcaggagggttaaccaggggtcttttagactcggggatcgttgtatctgcaggattggatattgaacccacatgtaagtttgcatacgaatcaaacaatggagcgcaattccatagcaaagatataacaacactaacgagtgaagaacttatatccatgtactctgagaacggagtcaggcttcttgctggatgtgctccatgccaaccattctctacctactctcaaggccgtgatgtaaaaaaagataaaaaatggccattgctatatgcctttgccagactaattaaagaaacaacccctcatttagttactatggaaaacgttcctgacgtaacgaagcatgaagtctaccatgattttgtaaagacattagaaaagcagggctataatgtatgggcagatacagttcactgccctgattatggtattcctcagacacgtaatcgtcatgtattattggcatcaaagcttggtcctattgatatgatcccaaggactcataaacctgatgagtatgttactgtaagacaaattctttcagaaaaaaaactcccctcaattaaggctggtagtgtatcaaaaactgaccgtctgcataaagctgctgggctctcagaattaaatatgaagagaataaaattatcaaaaccaggtggttcatggaaggattggcccgaaaatttagttgctgaatgccataaaaaacctagtggcaaaacatattctagtgtgtactcacgaatgggatgggacgcaccagcgcctactatgacaactcaattttttggattcggaaacggtcgatttggacacccaaaagaaaatagggctatttcattacgtgaaggagcaatttttcaaacatttcctgaatggtatcagtttgtcgaacaaggttcacctatacaaatcagtccagtagggaaaatgattggaaatgctgtcccaccgatgcttggttatgtaatcggtctatcatttatcaaacacatcaatcaattcacaattgattaa

SEQ ID NO: 197734 - DNA, 429 bp, Klebsiella oxytoca
atgttggcgaaaaaaaatgctgagacctatgaaatagtgtttgattttattccgaaaaattatattgacagcaatccctatcctgctgaaataacaccttctgtttctgataccgaaagcacaaaaactaatgaaatacccgcctcaatatggcctgtaatgaacacgggtgacaagattaaaagttttgtaagaagtagcatgcccttctcagagattttttggcgaaattataaatttcagaacgacggttccctgcatgcaattaaaggttatttcactgctctgcctatatactggaccgaaggagagaataacatgattcgatataatatgcgactcattgccagcaatgctgtatctgctgacgatacacagctgttagcggataacagtgccggtgataataatgaggtaaatcaggcatga

SEQ ID NO: 197735 - DNA, 2031 bp, Klebsiella oxytoca
atggcagtgcaaaaacttgatgatggcatgaatcgggggagtgtgtatttcgatgacaaaagcgacaagagctatacagccacgttaactcacaaccattgggtacattacaccagtggcctggagcgtcaattagaaaactttgccgagtataccgaaggtaatgcggtgcaggctttcctggggggaaaagcctattttactgcgttactgactgcctttaaacaggcccaaaaatgcatttacatcacaggctggcaggttaactgggatgcccaattagcggaaggggttcgcctggtggatgcattactcgaagccgtaaaggtttcaccagagctgcaggtgtacattatgccgtggaataacccctcacaggtagaaacctattcggcggcaacagagcgggtatttgctgcgatgaatacccatctcggaaggcaggctttttatgttcagcgtgcgggctctaaatccggaatgatgttttcgcatcatcagaaatgtgtgattgtcgatgaaaaactggcatttgtcggcggaattgacctggcctatggacgctatgatgaccattatggtttgcaggcaaatgcagacggacgacagggcatgaatatgtacaattcgtgtatcccgcctgtttcccggcaaaacagttataaccccatggaggaatatgtcatcccgacagggagtttccagagggataaccagcaggatgaacggcacaaagccgagcgtcggcaggctgacagtgtacagcacattatcgataacgtgctcaaccatcagcacttgcagtcatccgccacgtcaaaggacagtacctgtctggacccgacggtccagccccggatgccctggcaggactaccaaatgcaaattgacgggccagcggtttatgacctggtgcgtaactttgtgtttcgctggaacagttatagtcacccctatccggatcattcgctgaaaacctctgttcctgaactggaggttccggcagcaccgccacagaaaaaaggcagctgccaggtgcaggtgctgcgcagtgcctcactcgacatgcgtaaagatgaacataaacgtatgccggacagcgcaccaaaggccaggctcaaacaggatgatatcctgcgcagtatccacctgcttatcagcaaggcggagcactatatttatattgagaatcagttctttgtctcggcgtttggggcgtcgtctattgaccctgagagtaagttaagtccggtggccaaaagcattagtccttccttggatacttgggcaacccggctcttgcctgatgatgaaacaccgcaaaatccggtggcggaatggctaggagaccggattaaacgggcagtctttagtcatatgcagcaggcgttccatgtgtatattgtactgccggtgtatcctgaggggcggcttgatgatccggccattgtggcgcaaattcatttaacccgacagtcgttggtctttggttcgcagagcctgcttaaccgtattcgccgtagcttatgggtaaaacaacaacttgaactacagacggtcccgcgaagggagtggtggaagaaaatcactgaactggaagagcagtgcggcgataagtataaaaccattccactggaagcatgcaatgagtatgtgacgctgctgaatctgcgcgaccacgttgaactaaacggcagggcggtaacagagcagatatatgtccacagtaaactgatgattgtcgatgatcgctatgttctggtgggaagtgcgaatatcaatgaccggagtctgcaaggtgaccgggactccgagctggcggtactgatatccgatacagcccattgttatacggacctggatgggacgggcgttgctgcaccgacccgaaactttgcgcgcgaattgagacaaagtgcatggcgtaaatggctgggcagcgcagcgggagagtgtgcagatgtgctggataaaccggcactgaaaaaaaggctgggagaagattcagatgttggcgaaaaaaaatgctga

SEQ ID NO: 197736 - DNA, 1155 bp, Klebsiella oxytoca
atgtttacagaacgacttgcaagctggttggctcgctcctcagtgaagagggggataaaccaaccagaaggcctgaatgcggttctaagttcagacatagggctcgtgagaaatgagaatcaggatctcatagctgcaattagggttaacacaccatcaaatgttggtaagccattctttgcgatggcactattggatggtatggggggaatgcaagagggaaaacaatgtgcaatcattgctctttctactttcttttactccctaattaaatatagaaccgaactactggagtcacgcttaaacaaagcaaccttagaagcaaacttagcggtatacaaatatgcaaatggtaatggcggagcgacattatctgcaatcattatcgacagtgaatctcaacccgtaatagtaaatgtaggggacagccggatatacagtttttctatcgacaaaggtctgaatgctataagcaaagacgattctcttgaggcgttgggagggcgaggaaaaggacttttacaattcattggaatgggtgattctttaaaacctcatgtaagtgcactgaatggcggtgaagagaatattctactaacttctgacggcactcattttatttcccaaaatgctttcgaagagattctcaacaactcagctaatttcatgatatctgctcaaagaatatctgaatatgttcgctggtgcggagctcaagataatgcatcactaggtttaattaattacaatgatataataaaaaatcttaattctcatcatgagatcggcgttgaactatgggatccccatggtaatttacacataatgtggatgaaaaattatccagcagaacaaaattatttcgcccaaaacattgtcgatgaaaatgaaaggcagcctcagataagccccccacaaactcttgcagaaaataaaaacattacgaacattggaaacaatgatagtgacctccctacagaaaagtcacaaggagacctttttttaagtcaagatgataataatacatctccacaacctaaaaaaaatattaagaatagaaagccacgattaaagaaaaaaaacatcaataagaacgatgatgattcctctgtaaaaatagatattaccgatgagggaaacaaaaatgacaactaa

SEQ ID NO: 197737 - DNA, 1059 bp, Klebsiella oxytoca
atgacaactaaatatatacttcccaataggtattcactacatgaatctagtccaggcgggggaatgggagacatcttatcttgcaaggacaatcacctcgatagaaaagtaattatcaaaatacttaaaactggagaggaagaaaggcgtttattagatgagcaaaaagcattattaaaactgcgttcaaagcatgttgtccaattatatgatttaatcgacataaaaattggacatgaatttaaaaaaggcttagtccttgagtttattgatgggaacgaccttgcatatgaccctcaaaaaagaaacttagatgttttaaaaatactttggcaaatatcatgtggattaagtgatattcattcggccgggataatccatagagacattaaacctaataatattagaaaaaacattaatggtattgttaagatacttgactttggattggcaagagcatcaggaactgaggcttttactcattctgttattggtactttaggctacatggcacctgaattgtggaaagtaagagatattagctttgaccaaaaaattgatgtttatgcctttggtgtggttgctttagatttattaggtatagataaaccaaccgaattgtatgcacaaccaccgttgccaattattaagatagataaattagaacaaattctaacaaaagatctatcggacatctttattgattgcctaaacttcgataaaacaaaaaggcctagcatgcctactattcgagatgcccttgctaagcacttactaaaagataggcatagagcgctatttgtactacacggcaaaaagtatgagattaactccacgaatagatctgttacaatcacatggggctcaagtggaacaatgcaaatatattatgatggctttgattttaaagtggcaaaatttactgggaatgcaaccattaataacaagccagttgtacttaacaaaccattcccaagttgtagtgttataactttaataaatgataaatccagaacatttgtcacatttgatatatctagaccggaggtaatatcatga

SEQ ID NO: 197738 - DNA, 1077 bp, Klebsiella oxytoca
atgattgattcaggaacgatcattgcagaccgttaccaagttttaaactatattggaaaaggcggtatgcaagatgtatataaagttttggatctaagattagatttagagttagccctaaaaactccgttgcctgggttggagagcaagagatttctaaaaagtgcaaaaatagcagcaaaagttaaccatcacaatgtagctaaaacattcgactatgttgaggacagtggaaatatatttctagcagaagaatttgttgatggtgaaaatcttgaggaaaaattgaggcacttcgactttttggatcctcactatgctgcttgcatattgcataatcttgcgaaaggaatatcagcgtcacatagagccggtgttatccatagagacttgaagccaagcaatgttatggtctcgggtggagtacaaatttcaaatttaaaaatcactgactttggcatcgcaacattaacccaagagctttttgatgaagcagcagctagtggcgatctgactagatctacctccgggacaattaaaggtgctctaccatttatgtcaccagaattgatgtttgggaaaaaaggtatggcaatagaggcctcaactgatatttggtctttaggcgcaatgatgtttaggctattagttggagactatccatttggcgtttacctagatgcagccgtaaatgtcaaaacgaaaaacagaatggcttggccacatttcatgatcgcaaacccacaataccaaaatttatcgttagaactgcaaaaaataattgatgactgcttaaattacgatccagacttgcgtccaacagcggaagacttagttaaaaaatgtgaaaatttgtgctatttatcagaacaacgttatgttggtcgtgttaataatttaatccaaggaggtattagtggttttattgatggtactccatcaaattccttctttagcatggaaagtgtttacggctccaaaaatccaaatacttcagatagaaatgttgtttgtttttcaaccttcgacggttacccctgtcctagagctcatccagttatcctttggaaaaattaa

SEQ ID NO: 197739 - DNA, 183 bp, Klebsiella oxytoca
atggtgaagagtaagcgcaacgagttagctcatgggaagatttcttttgaagagtgcgggcaggagtgttcgattgatgaattatattctatctatgaacaggttattgtatttgtagatggcattatggatgcgattgaaaattatttgaaagataaacagtatctaaaagtatctagttaa

SEQ ID NO: 197740 - DNA, 687 bp, Klebsiella oxytoca
atgtttgagcagcggctgaaaccgctcaatgaagcggtgcttttctcggccccggaaggcatggccatgaccagtggtgaagatatgcagctggccgctggccggaacctggcggttaactccggagaagacttcagtgctggcgtgatgggcaatatgaccgctctggccggagagaagctgggactgtttgcccggacggggcaagtcagcctgaaatccggagaagggccaatagatgtccaggcgcagaacgccagcatgcggttgtttgctgagaagaagctgacgctgagctcagcgagtgacatcttctttgccggaaaaaaacgtatcacgctgatcggcggcggaagctatctgcgacttgaggccggaaaggtcgagtatggtacgacagcgacgtatatacggaaggtgaaaaggactatggcggcgggggcaaatacaataccgatagaatcaaaaatgattcagcaaattcactccttctataatcttcaatttaagttaaacaacacagtcggaaattttgttccccatgcaagatatttgttaattgatgaatcaggggagataacgtcaggcataactgatgaaaatggatacactgatcccatttatacaaatgaaaagaaaaaattcagtattcatattatcttaaatcaagaggatgaaaatgagtaa

SEQ ID NO: 197741 - DNA, 735 bp, Klebsiella oxytoca
atgtcgttagactcatacgctcaaataaggctcgtgaagcttattaagaaatcgagtgaagaaaatgagaagttctttatatttaccacgcattcccttgcaatgttaaaatctattgatgatattggcatagacatttattacctagaaaattcaaatgggaatgttgatttaaagaaaagaggatatagttatattaaaggagttatgtttgaatttaaaggaagtgataaatatattctaacggaggactctgttttaaaagaatatattaaaatgaaaatgcaaaaaatcattaaagagtcaacgctcaacaaaaaagaaaaaattgaggttattagcataggaggctgtgagaacgttattgatttttataaaagaaataaagaagagtctttcctatgtgagagagatgagaaggtattagttatattagatggagatgtcagggaggaaatcctaggaaaaaataaaagcattgcttctaaattgctttttttacctttcgactcaattgaaaaggaaatttttaaaaaatccaataatactcaatacaatctgccttatgttggaaaattaaaagggaaaccagagaaaagaaacaaaaaatattttgacaaactaacaaagaggaacgggtttgatatggagaagatattcgacattgcagaaaaagataatcaagaagctgtattgaattttgaaaacagactttcatcttttttaaaaatgtag

SEQ ID NO: 197742 - DNA, 501 bp, Klebsiella oxytoca
atgacaaaaatagagatgatgaactcgttagaagtttctcagcaagaaaagatgatgaaccaaatagtattggacgatcacttattgaaccaaatatcaatgacagtagagccactgaccgaatcgatgatgatattatcagaatcagtcagcacagcattgaatcagacacagcagacactaacaagggtgaacaactcgttagaaacaacaactacagctttaaactcagcaaaaaatataatagaccaacaagctctaaagttagaagaacaacacaaaaagctgcacaaatacgcaacagagttaaaaaacaacacaataaagaatcaatcaaaacttatagtaaaagtggcctcggtggtaggagtaatacatatagtggtggttctatcagtaggatacttgatcatgcagaaacagcaacaactgctacccatcaatttagactcaaaggccgtagcagtttcaatagtagagcagttaagatcgaagaggtaa

SEQ ID NO: 197743 - DNA, 258 bp, Klebsiella oxytoca
atgggcgtcagcattttgcctgatgggcacatctctgttgataaagccataaaaaacaatattgaaaccaagcttcactatatatcaaaattaaataacgttaactctcaagatcctgagctaatggaagtaaaaagatacttatccggtatgattaattatataagtacgattgatgaagcttacataaataaattaaaaagaaagtatggttcaacaatagttgaaatgtttcttaggaagagtctcgtaaaatga

SEQ ID NO: 197744 - DNA, 327 bp, Klebsiella oxytoca
gtggaagtggaaggccaggcctttgtggtgaaggtcagcgacggcggcgatatcagccagctgaccgcggctgttcctgccaccgcgccagccgctgccgccccggcaggcgcaggcactccggtgaccgccccgctggcgggcactatctggaaggtgactgccaccgaaggccagacggtcgccgaaggcgacgtgctgctgatcctcgaagccatgaagatggaaaccgaaatccgcgccgcgcaggccggcaccgtgcgcggtatcgcggtgaaatccggcgacgcggtggcggtcggcgacaccctgatgacgctggcgtaa

SEQ ID NO: 197745 - DNA, 324 bp, Klebsiella oxytoca
gtggaagtggaaggtaaagcctttgtggtgaaggtcagcgacggcggcgatatcagccagctcactgcggcggcgcccgttcaggctgctgcgccggccccggtaggcgcaggcgccccggtgaccgcgccgctggcgggcaatatctggaaggtgactgccaccgagggccagacggtcgccgaaggcgacgtgctgctgattctcgaagccatgaagatggaaaccgaaatccgcgccgcgcaggccgggaccgtgcgcggtatcgcggtgaaatccggcgacgcggtctccgtgggcgacaccctgatgacgctggcgtaa

SEQ ID NO: 197746 - DNA, 234 bp, Klebsiella oxytoca
atgtctatacccgcacatttatggcttgaagatgaaaatggttcgccgcttgttggcagttgccaaatgccacttcgcctgggttcaatcgaattaaaatcattctctcacggtgtcactattccggttgacccgagctggggaaaacttacaggtacacgcgttcaccgccctataacgatagtgaaagaacaccacttctgtaccgcgcggtctgtgaaggccggaccatga

SEQ ID NO: 197747 - DNA, 330 bp, Klebsiella oxytoca
atgagccactttctcgtcagctccctgcaggagccgctgagccgggtgatcgttgaattcgccctggtgcagtttcagcaaggaaaaaactgcccgacgcggctctggagcgcgcgcctgcgccccatcgtgatgacctcactcgcatttattgttggcgtaatccctctggtactctctaccggcacgtgggcttccagccaacgagagacaggcgccgcggtcatcggcggcatactcaccgggacgctgctgactttgtttttcgctccactctttttcctgctggtacagcaaggaatgatgcgccttaaagggcgcaaacggtaa

SEQ ID NO: 197748 - DNA, 1089 bp, Klebsiella oxytoca
atgtggctattcggttgcgtgattgttaaaataattacctttcatttccctttcaatgcagcagcaacttttcaggatgtgatatgcgtctcttactggcttaatgcgctgaacagtgtggcgcaggggctcaacttgtccgcatcacggctgattctcggtggtttcgagtttgtagacttcgaaatcccggagtcgcttgttatcccgggccgacagaaaacggtaacgcatcagcttattggtggtaagcatattatcgatgtgctgggcgttgagtatgaccccattacctggagcggaatttttaccggttcaaacacacaggctcgcgtttccgcccttgagcagatgcgtgatgctggcgaggtggtcacattaacgctggatggctattcattcgacgttgttatcaccaacttcgtcacgacctaccagtttgtttaccggcgtccgtaccagattgaggtcgccgtacttcaacggaatgacagcccgctgcaggctgatgcgctgacaggagcgcttaatgcgctcatcaacagcgacattggtcaggctattggactttcaagcattatcgatgtgcagtccgtaaccgatgcggtgacaacagttcaggacgcagttaacactgtttccgactttgcaaccgccacggtagaaacagtgcagacggtggtaaggccgataattgcagcccagcagattatccagacgaatatttcctctctggaaagttccatgaactcaatcacgaccctgggcggtattgtgcctggcaacaccatctcaaaaaccatcaacaacctgctcactcaggctgacgggatgacccgattaccagcgctctatgacctttcgaatgtgctggacagggtaaataaaaacgtcagaaccggtcagacggcagacggtgtgcggtcgattacgctgtctggcggcaacctctaccaggtggcatctgattactatggtgacgcgactctgtgggacagcattgcgacggtgaacggaatcacagacccgcaattgaccggcattaacaccatcgccattccatcaaaccctacatcatcggcgaactga

SEQ ID NO: 197749 - DNA, 144 bp, Klebsiella oxytoca
atggatgaaaaagagcttgagcttacgctattatatcgttcaataactccggatatctttacgaaaggcggagaagaaatgagcacggaagagttaagcgtagtcgaagaatcagcaaagcttcaaaaagaaatctatggataa

SEQ ID NO: 197750 - DNA, 1035 bp, Klebsiella oxytoca
atgattagcattcaggtacttagggggtttgcggccctgttggttgtgcttgtccattcgacactgaaggcacaatctgcaggtcttggtgagagagtttttgaaatagggcactccggggttgaccttttcttcatcatatctggtttcataatgatgatgatcggtgcacgggagaataattttttcttattcatgtcaaagagaataacaagggttatccctctttattatataattactacagcagccctttgtatctacctattcaatccttcgttaataaatggaaataatggtgcaatttcaatattacattcatatttattaataccagcacaagggaaatcattcctactttcggtgggatggactttgagctatgaaatgtttttttatattgtttttgcatgcatcgtttttatgaaaagcagcgcaaaaggcatagccgcttgcttgatacttattgcattagttgtcgcaggaaggtactcaagcaatattacggttcataatttcatgtccataattctccttgagtttgcaatcggcattggatgcttttatttctatgattatatgtcaaaacgcctgtcagaaattcagtctgcagccatatcgacagtttttattttaatagctattgcatggataggctttcagcaagacccaatcttcactctgtttgataacagagttttagagttggctataccaatgatgtttatttttttggcattctgtttgtgcgagttcaatttcaagaaatataaacaaacggtttccgtgagaatcatgtcatatattggagatgcatcttactctctttatttaacacatctgtttgcgttgggaatagtttcaaagatttacgcaaagcttggggtagaaaactactttgtatttgtcacaacctgtgtcgtcgtttcagttataggtggagtgctttgttacgaggttgtggaaaagaggatcacggcggtgcttaggaacaccatttacagaaaacctaaaaagcttaatagcgacatttaa

SEQ ID NO: 197751 - DNA, 966 bp, Klebsiella oxytoca
atgaaacctgtaactataacccttcttattcttagtatggctatttcaaaagtaagcatggcagatagccataaatcagtgattgttctctacggacattccttcctttctaacaagcagtttgcaatgtctctttcaagagaaaccaatctaaaagtatttgactatgcaagaggcggcagcagcagtcaggaggcggccttcatttctggcggagaggcagggctcttttacccagatggcggggttatacccgcaactggatcagtagatgtggtcccaaatggcgttatgagcgaggaaggagccttatggccaggattttattcagaggttatcttttctggggtgcgaggtgttttgtcgtccaaaaagataaatggagaagtaaaatatatctttaagagagatatcccagggaaagaaatacaagttgcaaatgcagtcagggcgtttcccgtgagcaagacaagagtcaactcaggaacggaaagggccggggttgatatgatcaagcatgcaaggaaaatatatattatttgggcaggaagaaacacggcaagaggtaatataaattacataataagggatataaagagcattgcttctacggcaggcgcagatgataggtacattgtcatgccagaatttccatacagtaacgaagttaatggtagtccggcgcggaagaatattgataaacttaatgaagaaataaaaaataacttccctgataattactgtgtagttaatggtctagatgcacttcataatttcacatcacactataatagaaataacgatgaggacctaaaggacatctcgaaaggtcttacgccatcaacgctaagaatggacagccttcacccatcagatagcgttaacaatggcgcctctgcttccggcgtcgatattaacgccaagttcatcgcagactgcttgaaggctaagggttggataaaatga

SEQ ID NO: 197752 - DNA, 318 bp, Klebsiella oxytoca
atgggattcccatcaccggctggggattatgtagagagtacgctgacagtgaactctctgtgcaacatcacagcaaactcgcgagttatcagcacagatagtggctttgctgttcttgatttgtctctgaaggctaagcagggaagcacggttctcattagtcacgctgggctcatggagtttgcgaaaatcttaggcatggcgtttatcacatctgacggagaagccattgaaggggaagctctggatgacgtggaagtgatcggcgttgtcacgtatacgattcacgacgtgatgcaggatagcagccccgcgtga

SEQ ID NO: 197753 - DNA, 423 bp, Klebsiella oxytoca
atgctcggcgttagctcgtctaatgctgtcctgttgcatctgcgtgcgttagagagaaaaaattttataaaactctctcgccgtgtctccagaggaatttccatcgtcgggcgaaaggagcctacgctcgcggtacagctgctgcaggaaatgattgctgaagaacccggcgcgcgtgaaagagcgattgagtttttgcgcctgttcggtgagcaggtcgggactgagcaccggcttgtgctttacgcagatggcttcgggtggacggacgcatggatctttcgcgctggcggcacgatctccactggtaagggtgacgtcctgaccactggctcagatgtacggctgaaagatgcattcacggaaccacgggaaggggcttccaggcgcattaatgcgccggggtatgcgagttcaatatga

SEQ ID NO: 197754 - DNA, 129 bp, Klebsiella oxytoca
atgatagcaatatatatcccgataccgaaagataccagaaacacaaccaagatcccaaagagcgctaccagtaaagatgtgcagatagatatcaaattaattgtcttgcgtgcgtctcttgatacataa

SEQ ID NO: 197755 - DNA, 261 bp, Klebsiella oxytoca
atgcttaagcttagtatcagtcagcatgacggtatcctctgctcaaatctaccgtcatttcagggaaagtgtgacggtataatccgcaatttaccgcaaccgctttttgttgaatacgtcaaaaataccgtcagaaatgccatgctttctgctgtggcgggtgatggtcagaaggagaaactggcgctgcaagccgcgccagctacgggtttaaatgtcagtacccatcagtgcttcacgatatacattgtgcggctatag

SEQ ID NO: 197756 - DNA, 207 bp, Klebsiella oxytoca
atgcaactttacctgtgcgaaaaaccctctcaggcgcgcgatatcgcccgcatactgaatgccgcaacccgcagcgacggctatctgtccagctcttccattaccgtcacctggtgcttcggtcatcttctggagatggctcccccggaggactatgaccccacgttaaagcactggcggttagaacatctgccgctatccatttag

SEQ ID NO: 197757 - DNA, 231 bp, Klebsiella oxytoca
atgggcaatatttatgaatatgcaaaaggtaaaaaacaactgcagtctcttatcgattttgcattgcgagagggctgggaaataacccggacacgcagtggtcatttacgctttaccagacccggaatgccgcccgtgtttaccggcttttccgccagtgattttcgcgcgacccgtaatgcccgcgcccggtcgttgcgactgatgcgcaaaatagagcaaacaaactga

SEQ ID NO: 197758 - DNA, 885 bp, Klebsiella oxytoca
atgcgtctgagacaactgcgccattttatagtcgtcgcggaagagaaaagcatcagtcgagcagcagcacacctttgcattgagccctcaccactttcacattcaatcataaaacttgaagaacagttaggaatgacgttatttcacagaaacggtgcattacgtctgacccgtgccggagagtcctttgcccttgaagttagtaagatgcttcatgcttttgaagaagccaaaacccaggcgcaggcaattgctaatgggtatggcgacgttctgcatatcggactcgccgatggactgactcatcccgtactcattaatctgttgcgtttgtgccgggaacagacaccggatatcagcatcgatagcatggaagccaatacgccacatctggttcaggagctcctcggcaataatctggatgcccttttcactctacatccggatacccctgcgggctgtctgaggcgactggcgtggcgcgatcgcccctgtgtactccttccctccggccatccccttgttggatgttgccaggtaaacccggaattactgctgtcatatccgctgattttgcatcatcctgcgtggtgccccggcccctacacattgcttaatcgctggctggatggcttatcaggtccccatcagattgctggctatgccgccacgctcgagtccctgttttcgatggtttccgcaggttacggcattggatttgcgttacagacacgcgccgagcagtttcaaatcaaaaatttaatcctccgcccgctggataccaccagtaacgtcccgatctggttactgagacggaatagtcccgaacctgccgcacttaagcgatttattcatctggtgagaaaagcgcgcacctttgcataa

SEQ ID NO: 197759 - DNA, 756 bp, Klebsiella oxytoca
atgagtaaaattgcacttatcactggcgccaatcgtggtcttggccgtaacactgccctctccatcgcgcgtcagggtggcgatattatcgtcgcttacagaggaaataccacccaggctgaagcggttgtcacggaaatccgcacccttggtcgtaaggcaatcgcgcttcaactggatatggcgcagactacgagttttccagcatttgccaaaacgctgcgtcaacaactcgccgaggtctggcaacgcgacaccttcgaccacctggtcaataacgcgggtcatggcgagtttgccagcgtcgccgagaccaccgaagcgcagttcgacgggctgttcaatgtccatgtcaaaggggtatttttcctggtccagacccttttaccactgctagcggacagcgggcgtatcatcaacttctcgtccggcctgacccgggtatcgtaccctggattctccgcttacgcggcggcaaaagcggctgtggaaatgctcagcgtttatctggcacgcgagttgggcccgcgcggcattacggtcaataccatcgcaccgggcgccattgaaaccgattttggcggcggcctggttcgcgacaacgccgatgtcaacgcgcagtttgccgccatgaccgcactcgggcgggtcggcgttcccgacgatatcgggccagtgatcgccaacttgctgcgtgatgataaccgatgggtaaccgcacaacgtattgaagtgtcgggcggacaaaccatctga

SEQ ID NO: 197760 - DNA, 879 bp, Klebsiella oxytoca
atgcgtgatatcctgctcgatctctgccgccggtatgccgatgctcacgtcgaccgtagtggggttgtcgtaacgccggttccagggttgacgattatccgggctttgcatcctggcgaattgcaggcggcgatcaacagaccgctgatggcgatgctgttgcagggtcgcaaacacgtcgctacggggacggaaagttttgaatatggccccggcgaggcgatggtgattgccgccgatgtgccgaccctcagtcagattacccaggccagccttcgccatccttactattccctggtgctggaactggataccgccatcctgcgtgagttgcaggatgctgtgccagtggagcagggggatacgccttgcgttggggttgagccaatgaatgctgacgtgacggatgcggcttaccggctggcaaggttgtttgaacaaccggaggcgatggctgttcttggggatgggctacggcgtgagctgcattactggttgcttcgcagtgtccatggtcctgctattcgcgccctgggcgcggcggatagccattccgggcgaattagccgtgtggtcgcaatgttgcgtaaggagtttactcgtacgataagcgttgaggagcttgctgacgtggcgggcatgagcgtgtccgtattccatcagcattttcgcactatcaccacgatttcgcccctgcaatttcagaagcaactacgccttatccatgcccgtcgcctgatgcttgtcgatggcgtagggatcgcgcaggcggcgtatacggtcggttatgccagtgtttcgcagtttacccgcgagtatgcccgcatgtttggcgcgccaccggggcgggatagacgcatggcgacagtgcgagtctga

SEQ ID NO: 197761 - DNA, 210 bp, Klebsiella oxytoca
atgaaaaccctcataccgcttttattggtttattttctccagccattttccgtatatgctcaaaccgtcaccgcaaccggcgatacgcttgataatgcggaaagcaaaattcgccaattggtacagaaggaaggcggtcaatcctataaaataattgaagcgcggatgggaaataaagttcatattacggcagagatcatgccggaataa

SEQ ID NO: 197762 - DNA, 930 bp, Klebsiella oxytoca
atgaaagaacgtgatgttaaaacgggtgaaaaagtattagtgcttggcgcaggacaactgggggctgccgtgttgaagtgtctgattccagcggtcacccaacacaatggcgccgtttcggttatcgtgtcgcccgactcccgggataaacaaggcaacctacaatctgatattcatcaaaaactggctgatgcaggggccaaatttatctctgtcgatgtcgctgccagcacgattgactcgttaaaaaaccacttcgcggattttgataccgttatcaactgcatggggtttgtcgctggcgcgggaacacagataaagattacccgcgcggtactggaggctggcgttagccgctattttccctggcagtttggcgtgaattacgatgtggtgggcaaaggtagcggtcagcccgtctgggacgagcagtatgatgtcagaatgctactgcgggaacagaacgcaacggaatgggtgattgtttcaaccggcatgtttaccagttttctcttcgagcctgcatttgatgtggtgaatttagccgaaaaaaccatcaatgcgctcggcggatgggaaacacaggtcaccgtgacatcacctgcggatattggtcgcctcactaccgaaatttatttgcatcagccgcgtatagctaacgaggtggtctttgtcgcgggtgaaacgacctcttatggaaagctggcggaaacggttgaacgcatgacaaaacaaacctttgccaaaaacatattgacgctcccagacctactggatgcactgcatttaaatccggatgaccagatgcttcgctatcgcgcggccttcgcccgaggagacggcatgtggtggccgatgagtaacacctggaatgtacagaataatataccgactcaaaatattgaatcctggcttaaaaccgttatttaa

SEQ ID NO: 197763 - DNA, 900 bp, Klebsiella oxytoca
atggataagctggcgtcaatgcaggtctatgtttgtgtggtcgatacccatagcttcgccagggctgcagaagtccttgggctgccgcgctcaacggtatcgcgggtcattaaggagctggagttctggcttgggattcagcttttacagcgcaccacccgcaaactcagcgtaaccgcagatggtcgacgttattacgacgaaagcaaaaggcttctggcggatatcgcaacgatggaatcttcattcactggccgaaccgcacagcccaaaggccgttttaaagtgggaatgccgcagtcacttgcccggcattgtattatccccaggctcccggcgtttctgcatcagtatcccgaactggagttgcgactctgctcaagcgataacgtcgaagacatcattcaggaagggtatgactgtgtgattcgcaccggaaggatcgaggattcaacgacgctggtcgcgcgccctctcgcaaacttcagatgggtgatcctggcctcgccagactatatttccgcccatggtaagccggataacgttgacagcctggaaagacatcgcgccgttggctacctgaaccaccgcaccggacgtaccaccgactggatttttacgctggatgatggtgactgcgcgatccgtatgaaagagacgctgatcgttgatgatactgacgcttatatccaggctggaatacaagggttcgggttgattcgtgtcgccagctatctggttgcgccctatctgcaaagtggagcgctcgttctctgtatggagaacctctcttttgatttaccgctttcgctggtctatccgcaaaaccgttatcttcctccttcggtacgcgccttttatgactggagcagagcggtgctacaccaacatggcgactaa

SEQ ID NO: 197764 - DNA, 930 bp, Klebsiella oxytoca
atgatgaagaaaatcattgaaaatgatttcagccgcatagatttgaatctgctgacggtgtttctggtgttataccgcgaggccagcgtcacccgtaccgccgaggttttgcatcttgggcagcccgccatcagcggggcgctgaaacggctgcgcgagatgttcaacgacccgctatttgtgcgcagcgctaaagggatgctgccgacgccgcgcgccgaagtgctgatatctcatatgcagccgctgatggaaaacctgcatacggtgatgtttggcgtacaggacttttcgcccgccacggcaaagcagacctttcgggtaggaatgagcgactggagcgagcactggctgatgccagatttattgcccgccatcgcctatgaggctccgggcgtggagctgcatattgtcgccgctgatcccttccaggtccgtcggttgctggaggaggatgtcattgatattgcggtttcgctgaataaaccgagcaccggtgaagtcatcagtgaaccggtcatgacgatgagggtttccacactctggtcgccacagcagatcccctgcgatgggccattgtcgataaacgactttatcgcttatgagcacgtcatggtgtcgtatcgcgaatcaaaccatagcgaaattgaccgacaactcgccagccagggattacaacgccgtgtgcgttacgttacggcgaatttttctacctttcctctgctgctaaccaccatgccgattttcgccacggttcccgacgggctggcccgacgatggcagcaacattttactttacggtccagcgcaacacccgtgaattatcccaccttcacgctgtgtattctgcaccacaagcgccgggcgcaggacccggcgctaaactggctgatggcgcagttaaaaacagccatgctgcaatttcaataa

SEQ ID NO: 197765 - DNA, 843 bp, Klebsiella oxytoca
atgaaacagtatcgaacaggcgacagcgttatctttaaagtactggaacgtgaaattcacattccgacagcggatttatatccagattctctccagccagcggatgctgatgacgctcatcagccggttccgctatcaatacatagctgggtcgtccgcacccccgacgatattattgtgattgataccgggaccggtaacgaccgcgatcgcgggaataatccgttttatcatcagttagacacaccctatctggagaactttctggcaacaggtatcaagccggaagaggtgacgttggtattaatgacgcatctgcatacggaccatgtcggctggaataccgtttggcgtgaaaatcgttgggtgccgctgtttcctaatgcgcgatatatctgttctgagaaagagttgatgcgggtaaaagacagcgagcgctaccggaatttatggctcgacagcctgctgccagtgattgaggcgggacaactggaaacggttgatgttgccgcgcagccggtgttcggcggcagaatacactatatgccgacgccagggcacagccccgatcatgcggcgttgatactctcctcgtgcggtgaatatgccttttttgccggggatattgtgcattcgccgttacagtttgcccacccggaatggaattcagtattttgcggcgatcgcgaacaggcggaaacgtcgcgacgcctggcgatggcgtggtgcgcagagcatcatgccctgtggtttagcgcgcatttcgccggacagtcctgcggctggctgaacgttgataagcatgggaactgtggctggatggaggcgagtgacagtaaatga

SEQ ID NO: 197766 - DNA, 915 bp, Klebsiella oxytoca
atgatgaataaccgttctttcatattggtttttggcgcgacgggtcagcagggaggttcggtggcaagagcactgataaataaaggctggcaggtgcgtgttatggtgcgcaatccatcctctccggcatcactcgcccttcgggatgccggggctgaaatggtcgccggtaactttgacgatatcgaggcgatgaggggcgcaatgacaggggcatacggcgtcttcagcgtccagccaagctcgccgggagggacagtgaccgacgacgatgaagttcgctatggtaagacgatcgccagccttgccgccgaatgcggcgtgcagcatctggtttattcttcaggtggtgcggtgagcgatcggccaacgggcgttgcgcatttcgacacaaaagcggaaattgaacggcatatccatacgttgccaattgtttcgaccatcgtacgacctgcgacttttatggagctgttggtcatgccaggtttcgggcttgatgaggggcaattccacttctttatgcagcctgatggtgcgatgcaggttctcgcggtagaagacatcggcaaaattgtcgccgcgatttacgcacagccggagcgatttaaaggtaaaacatttgaaattgccagcgatgttgtcactggcctgcggcttcaggagctgttctcagcagcggcagggcggctgattccttattctcgtttttccgatgatgtgctgaccgcgaatcccttcctgcaaaagttgactgcgctggcggatgatggacggttggtggggcatgcctccctggaggagatgcggcaactgaatccgcaactgcaatcctttgagtcctggctggcgggaagcgggcgtggtgctttcgaacgggcgctggcaatctctgccaactgggagtttaaccggtaa

SEQ ID NO: 197767 - DNA, 906 bp, Klebsiella oxytoca
atgcgagtatttcttaccggagccagcggttttattggctcccgcatcctgacagaactgctgacagccggacaccaggtgaccggccttgcccgctcggagaacagcgcacaggcgctcagaaaagcgggcgccgatgttcatcgcggtacgctggaagcgccggattcgatagtaacagcagtacagcatgccgatgccgtcatccataccgcgtttgaccatgattttcaccattttgtcgagagttgtgaaaaagaccaacgggtcatccacgctatcggccaggcgctgaaaggcagcgatcgcccctttatcatcacgtccggcaccggtatcggcgataacagcgacgcggccctggcccgggaagatcaatttaaacctgacaacatgaatccccgggttgcctccgaaattgagggtaacgccctgctcgccgagggcgttaatctgcgggtcgtacgtctgccgcaggtccatgacaccacccgtcaggggcttatcacttattacattcagcacgccgtggaaaaaggcgcagttgcctgcatcagtgagggcgacaaccgctggtcggcggcccacgtcagtgacgtcgcaagattgtaccgactggtactggaactcggtgaaaacggtaaacgctaccatggcgttgcagaagaaggcgtacctctccggcagattgcggaagtggttgccggtaagctcaggctgccactgatatcaatctcgacttcagaggcacaagcacattttggctggtttgcgatgtttgccgccatgaatctacgcgcatcatcggcctggacgcgtcaacagttggactggcatcccaccggccccagcctgaccgacgatttgcagaatatggattacacgtcgtttttatcgtctcaataa

SEQ ID NO: 197768 - DNA, 867 bp, Klebsiella oxytoca
atgcaaacggcaatgcagtcactgggcgatttcatgcgggcgctacgtttgcgcctcgatcccaccgagtttggctttgttgcgggcagacggcgtacgtccggattgcgccgcgaagaggtggcgcaactcgcctgtatcagcccgacctggtacacctggcttgaacaggggcgcggcggtgcaccgtcgcgggaagtgcttaatcgcattgccagcgggctgcgcctgacctcagtggaacgcgaacacctgtttattctggcgtttgggcatccacccgacgcgcaattcaccctttccaccgatgtgacgccgcgtttacagcgggttctggatacgctcaccatcccggcgatcgttaaaaccgtgacctgggatgtaattgcctggaatcaccccgctgcatgcgtattaacggattacggacaactgccgcgggaggaacgtaatgttctacgccgaatgtttaccgatcctgatgtacgccccgcgcagagtgactggcaggggatggcgcggctggtggttaacgcttttcgagccgacgtcgcgcgggcagggcaatctgcggggatcgacagtctggtgacggagctttcgcaacgaagccctgaatttgacgcctggtggcgcagcaacgacgtcaccagccacggtgaaggggcaaaacgcatttatcacccgcaagctggagcgatcgatcttgaattttcgacgtttatggtagagggccgacaggatctgaatatgatcgtttttaacccggtcaatgaagagagccgccggaaaattgatgaacaggtaagacaatccctgtcttacggcggcgagtcagaccgccatgataccgccatctacaaataa

SEQ ID NO: 197769 - DNA, 744 bp, Klebsiella oxytoca
atgagtaagaaatttgccaataaagttgtggttattacgggcggcagtgaaggcatcggtctggcgaccgcgagattgttttcagaagaaggtgcgcatgtgtacgtaacagcgcgccgacaggcgcaactggaggtagctgttcagaaaataggtcatggcgccgtcggcgtacagggcgatgtggctgaccccgcaagccttgacagactctataaacgtatcagggaagaacacggcagaatcgatgtacttttcgccaacgccgggatttctgaatccgcatcactggacgacatcgatgagacgcatattgaccggatattcaacgtgaatgtcaaaggtacgattttcacggtgcaaaaggcgcttgcgttgatgtcggcgggaagtacgattatcctccccggttcaatcgccggcagtaagggaattcccagtctgtcaatatacagcgccacgaaggccgcaatccgttcgttcgcacgcacctggactaccgacctcaaaagccgcggtatccgtgtgaacgttgtctctccaggtatcattctgacgcccgcgatgcatgcctacttcgggaccaatacgggcgcggaggagacgctgaaaaacatgagtccgtttggacgggttggacaggtggatgaagtcgcccgagccgtgttattcctggcatccactgacagcgaatttatcgcaggcaacgaattatttgtagatggcggtatcatggcggtctga

SEQ ID NO: 197770 - DNA, 240 bp, Klebsiella oxytoca
atggcgtcgcttggaacggtcctccagagtggtgcgcccggttgccatacggtatccgaagagggggagagactgcttatttgtgggcaacgggctgagacgatcgggggggatgttacctttgacgatatcgtgtttgtggtcaccgcgatttcacttgcgactgagcaggatgatgagtctgaaccgcgcattgctcatctggttgatctgtttctgacaggcatcggcgtccattga

SEQ ID NO: 197771 - DNA, 573 bp, Klebsiella oxytoca
atgcgagccgatgcgagaaaaaactacgaccacctgattgccgtcgcacgcgacgtcttcattgagcaaggtgcctatgcgtcattgcgcgacattgcccgcagagccgaagtcggtctgggtacactctaccgccacttcccgagccgggaagcgttgcttgaagtgctattgcgttcaagcttcgacgatctgactgccagggccgaagcgctactgacctcggtcgattcctgcgaagccttaatgctgtggttacaggagacgatagctttcacctatgaacatcgcggcgttattgcgccgatgatgagcgccatcgaagatcccgattccgcactccatacatcgtgcgtcacgctacgtactgccggagcctcgcttctggcccgcgctcaggccgatggcaaagcaagagccgatcttgatggcgctgagttgtttgatcttatcgccgcgctcgcctggctgcgtggacacccctctcacgcacctcgcgccgaacggcttttcagcgtgattgcagacgctatcctggtgacaaaaacagccaacgctacagatgaaaaatga

SEQ ID NO: 197772 - DNA, 1029 bp, Klebsiella oxytoca
atgtcgattaaagtgatgaaggcagttcagcagtatgcgttcggtgggccggaggtacttcgctatgaagaggttcccgtgccagatcttcagcccaacgaagtgcttgtccgcgtgtatgcggtcggcctcaatcctcctgactggtatcttcgcgatggctaccgaatgttgccgccggaatggcaacccaaagtcactttccccgtgatcctgggaacggatatttcgggggtgatcgttgcggtgggcgaaaacgtcacagcgttctctgttggggatgaagtctattcgatggtgcactttcccgacggggcggctggcagtagccgggcctatgccgaatacgtcagcgtagcggcaacggaggtggcgcgtaaacctcgtcgtcttgaccatattcatgccgccgccgcccccatgtcgctgctgaccgcatggcaatttatgattgaacaagggcatgatgtgcaaaacccgctacagccaaccccgcataagccggtgccgctggcggggcaaaccgtactggttaacggcgcggcaggtggtgtcggccatttcgccgtacagctggcgaaatggcagggcgcgtatgttatcgcggtggcctccggcgaacatgaagtgttcctgcttaaccttggcgttgatgaatttattgattacacgaaacaggctgccgaggatgtagtgcgcaatgcagatcttgtcatcgatgcggttggcggcccttccgcaggccgtttcttgcgtactctcaggcgcggcggcgcgctgtttcctatttaccctctagggttttctggcactgaagaggcccagcagttgggcgttaccgtctcggcaacgcaggtgcgatccaacggtgctcagctcgcccagcttgccgaattgttggataagggggtcattcaggtcgctgtcgacagtacgtttccccttgcacatgcgctacaagcgcatgagcgggcggctcgcggacatattcaggggaaaatcgtgctttcggtcattaacccggaatga

SEQ ID NO: 197773 - DNA, 171 bp, Klebsiella oxytoca
atgttcgggcagagcttgcggcctgacagcgatctggtgtttggcgacctctatcgtatgacctcgttggtcgttggcctgctcgcgacgctggcaatggtgtttgtgctgcatctggtgctcaactgctttgcggcgacgcgctatgtgaatgcgccgccaggagagtaa

SEQ ID NO: 197774 - DNA, 387 bp, Klebsiella oxytoca
atgaaagttctgaatatactgacccgtcaatgcatcatgattagtcgttttgacgaaacggttgccttttatgaaaccttgattgcgcaggaggcaagactgcgcttcgactatcccgaatacgacctcaaactggcccaggtgggttcggtgcttttaatcggcggaaccgatgagagcctggcgccttttcgcgccacccaggccacttttctggtcaacgacattgcagcctgggagaaacacctgccctctaccggcgcgacgattatcaatccggtgaagcgcgtccccaccggctggaacatgctggttcgccatccggacggcatgattgccgaatacgttgagcatcaaagcaaaaatccagcggatgagatcttctga

SEQ ID NO: 197775 - DNA, 183 bp, Klebsiella oxytoca
atgagcaataacgcaacaatcgcacttgttaccggtgggagtcgtggtttgggccgttctacggtagaagcgctggctcgccggggcatcaacactctctttacctataaagcgaatcacgccgaagccaacaaggttgtcgaacgggttaaatctctcggcgcaacggcggtcccgctgtaa

SEQ ID NO: 197776 - DNA, 459 bp, Klebsiella oxytoca
atgggatttctaaatgccactgaggcggaatttgatgcgctgtacaaaattcatgtgaaaggcgtctttttccttacgcaaaaactggtgccgttgatggtcgatggagggcggatcgtcagtatttcatccggccttacccgtatcgttatggcgaatcgcgcaccttacgcgatcatgaaatctgccgtcgaaaccatgacgaaatacatggcatttgagctgggcagccgcggtattgcggtgaactgcgttgcgcctggcgcgattgccaccgatttcagcggtggggtagtacgcgataatcctgaggttgctaaagccatctccgccatgacggcgctcggacgtcccgggctgcctgatgacattggcccgatgattgcctcgttgctttcggaagaccatcgttgggtcaacgcacagcgtattgaagtctcgggcggtatgcgcatatga

SEQ ID NO: 197777 - DNA, 1038 bp, Klebsiella oxytoca
atggtattacaattaaccggcactaaccggaacggctccccggagctttcactttctgctggcaccagcactgcctttgcctggagccccttcgggggcggcacggcgcgcacaggaaatgtggctttactgccaggttttaacggcgagcgccaggacccgctgtccggggtgacgcatctgggcaacggctaccgggcatacagccctgccctgcggcgtttcacctgcccggacagtgagagtccctttggtgtcggggggattaacccctatgtgtactgtgaccatgacccggtcaacaagactgacccgagtggacatggcggctggtccagaatccgcaacaacatgaaaatgttaactcaaaaaatgagtgaggaaagcgccgagtcgatgagcactacagtggctaactccagctcaattaacagtggaattgaaagttcattacagggagcatcaggaataccccagtcagagagaaatgaacgttcactttcttcaacctctaataataaacagggagtgaatgtcgagatagaggtgttgccaaaaggaaccgtattatataaagcaagtccacatgagattgaacgactggatttttctgacaacagtaactcaccatggtcaggaacatattttgccgagaaaaaagacatttcaaaaggatatttatatgactatgatacaccatatcttcataaattcattctcacagaagatatccttacactgagattcgatcatccatttttaattaatgtaagcatagcccaggagaaaaaggccgaagaattaacattgatattagctcgagaaaatattttaaaaaaccctcatgaaaatgactataaaaaatttactactttacttgaaaacatgggttatggttataaagggcttcactctgatgatgatcatgaaattattttaagaaatgcattaaaacaaaaactaatgctgataaaatcgactaaatacattgtcgattataaaactggcctacttaaaaaatcgccattgcgagattaa

SEQ ID NO: 197778 - DNA, 1041 bp, Klebsiella oxytoca
atgaacttacagataaccggtaataatatgaacggttccccgcagctttcgctatccgatggcaacaacaccacctttgcctggagccccttcggaggcagcgcgacgcgtacgggaattacggcttcactgccgggcttcaacagcgagcgccaggacccgctgtccggggtgacgcatcttggcaacggctaccgggcgtacagcccagccctgcggcgctttacctgcccggactgtgaaagcccctttggtgtcgggggaataaacccgtatgtgtattgtaaccatgacccggtcaacaacactgaccccagcgggcatatgccaaaaggaaaagctgccgccaaggctaaaaccagaaggaggagaagaaggctcgatttgtcatcacgccaggctgaatcattgcctacttcgctgccacagcccacactggagacctcaggcacagcatcagccgcagccgcagcctctgggtattcttctgaagttgccgccccggctgctcttcatgatgatccctctgcttccaggccgggattgctcggtggagggaacgaagatgtagaatctgtaaattctctagatcaaaggctcactaccattccttcttatgaaggtgaagctgaagaatttgcacaatttgatagtgcaaccaattatgcggcctggaatgaattgggggcccccaggaatatcgcatttatggactttgaccttgaaagcgaaggaagaggaacactatttagtatcagtgggcaaagacgtattttaaaggcggtaaaaggccctggtatgtttggtcggcagtttaaatttttaaccgtgggacatacaagagcatatgactcagaattaaaacttgcggaggcattcgttaaacttttcccagataaaaacataaaaggagtaatatcaatacattcggagttgcctatatgtaaatcgtgcaaaatggtaattgaacaattgaaaaataaataccctcacttgaaagtttacacacatgctcagggaagtattttacggagacgatga

SEQ ID NO: 197779 - DNA, 1110 bp, Klebsiella oxytoca
atgacattacagttaaccggtactaaccggaacggctctccggagctgtcactatccgatggcaacaacaccacctttgcctggagccccttcggaggcagcgcgacgcgtacgggaattacggcttcactgccgggcttcaacagcgagcgccaggacccgctgtccggggtgacgcatcttggcaacggctaccgggcgtacagcccagccctgcggcgctttacctgcccggactgtgaaagcccctttggtgtcgggggaataaacccgtatgtgtattgtaaccatgacccggtcaacaataccgaccccagcgggcatatgccaaaaggagaaattgtagccggagcaaggaccagaaagaggagagaagcgatagatatgacatcactccagactgagtcattacccacttcgctgccacagataactcctgacacatcaggtaccgcatcatcagtcaccggtgtaacgggtaacgcagcgagtgtgagcagacgacgctctattcctgagagggatgtccagggtctttccgaaactgatagccagcaaatcagtaatccaataaccggaccatctcaggatgagatgtcaaatatacctcaggcctcaacaggggcaccatcacaacatagggtgggaggtgaaataaatcgcttgcaaaccgggatgaatgctgacgaacgcatactcctggggtttcatggctcatcaccggatcatgaagcttctctgatggcaggtattaaaattgaaggagattttacaggtgctggcggtggtacccggcatggtataggtttttatatagcaagtgactatggcacagccgaagggtacgcgtttgcagcaaacaaaagtgattttaataaaccgagagatgtatatgccgtatatgccaggaataaagaagttattaaacatatggaaaacgttcagtaccaaaccctttataaaggaagtgggagacggcaaacaagctatgaagccatttttacaaatcagagccatgtcgacgggctgattctggaaaaaatcccagaaaactcgcgactcagagacctcaaagtcgatattaaaattttccaacaaaacagattttaa

SEQ ID NO: 197780 - DNA, 750 bp, Klebsiella oxytoca
atgccggaaacacaggcggaaggcatgtctttgggattaccaccgacggatattgccggagcgggcacaccgtcatctgaacaggcagccactggaactgcgagcgaaacgatacttgtcaggaacagggccgcttcagaaaacagccaggcgtggagtactttgagtggcggagcggtagggggaagtgtacagagcattgcccgaaaatcacttcctatccaaagaaagagacctcctatgttgaacataaaaccaacaagggatgagccaatgtttattgctatgacggctgacaatgtcaggtttgttcatggttcaaccagtgattctttggcaggatttcagaaatttgagtccttattaagtatggaggacattgcaaacaacgactggtttaaaacgcatccgctacagtctggcgagcggggctacacaaaaatatcagtaggaaaagagcaacccatcgctcagggggtcagcatgaataatatacagaactacaaagattcattgcgttactcaacggagagagcctatgcaaggcaagggagtttccccgttctgtatggtatttctggctcaatcccattaaatgataagatacccgatcacccattaagcatcggttcaatcaaagctgatgctgtggtagccatctatgttcaccctgaaaatcggtctacagcagcagagatgctgtcatcatcatctgagttagtcagtaaacttagagacctaataccttaa

SEQ ID NO: 197781 - DNA, 228 bp, Klebsiella oxytoca
atgcccttctcagagattttctggcgaaattataaatttcagaacgacggatccctgcatgcaattaaaggttatttcactgctctgcctatatactggaccgaaggagagaataacatgattcgatataatatgcggctcattgccagcaatgctgtatctgctgacgatacacagctgttagcggataacagtgccggtgataataatgaggtaaatcaggcatga

SEQ ID NO: 197782 - DNA, 753 bp, Klebsiella oxytoca
atggaattcagtgacagtcaggttgatgtgctaaaaaaaatatcttttgaaagttatattggcgagctcactgagcattgcggagttatttttccggaattgatttccctgaacagaaaagaggattttcgttcttgtattcaactgggcatcactcttgcgagaaaagccggttacactcaaagaggacccattcgtctctatattgatatgatgattatactcgggatgaacttcgagtgtgatccgctttttcattggttgaaaacggaagagcaaaaagttctctcgcagatagaacggagcataatgtgctgtggattactggatgattatcttgcaagagtttatggggtaaacggatgtttttttaagaagagcctagaaaaatttaaagattacagtgttaaattcctccccgaaaaaataagttccagtaatgcagagctacacgaattattaagggatatttatccacagcggtatgactttgctggctatgatgctgtaaatgatttaattactctttcaggtgtgggttgtgaaagatataaactgaagcgagatagtcataaaacatatttgattctcattatgtttttatttggttgctcatttgaacagaatgttttttgtggacatcttattactgaaccattaatgaaatattttaataacgacgatatcagcggacacaatattattgtgtcgtcttacgcctcttttcaggttaatcatggttcgcatcaatag

SEQ ID NO: 197783 - DNA, 384 bp, Klebsiella oxytoca
atgcccatggatgaagacgctcagttcgtggctgtggtgggactgtttaaccgcccggatcagaaggacaaccgctggcgcctggtggacggcaacgggcaacttcgcggtcagggcactgagctgcgcaccgatgtgtggggaaccttgagagcaggcaagggactttttgtcgctgcggatgcccaggcgaaagcgcagggcgaggccctggacatggatgcggcgctgaaggaaatcgacatgcttaatcagcaattgcaacagctggaaatggccacagaaaaagcgcaggcgctgaagggggatgtcgacagccagatacagatgtttgagcagcggctgaaatcgcgcaatgaagcggtgcttttctcggcgccgtaa

SEQ ID NO: 197784 - DNA, 249 bp, Klebsiella oxytoca
atggtcctgaccagcggtgaagatatgcagctgaccgctggccggaacctggcggttaatgccgggggcgatatcagcgtcggaataatgggcaatgcgaccactttgaccggggagaagctggggctctttgcccgcaccggtcaactgggcctgaaatccggggaagggccaatagatgtccaggcacaaaacgccagtatgcggttgttcgctgagaagaagctgacgctgagctcagcgagttga

SEQ ID NO: 197785 - DNA, 228 bp, Klebsiella oxytoca
atgcccttctcagagattgtctggcgaaattataaatttcagaacgacggttccctgcatgcaattaaaggttatttcactgctctgcctatatactggaccgaaggagagaataacatgattcgatataatatgcggctcattgctagcaatgcagtatctgctgacgatacacagctgttagcggataacagtgccggtgataataatgaggtaaatcaggcatga

SEQ ID NO: 197786 - DNA, 498 bp, Klebsiella oxytoca
ttgttatacttggttgccttgtttattctgattgtattacaaattaattgtgacataattaaaatatcatgggcaattcaatatgaacaggttaaaaatggaataaacgaactctcccgtatatggaaaagtgaaaaacgcattaagcggttgaagtttcaattaggtaagaaaggttcgcttgaaaaagaggatattgcgctgggttattctgaacatatcaaggagcttgatgcgaatgcccaggtcaacatcttagtaattggtagcaagttcgatactgtgaatgaatggtatggtgctaaggggaactctactttgaaagtatgcattcgtggaaaaacaagtaaaagtggaagtgagaatatatttaccgtcgataaattaggattttatctcaaagacacatatgattttgttgacgaaggcaagactccagaaccacttggcatttggagtaaaaacagaatattagacaaaacagaatccgcattataa

SEQ ID NO: 197787 - DNA, 450 bp, Klebsiella oxytoca
atgaatcaaaaaacgccctccttatatgaaattcttactggcaactttacaggggatcttccccttgaagttgtaaacgaagaagaccaggtcattttatctgtactggataacatccagcgaattttgaacgcccgtgccggaaccataagccatttaccagattatggtttgcccgatatgaccaaaattctgcaaggcatgcctggaactgcccacgagctgatcgatacgctggcggctgttctgctcaaatacgaaccccgtttgcagtcactcaatgtcaccttactcgaacagcaagtgcctggagaattgcgctacgccattgatgcggaactgagaggcataggacttgtacggtatggcactgagtttatgcctgaaggtaaggtactgatcaggcatctgaaacaacggcagtatcttgatgtccgttccgcaatatag

SEQ ID NO: 197788 - DNA, 1344 bp, Klebsiella oxytoca
atgacgacacatcctgagcgctgccttaaaaccggcggtgacccgcgtacgttagcggattacgccgcgttgcgcgatgaaatgaataaactgagccatccggcgcgcccggatgtcaactggcagtacgcggaaaagctctgcttgtcgctgtttgaacacaacggcgtggaactgcagaccgccgcctggtacatactagcccgcacgcagttggccgggctgtacggtctgaacgaagggctggcgatactggaagcgctggtcgcccgtcagtggggcaatatgtggccgcagcagacgactgcgcgaatgaaaatactcagttcactcagtaaacggctgcagctggcgatgcgtactctgtccctgaactctaacgatctgagccagctttaccaggccgaagcgcacctgacggctctggatgatgtgctgcagcgcctggaactcaaacatgtcagccagctcaatgccctgtataccctgatgcacaacgtggcggtgcggctggaagacagagaaaatatagaggagaccgtgttgcgaacgagcgccgctacgcctgaaccttcctgcgacagcctccctgaaccgaccgagcaggtgaaatgggtctatgttgccgagccggcaccgcagacggaagctgacgcggtaacggcattgccgccgcccgcgaagccctggaaaccctttgccgccgggatgctgaccatgatagtgctggccggagccgcggcgggaggatggctggcaatgcatccgtccgagacggcccagcggcagtttaccgctatgcttactccattacccgcggcgctttcagccgagcagctacggtcgctgcgacaacgctccccttcgccggagacaggtataaaacaaacgcagcagcggctggcgcagcttttgcagctaaaaccggactgggcccttgattatggcgaccatctggcgcagcaggcgctgacattatggccggaacaggcgaaaccgctggcgcggcaatggcaacagcaggtcagcgccgccgcgcttcccgcggagaatctcaacggctggcaccagggaatgatgcagctacagcagttgacgaaccggcttaacgcgctagatgagcagaagggggggtatattacggtgagtgaactgaagtcggcggtgtttgccataacgcagtcgttcagccggaccgttccggcggaagagcaactgcggcagctgtcagaacagccgcacaatcagccaggggcttcggcgcagcagagccagacggaacaacacctgcagcaactgattgcccgctatgccgcgttgaaacaaataaaatcggcggaataa

SEQ ID NO: 197789 - DNA, 480 bp, Klebsiella oxytoca
atgaccgcaatgtaccaggcgggcggaaccatcggctcgctgtttgcaggctggctgatggaccggatcaacccccatcgggctctcggactgatttacgcggttggcggcctgtttacgatggcaatgggctatgccgcggcaagctttgcgctcatctgcctactggcatttatcagcggagcctgcttaaacggcgccaataccggcatgaacgcgctctccgcccgctactatcctaccgaagcgcgggctaccggctccagctggatgcacggtgttggccgcatgggcgcgatcctgagcgcctttgccggagcggaaatgctggcgctgaatatcagcttcgaaagcgttttcctgatccttggcattcccgccgcgattaccgtcgtcgggctggcggccaaaggtattttcgcggctggtccgacggcaaaagccaccgcttcaaccacgcccgtcagaagtacattttaa

SEQ ID NO: 197790 - DNA, 1002 bp, Klebsiella oxytoca
atgagcgaagtaacggacttaactgtcatcgaaataaagccggagcaagcgccagcgctttactgcgcgggtggacttaacggttttcttgagcaaatccgagaactggctaaagaagtgccagacgttaccactaaaaaaggccgtgaccgcattggaagcctggcgcgcatggttggctccagcaaatcagctattgagaagcctggtcgcgaatacctcaagcgattgaaagaggcggttaagcccgccgaagaggaattgcgagttttcaccagagaatgtgatgccattcgtgacgcaatccttaagcctcgtgatgagtgggaagccgagcaggaacgcattaaggctgaagaagccatgaacgcactgcatgccgaagcgctggccatgaatgaagagttcgatcggcagctggctgctcggattgagtctgaccacgaaatggccctgctgatgaatgacgcttttgaccgtgaccaggctgaaaagaaagcagaagccgagcgccagcgcatcgctcatgaagaagagattaagcgcctggcggaagagaaggccaagcgtgaagcagctgaaaaggcacagcgtgaaattgacgctgcggccgccagagagcgcgaggcgattttggtaaaagagcgcgcagaacgtgagcgcattgaagctcagcagcgggccgagcgcgaacagcgagaagcagctgaacgtgctgagcgtgaaaagcaggctgctgttgaagcagagcgccgcaaggctcaggaagaagctgatcgcatccgccgcgaggcagagcagcgtgaacatgcccgcctggccgaagagaagcgcaaggccgaagaagaagcgcgccgcgccgctgatgttgaacatcgccgcggaataaattcagcagcggtacaggctcttatcgatcagggaatcccttatgaatgggctaaggcctgcatcattgctgtagctctcgggaaagtcccggctacaaccatcaaatactga

SEQ ID NO: 197791 - DNA, 252 bp, Klebsiella oxytoca
atgagcagacatgacttcagaagaccaatagctgagcacattacaagcattcgccaggcgctctcaaaagtaccagcagataagcgccttcacgtcatagctgaggcgttgtacgacatgaacccgacaggagtcgatgaggttcttagagcttcctgtggctgctatgagtgggatatcagcatggactaccgaaacgccgacgtccgttacgcaaagaaaaacgaccaggaggtgccgcatgacaactga

SEQ ID NO: 197792 - DNA, 249 bp, Klebsiella oxytoca
atgcctaaaataaccgaagcagaggtgatttcagctcttcatgattatggcaactgcatgacctatcatctagccaatatcatcacagcaaggcgtggttacaaagaccacgtcaaaacaccacaggcgctacgctttctgaaaaagatggagagcactggcaaagtgaaaagagtgaagagcgcatacgcggctcaaatatgctgggcgctggccaacggcccgaaggaggaggctaataatgtctaa

SEQ ID NO: 197793 - DNA, 240 bp, Klebsiella oxytoca
atgtctgaatatgagaagctgtcagaaaacctatatcgggaagcgtgtcgaattgtaggggaatgctgcttgatgcttgccagcaatgatgcggaaacaaacagagaccagcttgttcacgagttaaagcggcttcactgggaaatcatgaagcagacagatgaatcgaaccttcctattttgcttgccattgaaaggcttgctaccagcgaggactggaagaagccatacactggctga

SEQ ID NO: 197794 - DNA, 345 bp, Klebsiella oxytoca
atgaaaaaatggttattggccttagtgcttgtagtctctctcccagcaaaggctggtttcataactggaaatgagctttatgagctctacaaagcctcaattcgtgccgaacaagcatcgccaagcgaaaaagatttaatagatgcaaatgagtatttgggctacgtaacaggcgtgtgggacgcgctcgaaggctttgccgtttgcactggtgacaaaatcacaagagggcaaatcggcgacatggtcggtgaatatcttaaaagcaaccccggcatccgagataaacaggctagttccataatcatgatttacctgaatgctaaatatccatgcaaaaaataa

SEQ ID NO: 197795 - DNA, 435 bp, Klebsiella oxytoca
atggctaacgtcatctatcgcggcccggtcgagcgtgagccggagaccatcaaccttcctgtcgcatctgctctcaatcctggtattgccgtaaaaatcgcttccggcaagttggcggcatctgcagacactaccggccgctggttcatcctcggaaatcggcgcttcatcggtcaggcgattactactgcctacgcagctaacgagactggtgtggcatatcgcgtggaaggggagcaggaatacaacgttcgcctggcagcggcagcctatacggtaggccaggagctgaccatcggtgccggcggcatattcaaagcggccgcaaccggcaaccaggtcgtcgcaacgttcgacgaaaaagcagggcgcactctggcggcggaaggtttcgccgacgtggtgatcctctccactccgtacgccaaggcataa

SEQ ID NO: 197796 - DNA, 1032 bp, Klebsiella oxytoca
atgttaaagtttactccacagcagcaaaagctgattctcaatgcccgccgtcgctgggacatgatgcagcgcaatatggctgcacagcatggctttgcggtcaatgacgcaaatggccagttcatcgcctttgatgagctcgttggtaacgcatcagtgctgccgaaagacgtctggggcgaatgggaccgctcagctatcaccgtacagcgtgatgttctggcggtgtttaatgacctggcggccagcgtatcccgcccgatggcgctgggtaaaatcgtccactacttcatgaccctgtcagattctggtgatgtgaatatcagcctggatggtcgcggcaaggcgaagggtgatcagccggtaatggattacgaaggtactccgctgccgatcatcgacagcgaattgaccttcggctggcgtcagatgctggctgctcagactgaaggttattctctggacagcgacgccatctccaaccatcagcgcaaagttgctgagaagctggaagatatggtgctgaatggcgacccgaccatcaacgtcggtggctcaaccatctacggtctgcgtactgctcctaaccgcggaaccggaacccacggtctgaccctgaacggtgccagcggcgcgcagtgggtcgcggctatctccagcctgattaacctgctgcataccgaaaacttctatgcgccggtaaccatttacctgaactacaaagactggttctacgcgtcggttaacgactatgccgcgaactatccgaagaccatcttgtcccgcatcatggaaattcctggtgtggccgcgctggttccggcgtccaaagtccctaccgatgaattgctaggcgttgttaaacgccctgacgtcgttcagatcctgaatggcatgccgatgaccatgcgtccgaaagcacgccttaacccggaagatgattatgtcttctcggttctggccgccgcggctccgcagttcaaacacgatgcaaatggccaggctggttacgttcagctgaccaaagcataa

SEQ ID NO: 197797 - DNA, 288 bp, Klebsiella oxytoca
atggctggtaaagaacaacaatggctgcttacccatgacagccacgaacttaaaaagggtgaagtttacaaaggtgaaactctcccgctttggctggttggcaaggcaatccctgtgggagatcaggtgctggaggtggcgaccccggccgatctgcaaaagctgcagtttgacctcgacgaggctaacgacaaagtagaatcgctgaccgctggtaatgccaagctgcaggctgacctcgacgaggctcagaaacaaatcgacgagctgaagaaaaaggcgaaataa

SEQ ID NO: 197798 - DNA, 2652 bp, Klebsiella oxytoca
atgaccgagaaagtcggagatatctattacgaagtcgatatcgaaactgcaaagcttattgccggcagcaggaaggcttctgatgtgctcgatgcaatgggcaagaatgcaaatggagcaagttctggcatagataaacttgaccgttcaggacagaaagcagctggctcgatgggagtattgaagtcagccttgtccggagttgccagtgcaataaccacggcaattattattgaatatggtaaagcatttctagaagttgctgacaatgttactcaattacaatcaagaattttaagactctcaacagacttaggtcaggcaaactccaccttctttgcattatcacaaatagcttctaatacaggggctagcctgcaagagacacaaaagctctgggagaaattaacttcatcgctccagtctgcaggcgtaacgaataaccaaatattatttttaacggatacgttacagaaaattggaagggtcggagggagttctgctgaggaaatggccaatgcattacgtcaattcgggcagtcaattgacggcgggattgtaagggctgaagaattcaactcagtagttgagaatatgcctgaactggcgaggcagatggccgctggtatggggctttctatggggcaattgcgtcagtcaatgcttgaagggaaaatcactgcacaggatgcactgaacgcaatagcaaaacagtccggttacgtaaatcaggagttcagcaagctgcctagaacaatggagcaagctgagaatagccttaccgtatcattatctttgctagtaggaaaaatgaatgaggcaaccggagcgagtaaaaccatggttgccatcattgattcaattagcgcggcgattgaccgcctaagcggaagggctgaaacagcctcacaaaaaattgctgaccttactgcaacggcagacatgtatagccgaagagcaaggacttggtcatggcttggcttggatggatggtcagagcaaaacaaggctctatcggctttaagcatgaaggcagctacactgacaggagatcttgacgctgttggtaaggcctctgcaaatgcatctaattcaaaacttggtttcgggagtggcccgcaacccaacccgaaacaagacaacctcattaaaatatcagaacgccggcttgcgttggccaaacttgaaggcgaggctagagccagacttcaggcccaatatgatgcagctgatgctggggtgactgatccgaagcgaatcaaagcgctacaggatgagtacgccgaaacctatcgggttacggaggcgaggaaggaaaacgacaaagccgggaagcagtcggcgtctaccgcagattctattgcccaaaaactcgaaaaccttcgccagcagtctgagcttgcagcggactcaactcaggaattgagccgtgagcaggcgatattacgtgcgcagcagtctctcggtaaatcggctactcaggctcaaatccaggaagcaggcaaatacgcagcagccgcatgggatgcagctgcagcggcgaagggggtaacagaggcgcttaatgctattccagaacaggcggagaataaatcctacgctgaatccatgcagaacctgaaagcggcgctgaacgccggaaagattgatctgcaggaatacaacgcagccactgagcagatggagcagcagcatcaggccaaccttgccaaaatacgctcacagcaggtggttaaccccacccagcaggcacttgctgaagttgacccggtgcagcagctggccaaccagcacgcgcaggagctggcgctgattcagcagttcgagcagcaaggggttctcgcccatgagaatgcattagcgctgaaaaatgccgctgaccggcagtatgagcagcagcggatcgctgctcaatgggaaatcctcagccagcaaagcctcggctataacatgctgacgagtgcggtggatgcgtttagcgggaatgcctccaatgcgatcaccggtctgctaaccggcacaatgtcagcacaggaggcgatgcggtcgctcggtaacaccatcctgaacagcgtgatcaacagcattgtccaggtgggcgtagaagcgctgaaaaactacatcctcggtcagacgctaggtgccgcatcggtggcgacatcggtcggactggcggcaactaccgcttccgcctgggctccggcggccgcgatggcatcgctcgcctcgttcggtgctaacgctggcccggctgcagctggtatcagttcgacggtgggactggctaacgggcttgcgcttgccggcgctcgctacaacggcggcccggtatcagccggcggcctgtatcagatcggcgagaaagggaagccagagatttaccaggccagcaccggcaagcagtacatgatccctggcgataacgggaaggtcatcagcaataaggatatgcagtcaggaggagggataagcgtgcaggtgaacgtcatcaaccagtctaccggcgccaccgtccagagtgccgacggctacatgcaggacggtagcgcagtagtggatttgctgattaccgacatggaaagaggcggcccggtatcctctcagatgcagcagacatttggactaagccgcaaagcgcaagccacttactaa

SEQ ID NO: 197799 - DNA, 4110 bp, Klebsiella oxytoca
atggcagaagtaccgttaccaacacctaccgacaatccggcgccaagcacggatattcgggacgcagtttatgccggcgccatgctggataaggttgtcaccagtacagagcacaaatatacagatcgcctcggcggtgaacactacaccgttgacggcatcaaggcagaaggggataaagtcgttgaggaaacgcggcagaacctgatccccctcagtcgacagtatatgacgctggccgctgctcaggctgatattgccaacatcccggatggctcaacaacctatgtacgcagccctgatggcggcacactggcggatgagtacattaataacggtggcacgctggcggctacgggcagagctatgccgtcgatgagcgctctgaaaacgggatacattacaggggatgctaaaagcgatgcggaaattgttgccggcctggtcatgtatggtgacgggaccaccgcttcaagcccatcctggaatgcttactaccttagggttcgcacaggtgagactgtctcgtacagcgggactgtggggtcgaatacaccaggcgagcagatggcttatatcatccaactggatgccgataaacagttcgtggcccccctggccacctggacttctacaggaagcgttaccgataatgctacgctgcagggtacggccacgcaggacggctatgtgtatgtaagggtccgggttggcgccgtgtttacccttactcagcgcaaaaagacgctggttcttcagtcagatattggggctgagggcggcgtagccagtcaggatagtgtgtctgctattatcaccaacagacctatgttggatgtgaccaatgcgaacactacctggtacgtgccgggtcgtgtcatttatgcgaacggaacagtaactgacgcagctggagattcctggaaggcggcatatctgcctgtaagggctggtgatactgtagaataccgtggagaagttggatccgccactcccggagaagtgatcgcatacatcgtgcagttggatagtaatcttgcgatcgtcggcaacattgcaacctacacatctacaggcgcggctacaacagggaaagtatcaggtgtcgctacacagaacggatatgcgtatgttcgggtacgggtaacccctacgcctgccgtgatactgaaacagcagtatcgatttgccccagccacgagtcctttctcaccgactaccagcactgaagcggcgtacactaatcgcaagactctggacgtcactaacctcgatactacgggatacgtggtaggaagggtactttatgcggacgggtccaaagtagataatgcaggtgccagttggaaagcagcctacgtcccggttcgggcaggggacgtggtacgatatcaaggtgagatcggctctgcgacttcaggccaagtcattgcttatctgattcaacttgatacagcaaaaaattttgtcgcgccaatttcttcttatacgtcacccggaacgtcccacacgggttctctcgcaggaactgcgacacaagacggattcgtctatgtgcgtgtgagggttactaccccggccgctacaatcaccaaaacgtcgtcgctgtttgtggccgtcgaagaccctctcactctgcggactaaggcttcgcttactgcgaccaacaggacaactactgacgtcacagcagccgacacaagctacacggtaaccgggcgggtgatgtacgcagatggaacggtaaccgacaacgctggcgccagctggcaggccgtatacctgccggtaaaagccggggacctcattacctataaagggcaactgggttctggtacctccggagagtcgatggcctacgttatccaactggatagcgcgctgaagtacgtgggaaatttaggcgtctatacgtcgcccggctcctctagcgacgggactatatctggcaaggcgactcaggacgggtacgtatatgttcgcgttcgtgtgactaccccggctgcgacgattacgaaaaccgcccagttgtatgttttcgccgacgatatcacgggtgcaacagtaaccactgattataccagcaatgcatcagccattgtggacaactcggtaatgtatagcggaggccgtgtagtatcgggttccgcttataatgcttggaggatgtattacatcccggtccgtaaaggcgacattgttctgatgtacgggcaatatggttcagcgactgtaggtgagcagatcgcctatcttatgcaatgtgacatgagccgaggctgggttgcagacctttacacgttctccagtggtggtggttatgtcacagccactagaagggctgcggccacccaggacgggtacatcgctgtccgggtgagaaagactacggacccagtctacagtgttaagaagcagtatcctaacagcctcacacgggtagacgacgtatccgcgatgatctcgcaagcggcgtacaccacacgccccgtggcgaaagtgttcaacgcgaattaccatatggacctgtccgggctacctgaaaagactccgggattcaacagctttagtaatcctttgggatacacgttcgctaagcaatgggcgcgtcgcgatttctataacgcggctgactctttcatgctctcttttatggacttgagcaatgacccgtggaacctgcagagcaacatttacgatatcactccaggtaacgtcttttcctactcgtggaacaaaggtaaggtttctttccaggggcctacagccaacggacgaacctttatgttcgcggatagatatatgccgtttgctacaagtgaaatcgcgatcgatcgtatctcaggtaatgctacagtagggattatgtttgcagaccctactcaggctaatagtgtatctgtgcgcgtctcaaatgcgcaggttatatgtgagatttacgcagatggtgtattactgaattccacgtcatttgcaggctcagatatggcgggtgcagttctccgcgtacagaacaccggagtttccctgataatcaacaaagttaacgcagacgggtcttggaactggatcggtagatatgagcattatgctattttcgatgccagaaaagtggagttccttgatacatggaaaacttacgtattcgcgcagactgacaactttacttcttcagactcagtcacctttaccggcttctctaaccgcatcgccagcgggtccaactcggtctcgattaggttcctgacctatgaagacggtaccttcatccaaagagggaattggctttattttctcgttgagggaacggggaccactatctccgacctgtatacccagatagtccgtatcaacttcaacagcggtgaggtccagatgatcggtgctattttccaagtgcggactgatggaaccgacgagggtatcgtactgggtgatgacagtatcaaggcggtgtatgaccggaacagtcaaagttggaaaggtatctcttgcggtatggactatcaggggaaagggctggccgataacaaccggccaaaactttattttgaaacaaaacaggatttgctgcagggcggcgtgatcattgtcagaaattctgtgcagatgaagaatgccaacggcagcttctttggcgtagggtcgagctacgtggaagatatcgacttttattatcaagcggccagcagtcagtgggtaatgacaggtaacactatatccgccgggtgtaaaactttccgtagcccaactttaaaggacggcatcgtacaggagttcgtgactgctgaggttcccaccggggtacgtgatacgggtaaccagtttgtccattttggagacacgacatatttgaccagtggaggaacatcgaatcgtttacacctgcgtaagtacgaagttggtctgacatacctcggagagttcacgcaggatgtctaccttgcgtcaaatacgacaggaccatggtgtacgttagctccttacacaaacggggatgagacagagctatacctgctctcatttgatagatctgacctttatgagggctttcctggagcctccacatacgaccacggtggtttgtattgctggaaagcaaaaatctaa

SEQ ID NO: 197800 - DNA, 318 bp, Klebsiella oxytoca
atgggattcccgtcaccggctacggattacattgaaacaccgttaacagtgaactcactgtgcaacatcacagcaaactcgcgagttatcggcactgacagcggctttgctgttcttgatttgtctctgaaagctaagcaggggagcacagttctcattcggcacgctggattcatggagtttgcgaaaatattaggcagggcgtttatcacatctgacggagaggccattgaaggggaagcactggatgacgtggaagtgatcggcgtcgtcacgtatacgatccacaatgtgatgcaggatagcagtcctgtgtga

SEQ ID NO: 197801 - DNA, 306 bp, Klebsiella oxytoca
atgtacaccgaccaaacgctagaattcgagaaagtggaaactagcaacggtaccttcagagaagaaatcattctctttctgaagaacaatggattaggtatcgacggcgacattgagcaatttgttgtcgcacgctgtcagcggcagctggttgcctgcgccgggcttgcggggaatacgttaaaatgcattgcggttgccagagaatggcgtggcacagcgttaggcctgaaaatcattcatgaagcggagttgcaggctattcagaacggcgaacatcagctttttcttggctttgttgaataa

SEQ ID NO: 197802 - DNA, 1476 bp, Klebsiella oxytoca
atgtcattgttgcaaatttcgcaaggcacgtttcgtcttagcgataccaaaacgttaaatattgaacacctcagcgtgcgggctggcgagagctgggctttcgtcggcagcaacggtagcgggaagtcggcgcttgcgcgggcgctatccggcgagttgaccctgctaagcgggcagcgcgagtgcaccttctcgcgcatcacccgtctctcttttgagcagctgcaaaagctggtcagtgatgagtggcagcgtaacaacaccgatctgctcaacccaggagaagaagataccgggcgcacgacggcggaaattatccaggatgagtttaaagaccccttccgttgcgctcgccttgctgaacagtttgcgattagccacctgctcgagcgccgctttaaatacctctctaccggtgaaacgcgcaagaccttgctgtgccaggcgctgatgggcgatcccgacctgcttatcctcgatgagccgttcgacggcctcgatgtcgcctcgcgccagcagctcgccgagatgttggccacgctgaacgaagaaggtatcgcccttgttctggtgctcaatcgtttcgacgagatcccggcgttcgtgcagtatgccggggtactggcggactgcgtgctgagcgaaaccggcgaaaagcagaccctgctacagcaggcgctgattgcccagctcgcgcatagcgaaaagcttgacggcatgacgctgccggaacccgacgccccggctgcgcgccttgcgctggacagcaaagcgccgctcatcgtgctgaacgacggtctggtttcatacaacgaccgcccgatcatcaatcgcctcagttggacggtcaatcccggcgaacactggcagatcgtcggccccaacggcgccggtaaatcgacgctgctcagcctgatcgccggcgaccatccccagggatacagtaacgatctgaccctgttcggccgccgccgcggcagcggtgaaaccatctgggatatcaaaaaacatattggttacgtcagcagcagcctgcaccttgaataccgcgtcagcaccaacgtgcgtaacgtgattctctcgggctacttcgactcgattggcatctaccaggccgtttccgataagcagcacaagctggtgcaaaactggctggatattctgggtatcgacaaacgcaccgccgacgcgccgttccacagcctctcctgggggcagcagaggctggcgctgatcgtccgcgccctggtcaaacacccgaccctgctgattctcgatgaaccgctgcaggggctcgacccgctcaaccgtcagctggtgcgtcgctttgtcgatgtgctgattagcgaaggggcgacgcagttgctgtttgtctcccaccacgccgaagacgccccggactgcattacccaccgtctggcctttgtgaggagtggagacggttacacttaccagcagggtccgctgcaaatttaa

SEQ ID NO: 197803 - DNA, 264 bp, Klebsiella oxytoca
atgaaaggtaaacatcaagacactaaagccctgtctgacgtgctagcagaaatgcaacggcaggatgccaaatggggggcagaccgtaatcaagatccttttatctggggagcgattctcggggaagaggtgggagaatttcatcaagccgtcctccatgatcgttttggtggtaaagcagctggtaccagcagggaggaagcggtgcaaattgctgccgtcgcactgcaaatcatcgaatattatgatcgcgtaagcaattga

SEQ ID NO: 197804 - DNA, 1083 bp, Klebsiella oxytoca
atgatggttacgcaggacttccagcctgactgggtatctccacccggtgatacgattatagatctaatggatgaacatgggctctctggtgaagaactgagtaagaggattggattgtctcttatccggggtcagcaacttcttgaaggaaaaatccgacttaatgagtctctggcttctaagcttgaggagctattcagcgtatcgacagacttctggatcaagcgcgaagacgcttatcgccagcaaattgaatacctcgagaaagtgaacagtgattggctcgaatcattgcctgtacgtgatatgatggagtttggttggatccccaaaactacaactcgggaaagtaaatttaggcactgtctgtcatttttcggaataaattccgtgaatgattttttttataaaattcagtcagatgcacctttggtcgcttttcgtaaatctcttaatctggcaaccgaacctgtggccgatttggtatggctgactagggcggcgcaaattacctcaaaccaaaactgtgcagtatgggataaagaggtgctactagcattgttgccagagctgcgcaaagctacaaatgaacctgacatggggatttttatcccttacattcgcgaccttctcgccactgctggagtttctctcgttgtgttgccaacgccaaggggatgtcgggcaagtggcgctacctgcttttttacaccagatcgcgctaccctagtcatgagtttccgttatctgaccgatgaccatttttggtttacgctgtttcatgagattgggcatcttatcttgcatgaagctgtccgagttcgcgtagaaggtaaagatgggctttcgtcggaagaggaaaaggaagctgataaatttgccgttgatgttcttatcccagaagaataccggcagcagcttggtcgctatggtgtccggcactggaaagagatcatccgattagctaggaaaatgggggtatccaaagggatcgtgctgggatatttgcagcacgaaggtaatatacccttttctcaccttaatcggtttaaagtgagattccgtaaagaagatatcgtctga

SEQ ID NO: 197805 - DNA, 945 bp, Klebsiella oxytoca
atgaaaagacacaatcaaattagtcagttggttgttagtttgcaaaattttagtcgcaatgaacacaacctaaatggcctaagttctcccgcctgctttgatgttttagcctgtcagataatcgacagtatacgtcgtatacgctatgtggaaactcttgcattacggactgattatatgactccgttacgaaaagagccgaattctgatatttttgatcctctccgtgctgcctgccttcatcttcgtgacaacaattacgacgaagcctgctggctggttttccttgccacacatttcggcaagagtaacaaaaccggctggattttgtgtcgagatatatacagtggactcggtacacaaacgtggacatgggatacgataactgatgactttgctgcttttgaacaatggttcgccagcgtctctgatgagctgacagcaaacagcagcctaagacagtatggtaatcaccggaaatatgaaacgaagaaatatcactctcgtcgttcaatacctgcggtttttcgctcttatatcggatttattggcgccacacacagtcatgaggctaggtttgcagaggccaagagcttttcatcttcacccgaatctttattcgaactattgtattcagggctaaatgctgtgatctcatttggacgaaccgcaaaatttgattacctaactatgctcaagaaaactggacttctggatgcagagccgggtcatgcctttctgaatggagcaacaggtccccttcaaggaagccggctacttttcagcaatagccggactgctggtgacacaatagacgtattgaatgaaaaactggctgaccttgcggcaattattcctgcaccctacttgagaatgcaggtcattgaagatgcgttgtgcaactggcagaaatcacctgaccgttatgtctatttcggcggctga

SEQ ID NO: 197806 - DNA, 981 bp, Klebsiella oxytoca
atgacccttttggtaacggctgagtgtgtcgacgatctgataaacgatgttcatcaagctatcctggcagatggactcagtaacgatcctacaaaaggatcaactctagagattcttggtgcctatcttgtccttaccgaccctcgccgaagaataagtagaacagaatcccgaggaaaactaattagttgcttaggtgaattactgtggtacctctcagctcagaacgatctcgagtttatcaaacacttcataccacgttacgctgaatccgctgagtcagacggaaaaatacatggtggttatggcccgcgattgtttaatatgcgcggtttatataatcaactgaaaaatgtcatcaaccttttgcaggagaaaaaacctaccagacgtgcagtaatacagcttttcgatgcttcagacttggtgccctcaaaaactgaacagcaagaatacgtagatattccttgtacaatatctatgcagtttattgtcagacgtgaggaactgcatctatttgtttgtatgcgctctaacgatgcctttatggggctgccccatgatgtatttgctttcacgatgctacaggaattagtcgcccgcttgataggatgcgaattgggccactatcatcacttcgtatccagtctacatctctataaaaatgatttagaaaaagtggaggcacttcagaaagaggggttcatgagcactctaccagtcatgggatcgatgcctgaaatgcattccttagatgatatcttacccctgcttgaggcagaaaaagctcttcgagagaataaggagtttgatattgacactacttccttgaatgactactggaaggatttactgcgtattttaaaaatccactttttgttacgttcacgtacatctaaccacaaagaactagccttccaagagttggctgcaatgaaaaatcaggaatatcgatttatttttgatggaaaattacaatga

SEQ ID NO: 197807 - DNA, 1173 bp, Klebsiella oxytoca
gtgagctggcgttatttaaaaattgcggatttttgtagcaccggtagcggtggaacacccagtaagtcaaagcctgagtattatgaagggggagatatcccctggattaaatcaggagatcttaaagattcaacaatttatgacgcaaatgagtacattacagccgcagggctagaaaatagcagtgctaaaatagttgagaaagactcaatcttaatagcaatgtatggagctactgttggccgcttggcgattttaggcattaatgcagcgactaatcaagctatctgtaatatcaggcctgatacaacaattgctgatatgaagtatctctattacttcttgaggagtaaatttagctattttgtcgaaaatgcggttggtggagctcaacctaatattagccaaggattgattaagtcattggaagttcctctaccttccttaattgagcaaaagcgtatcgcagatattcttgataaagccgctgatatacgtcaaaaacgtgagcaagctgtcaaactcgctgatgattttttgcgtgccacgtttttggagatgtttggtgatcctgttgcaaacccgaagagatgggatgtggcttctttgttagaatatggttcatttaaaaatggaatgaattttacgaaaggtgagtcaggctcggtactgaagtgcctgggagttggcaatttcaaatcactagcaacgattacctgtatggacaatatcgatgaaattgaattaaatactctcccttcagatgattatcttttgaaagatggtgatatcgtctttgtccgctctaatggtaataaagccttggtcggaagatgtcttactatttatccaaataaagagaaagtcacatttagtggattttgcattcgatacagaatagaaaaatctgcaataacggcagagtatcttaactttctcttccgtacaccttcaatgaaacggcaaatgttaagcgggggccagggagctaatattcagaatattagccagggtaccttatctgcactcaggatacctgtacctcctttagaaaaacaacagacattttctaaaatcgttagttttcactctgaactaatgaaaaaacttaatataaatatagttgaaacaaatgatatgtttgattcaattagccaaacatatttcaaataa

SEQ ID NO: 197808 - DNA, 1725 bp, Klebsiella oxytoca
atgactacccgtatagaaaaattaaaagcatgtaactccaaaccagatttcgcacgacttttaggaattgacccggtttttatgacccgtgtcatatatatacgaaatactgacaatctatattcacagttcgctattaaaaaaaagaatggttctgatagagtcatatcagccccagactctgagctcaaagaaatacaaagcaagctttccgatttactacaagactgtttaaataacctccgagaaaatttaaaagaaaataatcatttctctcatggatttgaacgcaaccgcagcattattacaaatgcagaaaagcataagtcaaagaagtgggttcttaatatagatctttgtaatttctttgatgaatttaattttggaagggttaggggttactttctaaaaaacaataatttttctctcaacacagagctttccacattaatcgccaaaatcgcatgtcatcaggataagttaccacaaggtagcccctgctcccccgtaataacaaacttaatcctagtttctttagacaggcggctaagtaatttatgtaatagcgttggctgtacatatacacgatatgctgatgatataacaatctcaactaataaaaaagagtttcctaaggggattatcaaaggccaagatgagaaatccatcaccttaaataacaaattccttaaggaaataacatcttcaggcttcaaaatcaatcataacaaattaaggcttctcgacaaaaaaagccgccaagaggttacagggttaactgttaatcggtttgtaaatgtagataggaaatatgcaaaaacagttcgtgcaatggcacatagtctatttaaaaaaggggagtacacattaatagataaaaaaacacgcaaagaaagatttggcactatcaatgagttaggtggcatgctgagcttcattgattttgtagataaatacaacaacagattaccgcacgcgatcaaatcctcacataacaagcgtgaaagattatattctgattttctttattattctgctttttgggcaaatacaaagccaacaatcttgactgaggggaaaactgacattacgtacttgagggtagctttggatgcgttgtcagaaaaccatcccaatctaattgggaataaaaaaatgggcaataaaacagtacgagattatagggttaaattcttcaaaaacacatccaaaacaaaatatcttttaaacttagatggaggagctccacatctcaaagacttcattattggctttaaaaaaaagacagatgcgtttaaagtaatcgccaatcaaaagcctgtgattgttattttagacaatgattcaggcagcgctggtgctaatggaatcttccaaactttaattggaaaatctttccctaacattactcttacaagagatgaactaagaaatcagaagtggacgtgggttacaaaaaacttatatataattttcacccctcttaatggtttaaaagatagttctatggaagaccttttccacagttcagtattacaaacaacgcttggtggtaaagtatttaaccgaactaatgccaaatgcaaagaaaatgaatacggcaaagaattttttgctacaggtgttgtgttaaaaaaacgtaaaacaatcgacttttcaaattttaattgcatttttgattcggtttcagaaataattgaacataataattctaggggggaatag

SEQ ID NO: 197809 - DNA, 2400 bp, Klebsiella oxytoca
atggaaaggtttcttcttaactcggcattgctgttggatcggctgagcaccgtctcgttaaatgaggtatcacttgatgatagggtggagtcatccgtgttccttactcaatacgaacaaatgcgtagtttgcctgatcatgtagccaagtcggcttggtcatccctggaacagcgactcaaacagcgaaatatgaaacttggtccagtagcggccttgcgcctaatcgctgaaaaatttgttaaaaacgagaaagacggccctagaaccgatcttgctttgttctcggaatggcaaacgctgatgagccgagtgtcgtgcctgccaattatggcgtgtcatcaggtctttaactctgggcctgccagccaggaatatagttttcgctggcctttatacccatatcacccgacggttgaggactacattacccgtgaacgcctacacgaaactcaccaacatctgaatggcagtaccagtgcggaagagtgttggctggatgcactcaagcacccagaagttagcatcagagattttgataagggctgggcatctcaagagatgaaacaactctgcgcccagattgacccctctctgacgcctgaaatcttcaaggatcgtttgcaaatcgctagcaatattcgcgaaattctttgtcgggtcgctcagggcgttgagttaccagagtggatagcatcaatgcagaatccgcagcagttagcggatagcacaattctgcattatgaccaggagtatgggtttgcgacggtttggccaactgacgacaaatacagtcaggagtctgaattttgctggctaaccgcgttgttggaaaaatggcggtatggtgcgcccgaaggattggaacgactgctttggatttaccttctgattcaaaatcagtacctgaccttactggttcagcgagacgattttttcggttttgatcagttccagaaatacaccatgacagagctgagagaagaaaccgagaaatcttatttgtctcgtttcaaacatgcgcatggtgccggtgtgtattctcaggtgcgttatctggaaggacgttttgctccgaagagcgaccccagcaaaatgcaaaaattgatcttcagtgtgttaagagggtattgggaatacctgagtgctcatatgcctcttgaatgggtgcatgataagccgctgactgtgtcgcaagtactcgataatctcgaacgggttgaaactaatggcaagtgtgcagagctggcgctagtgccgcactttatcaaaagaaagcccaaaaagggagaggtttatccttatgcattactattcaaggacctgaagaatcaggcctctatcttgatggatatgctgaagcatgagccgcgcttaatacgctggattcgaggagtggatgctgctgctaatgagatgcatgctccaccagagttgtttggacctttgttcagagtgctggctaaatcgggtgttgctcattttacctatcatgttggcgaggactttccgcatctgatcagtggtattcgatcaattgatgatgctttgaggtttttgccgttgcggaatggcgaccgtcttggtcactgcacggcgattggcatcacacctggcatctggaaacgctctttgccattgtctttgtccatgaccaaagaaacgcgactgctcgatttgatatttatctggcgggaacttcgaagtcatccggaactgctgcgttacgctagtgatgcagcgattgaagcggttcatttggcccatgaggtattttcgctggaagaagaaatctcgattaccacccttgatcaggtgtttgagttgcgggggatgttggctgaatcggaaggcctactgggtgaactggatgggccattaaaacccagatccctatggttggaagagtacgagcgcgccagagagttggctaaaacggcaggtatgaaaaggccgctgaagttgtataagcaatggcttacatctgacaatgcgcaaaagcagcgtgctgaatatgttgaagttgccctagaatatttgccggatgaagcagttattgcattacaacaagctgtaatggcaaaaatagcagaccgaaacattgcgatagaatgccctccgaccagcaatactcgcattagtcagtatcgagatgtcagcgaacatcatatctttcgctggataggcttgccgggtgaggcggttgaaggtgacgtccctatgtctatttgtttgggatctgatgatccggggatctttgcagcggatttgaaatccgagttctatcatttgttcgttgtgttaacccgaaagtttggtttgtcgccagcggaggctttgagaaaggtggcagaggtgaacgagaatggacggatttatcgctttcatgatgtcagctag

SEQ ID NO: 197810 - DNA, 2853 bp, Klebsiella oxytoca
atgacagacagcgtacagactgaaacgaccgagggaaaaatcatcatcaacttgtttgcgcccaatcttccgggcagtaccaaagaagatgatctcattcagaaatctctgcgtgatcagttggtcgagagtattcggaactcggttacctcccctgactccgataagtctgctgggctaacacggtttattgatgagtccggtcgtaatgtattttttgtggatggtactcgcggtgcgggtaaaaccacttttatcaatagcgtggtcaaatctctgaacagtgacaaaggtgatgtcaatgtcagcatcaagtgtttgccgaccatcgatcctaccaagttgccgcgtcacgaacccattttggtcactgtgactgcccgtctgaataaaatggtgtccgacaagttaaaaggatgctggtcgtcgaatgaccataaaaaacaaaaagaacaatggcagaatcacctcgcgcagctccagcgtggtttacatctgctcacagacaaggaatataagccggaatatttcagtgatgctttgaagctggatgcccagcttgattactctattggtggccaggatttgtcagaaatctttgagaagctggttgaacgtgcatgtgaaattctcggctgcaaggccattttgatctcgtttgatgatattgatactcagtttgaagcggggtgggatgtacttgaatctattcgtaaattctttaatagccagaaattgttggtggtggcgacaggtgacttgcggctatattcgcaattgattcgcggtaagcaatacgaaaattacagcaaaactttgctcgatcaggaaaaagagagcgcccgcttagccgagcggggctatatggttgaacaccttgaacagcaatatttattaaaactttttccggtacaaaagcgtattcaactgaaaactatgttgcaactggtcggcgaaaagggaaaaggcggtaaagagaatatcaaggttaaaactaagcttgacatgcaggatattgctgccatagatgtccggcaagcgattggcgatgctgttagggaaggccttaatttgagagagggctctgatgcagacatgtatgtgaatgaattgctgaagcagccagtgcggttgttgatgcaggtgcttcaggatttctacactaaaaaatatcatgctacatcggtaaaacatgatggtaaacaaggcagcaatgaaagatctgatgagttatcagttccgaatttacttagaaatgccttatatggttcgatgctaagcagcatttatagagctgggttaaattatgaacaacatcgatttggtatggattcgctctgtaaggatatatttacctatgtaaagcaggatcgtgattttaacaccggattttatttgcggcctcagtctgaaagtgaagcattaagaaattgctctatttacttagcctctcaggtaagtgaaaactgtcagggtagtctgtctaaatttttacagatgcttttagttggttgtggttccatcagcatattcaatcaatttgtgaccgagttagcgcaggctgaaaatgatagagaaaaattcgaccagattgttagtgaatatgtagcttatatgtctgttggtagaattgaaagcgcctcacattgggctaatcgatgttgtgcggtggttgcaaacaaccctaatgatgaaaaggttggcgtttttcttggcatggtgcagttaaatcgtaaatcacgccaaaagatgcccgagggttacaaaaaatttaacattgatactgagaatggtttggcaaaagccgcaatggcggcttccttgagtacggtagcttcaaataaccttatggatttcagtagtgtttttaatctgattggtgccattgcagatatctctgcatgtcgtcgtgaaagacctgccattactaatgcttttaataaagttgtagctcagacaacatgtattgttcccccatggagcgaggctgctgctcgtgcagaaatgaaaggctcaagtaaaagggcggataaagatgctgctgttttggatgttgaccttgatcccatggatgatgacgcaactgatgacagtcaacaggatgacaatcagcaggatggcatatcggaattttctgatgccattacaaaagttgagcaatggcttaataaagtaaatgaaattgagaatgaaattcgtccgtcggcacttttgattggtaaagtatggactcggttctatttcaaccttaataatgtggctgatcagcataaaaccaggctctataaagatgcagagcatggactaatggccagtcaatcaaatgctgcgaaaattatgcgttttaatgttttggcttttcttcatgcggtattggttgaagagagtttttatcattcagttagtaatgggaaatatatcggtgaagggttaagactaaatccagtcacttcggttgatgagtttgagaaaaagataaatgtaatgaatggaaaattgaaagtggataagaaaaaatggaaagatacccatccattgtttttcttattaatcagttgtccaattctacatccgttcatttttcctgtagggggggttaattgttcagccaaagcactgagcaaggaagtaagtttccttaaactgattggtgagattgttggcgataaattactttccaaagaagaatgggattatttatctgaaaatgataatcgaaaaagaaacattaaacagctggcgtctcaaaacactataacatcgctgaattcttccacaatcgttggagcatcatacgataaagctacaccagccaggaaaactaagttgccttcaataaatgacaacgtataa

SEQ ID NO: 197811 - DNA, 330 bp, Klebsiella oxytoca
atgaaaactctacctgctacaatttcgcgggcggcgaagccctgtctgtctccagtggctgtctggcaaatgttactgacacgcctgcttgaacagcactatagcctagcactgaacgacacgccgttcagtaatgaatctgttattaaggaacatattgatgccgggatcaccctggccgacgccattaattttctggtagaaaaatacgaacttgtccgtatcgaccggaaggggttttcgtggcaacaacagactccgtatatttccgcagtggatgttctgcgagcaaggcgctcttccggattactaaaagccaacgtgaaataa

SEQ ID NO: 197812 - DNA, 318 bp, Klebsiella oxytoca
atgagcaacatcacctggagcctgcagcgggatatcacgccgtgcctgggagcacgtctggtgcaggagggcaaccggctgtactatctggctgaccgagcaagtatcaccggtaaattcagcggagcaggatgtcttaagctggatgtggcatttccgcattttatcagtcagatggaatcgatgctgaccactggtgaaatgaaccctcaccatgcccactgtgtcaccctgtaccacaacggttttacctgcgaagccgatactcttggtagttgcggctacgtatatatcgctgtttatcccactcaacgctaa

SEQ ID NO: 197813 - DNA, 864 bp, Klebsiella oxytoca
atggaacaatttgacggtttacagtcactgcagcaatcgctttccggcctgccacaatgggcatcagagcgtattctgcagcagataaaccagcttattcactatgagccggtgataggcattatgggcaaaacaggggcgggaaagtcttcgttgtgcaatgccctgtttgccagtgagatttcaactgtcagcgatgtggctgcctgcactcgcgaaccactgcgctttcgactgcaggtgggggaacgcgtgatgagcatcgtggatctgcctggtgtcggggaaagtcagacccgtgatgcagagtatgccgcattgtaccggcaacaacttccccggctagacctagtgctgtggttgattaaggccgatgaccgggcgctggcggtggatgagcatttttaccgtcaggtgattggcgagcagtactggcataaggtgctatttgtcatcagtcaggccgacaagattgagcctgccagtggcagcgagatattgtctaccgagcagaaacacaatatcagccgcaaaatctgcctgttacatgaactgttccagccggtaaacccggtttgtgcagtatcagtacgtctgcaatggggacttcgggtaatggctgaaaggatgatccgttgcctgccacgcgaggccagcagtccggtggcggtacagcttagtgctccgcttcgtaccgatgccgttaataaaaaagcccgtgacgattttggtgaaacggtcggctcggtactggacaccgtaagttccatgcccctgataccggccccggttcggacagtcatccagtctgtacgcgacatcgtggtatcagtcgctcgtgcagtctggaatttcttcttctga

SEQ ID NO: 197814 - DNA, 222 bp, Klebsiella oxytoca
atgagatatgttcaggagaatgatatatatctgaatatttttagaatgctgataggccggtctgtgctaggagcggacgttgctaacatgaatgtcttaatcagtaggaagcaggtcaaaccattgttgagtggttttaaagctaaacatagaggggatattgacatcatgcatatgcaacctcttatggaatgtttatcgaaaatgagcgaccaagaataa

SEQ ID NO: 197815 - DNA, 684 bp, Klebsiella oxytoca
atgattgaatggcttaatgcacattttggtgcagacgcagctacctatcttagtttattagtcggcgtactggcactgtttggtattgggggcggtgttacatatagaatcagacagcaaaacaacatcaaacagaaggcaaagaaaaccgagggtgatgtgaaccaggccgggcgggatattaatcagaccaccaacgtttaccacacatccaatgaatctgctgaggcccctgtaaaaaaaaagcaagatgaacatgatctgaagatcatcgaccagattcttgaattgctaccttatgaggatactactcaatgggttgagcagagctacctgagcggtatacggcaagatgtttgcttaaacattgaaaaagctgaaaaatttagcggtgaaaagtatcggttattcaacactgaagtgaatagtgcgaaggacgcttttttggacgctatgatcgcatacgtagatagtacgctaccgtttatgagtgttgattacccgaacagaaagccagtgatgctaagccttccccatgactggaagagtaagagtgttgaatcggaggcaaacttccgctttcatcagcataatgtgcgtgaaacatcgggggtgatgattgcgcgttatgaggattttgtcaggacatttaaggctcatggattcataagcgataaactgtaa

SEQ ID NO: 197816 - DNA, 447 bp, Klebsiella oxytoca
atgtatgaagattattcacatcaatcagtcccctcaaaaaaatacagagagttaattggaactgctgtttgcgtttttaattccaataatgaattcattatcgagaacattctgcgcattgataatgataaaacctataactggtttgaattaacagacagaacatctggccgcctttcaaagccaattaaagaaaccattacgaaagcctcgagtgatagcattgccaacctcttcgaagaacttgtcgaaatccggaacagaataatacatagtttcagcataaccgcaactgaagctatgccatcggacaatgatgaccaaattttagcaaccaaacataaaaacagcggagcacaagaaataatcaccgaagaatatattatgaattttatacgcaagaatgacgagctttcttctaagctgcatagtttcagaggttactga

SEQ ID NO: 197817 - DNA, 240 bp, Klebsiella oxytoca
atggaatcgggtggaagtcgtcgtttaaatggtttcattgagcgagaattgctggttacacttgctgggtacttttataaaaaattcaatctaacggaaggaattggtaagaaatcaattattcatgtgcatatggcatccttagggtatgcctatatggatggtgaggatatattttttgattcgttgacttttagaactgtaatggtcaacaaaaactggcctgacttcaatccgtga

SEQ ID NO: 197818 - DNA, 2181 bp, Klebsiella oxytoca
atgagcatactctctctgcgcggagtgcgcagttattcccacgatgaaacggttcagattgatatcagcaactatgtcaccctgatttacggccagaacggagctggtaaatcaacgatatccgggtatttttacccacagaatggcgatgagtacggacagtgcagccttcatcctcctctggatatgcgatatctcgtattcaacaatcagtttgtagaagatctgtttaacagccaagctgttcagcccggtatttttacgctcagcgaagaaaataccaccattgctggtgaaatcctgcaactggaagcatatgccaacgctcagcgtgatttacagcaggctaatagcgcttctctgcagaaaaatgacgctgaccagcgaaaagttcgcggcgattgtgccaatcaaatttttagcagctctgcagagatacgttcatctgctgctggcgacctaatggtcggtgccaagcgcaccgacactctgtaccaaaaaatcatgtcatcacctgacgctgctgttacgagcacggagttgctgtgtgaagaactgaagcgtctggaagacagtaagggcaaccttattgcatctgtcgatgattttccttacttcgttttcactgaagaggagcttaccctcctgaaggaacctttggtcccggcgggtgacagtgttttggctgccgccgtaaggcgcctcagcaatagtgactggatagcacgtggagccgtgtggtttgacggcgacatttgtccattttgccaatcccctgtagacggggaacatctccgacaggaaatcaccgcgttatttgaccgctcatgggaaacggcaatgagcgcgcttcgacagcttgaaaagaggcactctgaatggaaaagctactttgagcaatttagagagacggtgaacacctgcccattagtaaacgctgactccccggtgcttgcccggttatatgaacttgagcaaaaagggctaataaatcagaatgcggtttcacaaaaaattgcagaaccttcggtatgtattcacccgcagctgactcttgatgaatcacaaagtcttcagcaggcgattgcggcactgaacatggaaatcagtgaaaacaatcgactcgcaaaaaattatgcgacagagcggacatccctaacagatcgtgtttatgctcacattcgccacctgtcttcagatgccattgaggaacagcgcacagaactgaaagcactgcaggattacaggcaaactcttgaagttaaatcagttgaactcagagaaaatatcgctacagctgaaaaagaaatcgccgctaaatactccagcacagtcaacatcaacagcaccatacagaacattaataacgcactgacttcgatgggtattgatagcttccatatcgtaccgtgcgaagagggcgttgagtcataccggctcagcagagccggagaaagcaccgatcgcccggtgttccagactctgagcgaaggtgaaaaaacgctgattgctttcctgtattttatcgaaacatgtaagggcagaaacagccgcacacagtccgataaccggccaagccttatcgtaattgatgacccaatctccagtctgtctcagaattatatatttgaagtggctgcgctcatccagcatgaaattattaaatctgatcgcgccgctaaggtggtgctgcttacacacagtttgttcttcttccaggaacttcttctctcaagcggaagcaggccggcaggaaaaaaaccagcagactggcaactatatcgcattgctaaaaaccggcacagcaccgtcagtgttatatcggataaagaattacttaatgactatcaggcactgtggtatgtgttgcgcaaggccagcaacgatgtgtcttccggcgtaattattccaaatgttatgcgccagatccttgaacattattttagtttttcagggaaaaatgagcgtctctacaaggctcttgatacgctggcagctgaaaatcgcgatcccagatttaacgccttctatcgttttatcaatcgccattcgcacgcagacagccgtaatattcgccttcaggaagaggcatctgcagacatgtatattgatatgtttaaacgagtgtttgtaatgacagaggatcttgaacactacgatatgatgatgactgaaacctga

SEQ ID NO: 197819 - DNA, 960 bp, Klebsiella oxytoca
atgcatacatgtccacctccgaagaaggcgatcaatagttggttgaaagaatatccctcggtggagggcaactatggccatctgctccttgagcaaaaagaagatctggcaccagatctggccagtgcacttattccctattttgagtcagcacatctggacgcccgtgattatttctgcgagcagatcggaattgaccttcatccagatgcagaaaaggacgatgaagatgaggttgaactactctatcctcaatgtctgccaatgagtgctcgccggggcctctttggtgaagtaatggcagggatgcttaccgagcactatacctacgttggtaaccacaaatgggatataccaatttttctctttcgttaccatgccgatgtcgaaaagtatttgttcgatcttgcccgagacacatcccgtacgcgacaggtttttggacggtttggttcagactttctcggtctatgtctggatagtaacggaaatgtagttcgatttattgcgggtgaggcaaaatggcgcgacgccttgaacaaggcgacgatcgataatttaatgcttggaaaatgggtcacgaacaaaaagactgatgaacgcacccgctcaggcaaaggtatatggttcgaagtaaatcgcgatacgactgttcctcacggtatgagacaacttcaacgtttgctccaagagtgcgatcccgatggtttcagtgcagctatcttgtctatcgatagagcgctagtgatacgaaatcccaaaccattgcctcgtacaaatcttatcctgatcgttggtaacgacgtaccaagccgtggcgaacgttgttccctcatcccatggaaaaagcaaccggaggagtacactgctcctcatgacctacaggttgtcgaattaatccttgctaatggcggggatttgatcgaccaaatctatgattcgctatggtccgaggattga

SEQ ID NO: 197820 - DNA, 3627 bp, Klebsiella oxytoca
atggctgataatgatcgagaacgactacaaatagcacgtcaggtacgaaatacccttgctgttgaaaataccttgtctgcaatacaggcgcgtgcatttgtcaggtgtttgcaaacaatctgggaggtgccgcttatccattggaacgagcaggagtccgaagaacagtttgctgatgcccggcgtttgcttcatgcagcggagatttatcgccaaattgagggaaagtattcgctcggtgcgattgactgctaccggcgtgctggtgagcttcttgagtggttatcgcgcgcagaggacaagcttcgactaatcgcgccgattgaattgtttgccgcggcagcgctccagcttggtggattgcctgcgatggctacaggcctacttcggcaagttgatttgggtaaccctggttcacaactctatgccagttttttgcaggcagattttgatggagtagtgcaagtcgtgatggagttctggggcaaacatccagagctcactggtcgagatgcaccgcgtaagctgctcttggattcagaggacgaaggccgaatagcttggtacttcaccaccgaacttgtccgttgcatcggactgttcgcggaatcaatgcgacggggggacagtgttcggctcgcgcgcgcgatcgaaaagctcaatgcattggaaaaaataaccacacggacgtttagtgaagatgcctcgttactcattacactcctgtgtgcagttgctgataattatcgagaggcaagcatctatcttcctgtgaagcgtctggcggacacgaaagctgaccgaactacgagattgctgcgttttgctcgagatcaattcagtcgtggtcgtggagttctttggccttcccagcgtgatgggctgaaaaggctactgcgtagctcatccttcgcgctttgcacacctactggttcggggaaaacattagtcgcaaatctagctttggtgaaagagctacttcttcaccctgacgagaatataaccgatccgatggctctatatttggtcccatctagagcgcttgcgggggaagtagaaactaaattgcgaagtgaattaggtgaagatctgatcatcacaggtctttatgggggggcggattgggggattacagactattggctcaacgctgacatgccgaccgttctaatcgccacagttgagaaggctgaagcgttgatgcgttacgtggggcctcttattttggctcgtcttcgcttgcttgtattggatgaggcgcatcaagttgtaccggaggacaacgacaggacgcgtgaggcatttgcggatcatagtagtcgctctctccggcttgagggattcgtctcgcggttgctttcgctggctccggatattgcccgaatcgcacttacggcagtcgcaggtggcggtgctacgcctgtagcacgatggactgaagggaggtctgacgcggtggcagttggaacacagtatcagagcacgcgtcaactgataggtattctcgaaactgcgccagagcagtcaggccgtatcctattggagataatgaatggacaagcactcgatgtgagagatcgagatgccccagtttatctgccattacgtactcccccaatagcaccgcttcccgcaacaatgcgaaatagtctgtatcggttcaatgaattaagcgtattgtggacagctttacatcttgttgacgacgagagacgaatactgatatctgtggcacaagaacctgagaaaacgatgcgttggtttaaagaggctttagagcttcctacatgggcctcactaccaccttttattgtgcctgctgggagacgtcgtgagcggtttaacgaggctcgagctgtaaccgtcgactattgcggtccaaattcctatgaagttgcgttattggatcgagggatcgcaactagtcacggtcagatgcctcaacggcttcgccgacttatgactgagatgatcgaccaacgcatctgcccaatcacggtagcaactgcaacattgacagaaggtgtcaatttgccatttgatattattttcttgacgtccctgaagcggcgttcgtttgattccacaacccgacgaccaattattacaccactttctacggctgagttccgaaacttagcggggcgggcgggacgtcctggtgcaagtaagggaatggaaggtatgaccttggttgctataccacgaagtgtctctgccacggcccgtactatgcgggtaacccaacaaaagcaacgtagagaactcattgccgactatcgcttgttgcgtgggcgtttattagatgacgcgagggatgctcaggttgtctccagtccacttgccctattgattgatacgattgctgcacgcgctgcggaactgtttggaatagaaggtgaagatttcttggaatggcttgactttgcgagcccaggtgaaataagcgatatggctgggagagccgaaacaattcctattgctcgccttgccgatagtctggacgaacttgatggagttttgctaagcgcgatagaagaattaaaccaaggacaggctcaggaattgactgctatccaggctgaagtgcaccttgttcagttgtggcaaaaaacgtttacaaatgttgtcgcagcgcaagaagaatggcttgcaaagacttttgtgaggcgtgggcgggcacttatcgacaatatctacccagacagtgatgaacggaaaagactttacctctacggttttacgccttatgtcggccgccgcttcgatgcagtggcgcagaaaatatacgagttgattgtgcaggcaattaactatggtagtgccaccgatgctgagcgtttggcactcttcgagaacattggtgaactggttgctaatgatcggggatttggcttccgtattcgcaacacggcaactgaccagcgtcttctagacgattggccaagcctcttatcatggtggatgaaaggaaccgttgcagattttccagctcctagcgacctacgggcgtggcaacgattcgttaccgataatcttgagtttcgattgggcgtggctattggagccgtagttgctagagcttggactaacggggaaggggatccgctggctgtaccaacgttagagaagtggcgtgctacaacgggattgccgtggttcggtttctgggcacgagaattattacgctggggtacacttgacccatttgttgcatttgttctggcacagggactggcaaaaacgcgaaatgaagcgatagaactccgtgcagaatttgagaaatggcttaacgaggggtatgaaaaccttgaagatgaagacatgattgatcctcaattattcctcaaatggcaacgcagccagcaacacaacagggtaaagcaagccgaaagtggagtggaaaacgcggagctgacaggtacggacgggaaattgaaacgctacgccgtcgtccctgttctacagggcaacactattcattggatagatgcagcaggttatgaactcgcaaaatcgcgtgatgaagaaggggtatactctccagatgcgaatcgtaacgatttcgagcttcgactgcagcaccatatagcgacagtggagcgtacttttaaagtccgaagttaa

SEQ ID NO: 197821 - DNA, 1827 bp, Klebsiella oxytoca
gtggggactcatgcttttgctgatatgatgtatcgtctttatcagttctttggcctgtttgataaggatgacgaacggcgtgaagtgcgtggaaacagcagttattcctttcatcagtccttttttgatcaaggctataatgatgtaataagaataattgacagcaatgaagtcttcagcctcgaagaaaggcgcgaagttttttacaaatacgagcaactatataacgcgctaatccatattccggtcttttctcatctggacagtcgccaaatcacaaagcgataccttcagtttgcattgcctcccatagtagcattagacgtttacaattctcttccccccgatgatgaaatgcatttctattaccatattcatcgttttttaatcagtaaacactgcccacacgaaagcgctgataaaagaaagatttatgtcggcgtgaaaaactatttgcgggaatacattcactcatttgattttccgtacaaaggccatctagatcccctttttaacttcgttagctgtatcaaagcaggaagtgggcagcgggaatatacaataaaaggaataataaaaaaatgccgttcagaatacgatgaaagcaacatttttcaaaaagacataacacgccactcgcagaatttagataagattgagcgggcttatctgtcacttaatgtgttactcgcattcgaacgcaagacctctgtcatcaccgcggtatccatgcattaccgacacaccgtaaacaatggcattaattacaacaatagttatggcattttatgtcgatatatctactctaaggggtatgacgaaaaattattacattacattactcttccattttataatatggctgtccggcccgtttcggtaactatagaggaaaaaccgtatcgttatgtacacgaattaaaatggcttatttttaacactaggaataacaccaaatactctaaatgggatttagctgaaatagcatcttgtttcaaatcagcatctaactcagatgtactgataccctactcccaacttttgcaaaccatcatttttctcagtcagaataaaacagatgaagcattccgacttgtaaacaaaaccccattaactaccttaccgattggttacctgccctcagccttttcagttatcaaactggcattaaaagtgaaactggaaagaaaaaaaataagaaataaaacattactgtccgtgataaacagcaccttgagcaatcaaggtgctcttaccgaacttattgctgtgactcagggagaaactgatagtaaacttgtattatgcgcagataacatgacgatcatgcgtgcaataaaaatgtacaaccacatgataagaaaggtaagttattcatctgaagattcactatctgatgtgtgtccgcaagctatattcggaattcttgatgaaatagaatgtgcgctgggcaaattaaatatccttattcgcgaaacaggtgatagcattgacagtaatgaactagccgggcttatagtgaaaaataaaacactaacagctcgtgaattgaatgaaaacctggttggtgtgcttgacaaatgcacactttataatttcctgaatagcatcaatgtttttattagttatttgagatgcccaggagaagaactaggacacatcaggatatttgccggtgtaacagagaagcccaaacatcttcgggaaaaggtatgtgaagcgttgaagattgcatcagtaaaacgcaaagagggcacgcttagggagaagggaaaagcgacccgacgtcaacagaaaagtactagtgcggtcagaaaaagtaaatga

SEQ ID NO: 197822 - DNA, 1527 bp, Klebsiella oxytoca
atgaaacttacacataaaaaaaatgaaaatcatgatcttaatctggatgttagagcgattttgattttcgtccagcaaattttattttgcatatgtggaaaaactaaagcctctattgagctaacattttccacaattctggcaagcatgtctctggcctgtcaggatatgtatgatgttgaaattgttgatggtgttatcgcacccgtgtcgcatttccacattagtttggcaagatcgggaagccgaaaaaccacggtatatagggttgcaatggcccaaattcaccagtttgagcaccaactggccgaggtattctcaattaggctgaaagaatacgaacgacaatatgtgctctgggatgaagaatgtaaaagccttaagaaatcgcttcagaaagcgatacgtcagaaagacggaatagaagaagccagacacgagctggaggaatgtcttaaaaatgaacctgtaaagcctgtgagagtgcatttaacggtaaccgatcctacaccggaagcgcttctgaaagaaatgagcgactactctagcctaggtatcacttctgatgagggaagtgctctgtttgaaagtatcatgcgccgtaagacagcaaatcttaacagcctgtggtgtggtgaaaattatcgggtcagccgtgtgtcaacgggcagtttctacatcaaggatccccgtcttggtatgctattgatgatgcaaccggaaccgcatgatctcattctgagatcgctggctaaaaaaacaagagcaacggggggagatgctcgtattttaagaatggatcttacattgatcaccagaccgattgatattaatgatcttgtacctggcaatgaatctgatctcgataagttttattctattcaaaaaaaacatattgctgccgggattgagcgaaggaaaaaaaatgaaccccgcatctgtatgacctttgctccagatgcaaagaagcggttacatgatattgataggcacatcaaatatctgatacagccaggaaaaaaactgtatcactacaatgactggggcgctcggttcatcgaacatacagccaggattgccgctgtgatgcagttatatattacccctgaatcaacatttattacactggaaacgctggaagctgcactattgatatcggaatggtaccttaaccattttatgataaaaatggatgctgtcatgggaccgtcctatactgaaatagttcttgaatggttcgaaaataatcttgtcaaaaacggctcttacgattttttaagacgtgaaattatgcaaaaaatttatcttccactcaggaaaaaagcaaacctgatgcctattcttgaacagctttctgacgaaggaaaagttcagttatgggaggatgaaaacgggacgcattacgtcaaatatcttgcttacgaaatgacgcctacagaactggatgcaaaactaaacatcttgtcaggaagaccggcttatcatagtggtgggagtgtatttagcagcatgcccattaaagaataa

SEQ ID NO: 197823 - DNA, 819 bp, Klebsiella oxytoca
atgtttgcactactaatcataccgttgcttgtcagtggttcgttgctagttacatcttctcataacattaaactcttcttccgcttacaccgatacgatggccaacttctctacatgaaggtggccacgtacggtttctactcatgcctcgcggcgatcgtagctgcttactccatcaaatttctttgtcctggattaactttcgctacgtggctatctcacctcatcgatggcagctcagacccaaaagaaaatcgtattaccgcttggctaatacttttatcggtgactaccgttggtcttgcctggctttggttgcaattctgcagactgcgcatttacgttgccgcctggctaattacccatgagccgaaagatgaagaaagtatcaacttttcaaagcaagtcattaggcttaatgagttgggaaagctactctctgatggttcgcttgggcagttgtttttcgattcggcgaccgaagatagacctgtgctggtgagcttaaaatgtcgaaaggtctatgtaggtacagtcaacatgataagtgaacctaacgaaaagcaaggtccaaacctcgaaatttcaataagcccgatcatgtctgggtatcgagataaggataccttgagagtgcttttctcaaacgactacaacgatctagaagatgttgataccagcataatattcccgctcagcgaagtatctcatgcatcctggttcaatatggacatacatgaaaaggtcgataacaaccgagagcctaaaccaatcagcaaccgaaaggccaaacggaagtacgggcgaagccggaaataa

SEQ ID NO: 197824 - DNA, 249 bp, Klebsiella oxytoca
atgtcagaactggtcatgaagatgtttggtttaagtggttttgttaaaggcggacaagccatggcagatcgcttaaacaaatcaggtgtgaagaacataaaagttgtaggtcgcggtgctgtagttgttgatacagcggcagatcctgaaaaaattgagcgccttagaaaggccgccagaaagtttatcgaacaggatgcaaaagccgtagcagctgcaaaaaccaacactaaggacagcgacgaataa

SEQ ID NO: 197825 - DNA, 1050 bp, Klebsiella oxytoca
atggaagctaacgcgcgcggtgttaaatatgccgagcgcctgttgggggaaatacagaaccaaatcagcgcgggcgagttcgattattcgaaatattttcctggctctaaaaaactcgctctgtttgggatggtaaggaaaaccaaaaatataaaagcgtatcttgatgaatacctgaaaatctgcgaaaaccgcaacctgtcgccgtccaccattggtggctatgaaaaatgtctctccgcgctttctgcgctgcacaaactgcacgttgctgagcttacacctgcagtgctgaagaactggatcgccggcagaaaaacaaagctaaaaaccatcagaaacaacctgtcgtttttgcgtagtgctatcgacgaagcggttaccgatggtctgctgacaatcaacccggtgacgctggtcagcgccagcaggtaccacgttgttgaaagtagccatggtgccgacgattacgaggtggacccgttttcgcccgcggaaaccagagttatttatgcaaattgcagataccacgagtggagaaaccttttccgcttcgcatttaataccgggctacgcagttccgaactgtgcgccctgcgttggtctgatatcgattttgtcggcaacactattcatgtccagtcggccagtgtcgttggcgtgctgaagggaacgaaaaccaaagctggcacgcgtaaagtggaaatgaatgctgaagcgctgctggccctgcaggagcagaaacaatacacatttatgaaaagtgagttcatcttcagcgatccgaaaacgggagaaccctgggcaaacgccgacgcgatccgtaaaaaagcatgggtgccgaccctgaaaaaagctggcgtgcgctaccgtaacccgtaccagacccggcacacgttcgccaccaaacatattagccagggcgtgaaccttttctggctggcgggccagatgggccacaaagggccagaaatgctgttcaggcattacggctcttacctggcagaatacgacggacacacttctgtaaactcagctttgccaggatga

SEQ ID NO: 197826 - DNA, 258 bp, Klebsiella oxytoca
atgagaatgattgaatatcgtggcgtacttattcccgctcccccaccaatggtgcaattaaattgtgagccgggttttaccgggcgagtggtgatcgagctgaaagatggcgagttcgtcaaacaatacccgctacgcaaagaagaaacattctgctcgctcgaggcttttctcgaactggctcaggaagctggatatcaggtaatcgcacccgagacggaggatcactgtggcactgacagcaatacgcattcctga

SEQ ID NO: 197827 - DNA, 336 bp, Klebsiella oxytoca
gtgaaaacaaacctgattgagactcgccgccgtcacatcgttcgcgccaagcttgattcaatgatgcgaaggactgggagttattttcagctcgtaaaaatggacgatggaacaacgttacccgtcgaacttgatgaagatattttaacaaaatcattaatcaaatttttcgaagcgatgatttatgatacccataaacgcgagcaagcagaaaatttaatctctgaacattattcgaattgcatgggagttaataaattaacgcccgatggtgtggactttatgaatgcactcattgccacgctggccgaacaatcattaaaagccgagggctaa

SEQ ID NO: 197828 - DNA, 210 bp, Klebsiella oxytoca
atgtggcacccaaaagatgacgaagatattgagtgtgtatcttgcgaaattgaaaaccttactgaacttctagatcttatgtatgccagcttcgaaaacatgggagaaaaacaactctttgtgcttttgggtttagctttgaatttatcttcaaatatttttctttggatcaaagaagaggaaagacgacgtgaaaacaaacctgattga

SEQ ID NO: 197829 - DNA, 414 bp, Klebsiella oxytoca
atgaaaactcctatccaaatgcttgaagtgtttgtatcagacataatagaaaacactgttcttctggaggagatctataaaaaaagtaacgagaattacgaaacggattgttctataaacagcctaattcgttcaatgaaaaaaaccgtagataacatgaacgaatatgctaagactcatagtaatacaacaaaaccctgcaaatctgtagtggtcgaaattggtctggctgatgatatattcgatgcggtccttaccgctaaaaaacttgaagcagtcgcgcaaacttatagtgagtctttttttactgacgaggacaatgacaatcctgcgtgccatatgtcagctgtgatttttgactatgctcgtgaactttgcactgaacttaaagctatcgagaataaattaggctaa

SEQ ID NO: 197830 - DNA, 456 bp, Klebsiella oxytoca
atggactcaatgtttgtttacagaaaaattggaaatcacctaaagagcatttatcgggtcgatcctcatgacgccgaccaggtaaatcttgtaaaatgcagggcagtaacactgactcacctccatcatttgctttctgaacacagttcaaattcgttcgtgtctgcaagttaccgggactctctgtatgaactggtatatacagcaaccgaagctgcggttacggacccctttgccctttatccgactcttgttctgcacattcttgaagatgagcttgttgatataaatctggatatgaatgcgcagtttgctgaagtcgagcaacggatgagagaatggtttgttggctatcgcgaacggcggcaaatatcacccgaagactatccagctctgcctgaattgcagtggagtgatctgccgaacgaattatttggtctgataccagaaagttaa

SEQ ID NO: 197831 - DNA, 894 bp, Klebsiella oxytoca
atgttgaatttaaatcagctcaaagagcgtgaagacctgatggcgcagcaggcaaaactcggcgatgaactcgctttcgccgaagtgcatacacttccctgggggggcgggggctggaactcgaaccacaccagcatggcttcatgtccggagcatggagactacgagcgattcacgctggtgggtaaggattttcgcggtagggagacattcaagcattcccgctgccctgcgtgcatccggtcggagcaggcaagtgttgagtctggactgagagagcttcgcgttagcagcttgctggacgacgcaggtatcactcgacgctttggtgattgcgagtttgataattacctggagatcaatcaggaagcctcgcgcaacctcgcagcctgcaagcgctacgcaaataactggccagctgttctggaggccgggaaaagcctcgtgctaacagggagctgcgggacggggaaaaaccatctggcggtatcactggctaaaaacatcatccgcaaccatctcgccagtgtggaactgaccgacgtgatgcgtctgactcgtgcggtgaaaagcacctggcgccacaatgcggacacaaccgaagagagcgtactggatcactacgcttcgctggatctgctgattatcgatgaggtgggtgtgcagtttggtagcccgacagagatgacaatcctgcatgagatcattaacgcccgctatgaaagtgttctgccaacgatcctgattagcaacctgccgcgtgagcaactgaaagagtttatcagcgaccgcatttttgaccgagttactgatggtgggcgtaactacctggttttcaactggacgagttttcgtgggaataacgggggcatgcatgacaccagtctggcgtaa

SEQ ID NO: 197832 - DNA, 183 bp, Klebsiella oxytoca
atgaaacagatactttttacatggtttgcttttacaaatacctatgcctgcatcaccgccagcattaacgtgaacaactcactaatgcttgattcagctgtgccgtggattgttggggtttctcttggagtaatcaccaattacctattggctaagaaactgaaggaaagcgggtttctgtag

SEQ ID NO: 197833 - DNA, 219 bp, Klebsiella oxytoca
atgttagagagctatttcgatcaagtagcaaaagaccatgcagaggcaatcaagctgaaccagagacttcttgctgttcaggcggcgctggaaattgccaaagcttctgtttcttcgacaacagcaatgggtggggtaaagtctggttacgatttagaaaacgtgactaagaaaataggtgcattggctgatgctattcaaagtgctcttgaaaaataa

SEQ ID NO: 197834 - DNA, 279 bp, Klebsiella oxytoca
atgaaagatccagatagtgcaaagtttcgctatctaaggtttgtgaaagcaggtgaaaaagatggactggttggcggatttgtttgtggtgaaataaattcaaaaaatagttacggagcctatgctggttattcaaagtttcagctggcattaacaatgaaatcgaaaggttttttctctaaaggcgtaaactataccattgatgataagaagatatacaagaccctcattgggtctgatttggatttttattataaggtatgcggtcaggatgaatga

SEQ ID NO: 197835 - DNA, 714 bp, Klebsiella oxytoca
atgtcactttttattcagcttccggtacaggcaccggcgactatcggcaccgtcgcagagagcgatattgaaattttcctgccatttgattctggcgccactgagttctggaacttccgccgtgcctcactggtggcagcgaacaatcccgcaaaatcactggtgccgcagggtaattattctttcagtggtaacgcgcttaacgtgacgaccggcggcggaaataacctgcaaaccagcctgaccgatgatggtgagttctcattttgtggcgtggtcagcaaccttggatcggctaccactgcaatgattatcgccggtaactatcagaatactgttgcaggtactgcaatttataaagcatcaggcggggccctgactgttcgggccgccgctaagatatcgactatcggtaccccgaacgcctcatccccgttgttctttggtgtctcgattagcaaatccacaccctctctcagtgtggtaatcaaacagcccggtgtattggatttcgcggtaacaggaacttcctttagtgccccatacgttgaatcatcagagccggtaactcttggctcccttgtcggcggcctgtcgcaactgctgaaattttacgagttcgccacttatgagcgctcactaacgcttggtgaactcaataccaaatatttgcaggctaaggcgagaatgaagggtatgggtattggcatctaa

SEQ ID NO: 197836 - DNA, 855 bp, Klebsiella oxytoca
atgcctaatgctatcaaaaaagaccaagacatagagatcaatggtgttctattcaagagaacatccaaggtcttacttgaacgtttatcaaaaaaatcccaagctcatgattttaagcttgcagaaattcaagaaatgcttgctgtttctatggggtttgctaactaccatgaagttgttgcaagctctaagcgcaatgcctatgaggtgcattctgacagccaaggcttgagtaatgatctcttctctcgtgctctcgaaacgaaacgttcttggtttcagcgtatctgccccaaaccactttttgagaagaaaagcctgtcatggattaaccaagccgtatttactttcactgacttgttacacagcaagtattcagggccgagtcacatttatggaccagttgttactgttctggttggtgggtacagcaatttggttcttcaagcaattatcaacgcacacgaaaaatcgaagctttttgatgtaagtaatccggaagcattgagggtagcttatgatgatcttagagctatgcatccatcacgcgcgatcaatcacactggaaaaattggcgtatcaataattgaccgccagtatggttttgcagggttgactggcgcagaattcggcaggagtgatgttgcttatttggcagaactgacccaaatcgcaccacagcttgattttttcacgagtatttcgcgtgctgacttagataaatttacatcgcctgatttctctcagaatcactttcacgtcgtgaaactcgtagatctagacgaaattgatgagcactcacctttctccgccagaattatcttcactaatgaacgctacagacttgatctgtag

SEQ ID NO: 197837 - DNA, 216 bp, Klebsiella oxytoca
atgaggcatcattcggtcagcagcccattcattactatcgccattgtaaaccattcgggcattaatatgagctatgtattagtgatgaaattcgctatgcttcccggacttgtggttcagaactatgctttcacgaggcaggcaatgattgcgttaatgacggaagctctgcgtattatggtcatgggggtgcggcagaaggtgggcgaggtctaa

SEQ ID NO: 197838 - DNA, 225 bp, Klebsiella oxytoca
atgaaaatcgaatatcaggactatggcgcagtggcaaatattgtaatcaccagcacggtgtttgagttccgccggcacaatcgggcgatcgatgtcgccctgctcctgactcccgaaatgaccagtaatagcagcggatttttcatcatgaaaaccgtgctaagcggccatacgaaacacgcacttcgggcctacaaccatctgattcaggaggctaagcaatga

SEQ ID NO: 197839 - DNA, 192 bp, Klebsiella oxytoca
atgaacaacttcaaaggtctttcacttgaaccaacggatgcactaaaaaatatcagcactattcttgagggtggatatcttttggtaatttgctccgataaagcagtttcagaaattggcgatctggtcatcgattttgcacgtcagtacgcagccgctgcgtgtactaattcgctggagaatcagaaatga

SEQ ID NO: 197840 - DNA, 294 bp, Klebsiella oxytoca
atgaaggttcaagcggtaggcattttttggttccgtgatgcacttcagtatcatgagtacaaaaagatctttactgacgctgacgtactggccgacagttacaccgactggaagcgtgatgccgagaaattgattaagcgtgtcgagagaaacggtcaacgagttatcaaagctgaagctgagacagccgagttcatcagatggtgtgtcgagcacggtgttggaatcgacgccgaaggtcgcatgcagttcgcatccttcaaagcgcatcagaaactggttggcgaaagataa

SEQ ID NO: 197841 - DNA, 2160 bp, Klebsiella oxytoca
atgcgtgctctacagcttgccatgaccctgatggcaaaagaccagggctctaaggcattgcgccaggcactggccgacgtcttaaagcagaccaatgccaataagaaagcagaggaagaagccgcccgagttcgtgagcaatcatcacagagcggtatccgcgcatcccgaaccctgcagcaggaatatcaacgggctgctaatgcccgctctgtgctggggatccgctctgaacgcgacattcagcgcgagatagcgcagacgcaggccgcctataatcgtctgctccgaaccggaaccctcactgctaatgaacagacccgcgcgtttcgtgcgatgacgaaccaggtcgcgcagctgcgtaccgagctcaatggtgccggtcagtcaatgtcacgcatggaacgcgcccgtatgtggggtgggaatgtcacggcgttcgccggcggcatcgctgccgcaggggctattgttgcgccttctgtcagtaatcagatgtcttatgaacaacgtctggccagcatggctaacacagcatttgccgagaagaacactgccgggcgtcgggctggtatgcagtcgatggatcagcttatccgtcggtctgttgctgtaggaggtggtaataaagaaacagctgcaaatacactggatgcacttttagcttcgggtgctgttgaatatgattcaactgaacgtctcttacctatgctgcaaaaatattcgaccgcaacaggtgccgattctaaagaccttgcaatgattgcaatccgactgaaacaaactttcggtctcaaggatagtgatataccaaaagcgctgaacatggctataagcgctggtcaggctggttcatttgaacttgccgatatggccaaatatttacctgagcagttagcaaacgccagcagcattgggatgaagggacttgatgactttgcaactcttcttgggctcaatcaagcatcagctattactgcagggacgagtgataaggctggtaacaacgttatcaacttactggggaaaattagtagccaggatgcatctaacgctgctgccagaatcaaaataaatggtaaggggattgatctccctggttcattggcggctgctcagggaaagggaatgaatgcccttgatgcttttagtgccattgtcgacaaaattgtggctcagaatccaggttatcagaaacttgaaaagcaattgaaaaataccccagatgacccatcgcggcgtcgcataatggattctcagcttcaaatacttcaaggttctgccgtgggtcagattattgccgatcgtgaagcgctaatggccctcattgcttatcgtggaaataggaaatatgcatatggagtacgagatgacgccaatgcacaacggaccctccccgaattacaaacggccggtgaacgaaattttgacctgattcagggtactaacctatacaaggtcaaccagctcaataatacccgggactttgcgcagatggactcgatccagccactgtcagatgtgctgggtaaactctctggcgagctcaacgattacgctggcgcgtatccgggcctgacaaaagcgctggcaggcgctgaaaccgcaatcaaagccatgacggccgcagcatgggcgttcgctggtatcaagtttctttcctctgctggcgcggctgcagcagccagcggttcagcaactggtgcaggcgcaggagctggtgctgccagccgtattccgggctgggctggccggctcggcctcatcggtggtcgtgtactggcaccgtttgcactctggcaaggtgcagaagccgcgccactggtgcaggtcagtcgtggtgatgccgaggcacgcgccaggcttgaaaaaggtaattaccctaacgatcaggcccggatgcttgatgcactgaaatcccgcccggggcttatggatgcatgggatgaagtaaaagcctggtgggcatcaccatcaagtatcagcatccctcagtcagccaacggttacccggtgccgccgttcgcgcagcagccggcacagcagaccccaatcaacatcaccacccagctgcaggtcgatggccgtgtactggcagaggtcgttaacgaagcaaacggtcagtcggccgcgcgtggaccgcagggaggaccgcactga

SEQ ID NO: 197842 - DNA, 396 bp, Klebsiella oxytoca
atgaaagcatcaggacaactgctgtacggcgtgcctcacggtgacgccatcctctacgactacaccgtgacggttccggtaatacggcataccgtcaatgcactggcggcgacaaacgaagcctttggtgaggccgattcgcctgcagccaggatgtactaccgcgtggcggttatggctgaagtcatcgagtcgctgggcgacctgaaaaaggaagacatcactgcagagctgttgctggatggtctgacagatgacgacatggaccttcttgatgcagagctggccgggcttaaaaaaaagcggatgcgcgagcagccggcctctcagggctcaggcgagccaccctcatcctcggacgattcggcatcagcgcagaccgtatcgaaggaatga

SEQ ID NO: 197843 - DNA, 171 bp, Klebsiella oxytoca
atgaaagttaaagcccgtgaagggatccgagtaccgcgcgaggataacccccgccgctacatcgagcaggagcctgttgaggttcccgggagcacctattaccagcgccgccttaacgagggcgacctggtcgaagtgactgaagcgactaccggcaaaggaactaaataa

SEQ ID NO: 197844 - DNA, 435 bp, Klebsiella oxytoca
atgaaaaaaataatcacaatactgactatggtcattcctttgtttgcatatgcagataaatcagaccttcagaataaacaaaagatagctcaggatttttacacaaaaattaatgcagttatggtgaataccgatgaggcgaaagagtcatatcggcaaggaaatcctgcgatgtggaaagctattaacagcgacttaaacgcgcttatcaatgtagcggattccgagttcggatcagagcttacctcatcatttcatggctgttttaagctggggacagctgccagagacctttggactgataagatgatgaattctgcctcgcttgatataacaaaaagcaactacgaaaatgcgaagcgagaatgcaagcagaatataattaacccgcaggccaaaaatgataatgtagcaatcattgacgttacacagtaa

SEQ ID NO: 197845 - DNA, 438 bp, Klebsiella oxytoca
atgaatctgcaacaggtaacagagctactgcccccggcagtaatacagatagctgacctgattggcttcccggccaccgagcaactgctatccgcgttcggtggtaccactttcccggttggtaaaggcctccgcgctctcggcgctaaccgcgccgctcttctccgcgataccatcggcgaccacaatacccaactcctgattaaaaacttcggcggtgaggtgctttatctgcctcgctgcgatcgggcgttacgtgagctgcgtaaccgtcggttccttgctgagtttgacaccgttcgtcaggatggtacttcttcgctgatggccatgacgttactgtgtccgcgttacggttttagcgatcgctttggatggcagttgctggcgcaacaaaaagtagaaaaatctaatatgaatcaaaacgaattgttctga

SEQ ID NO: 197846 - DNA, 279 bp, Klebsiella oxytoca
atggctaaacaacccgaacactacaacctcgaaagcatttatgacgaaaaaatcagcccgctgatgcgccagattatcgacatttgcaaagagcataacatgccgatggttgcctcattcgcctatgagaacaacgaagagaaaggcattggctgctgcactaccaaactgatctttgaaggtaggtacataaaagaatttgcagaggctgcgtcaattattcgcggcaaccctcttttatctgcgttcacaattatgtcgggagtaaaggaccaatga

SEQ ID NO: 197847 - DNA, 210 bp, Klebsiella oxytoca
atgcgtcaggggatgcttacgcctgaatatggggtttcaacaatgaaaatatcagtggaaagatttattgaccgtctgatgatgaacccgtatctgcggccgttcacctggttgttttgcgttttcttttgcatcgctgtatggggcttaggtattcactacagcctgaaaatgattgaactgttattaaccgtatttaaggtggcttaa

SEQ ID NO: 197848 - DNA, 219 bp, Klebsiella oxytoca
gtggccaaaattgaaatatctgtaacccctaagggtaaaggcattgatgttcagtgccgcatgattaaagacgctaacgactcagaactggtaaataaagccgcgcgtactattcaggcttctatgggaggttttattcattccattctgaccaaaatgtttgggagagttaaagatttatcgtctgttcccgtgaaaggcaatgattcatttcattaa

SEQ ID NO: 197849 - DNA, 894 bp, Klebsiella oxytoca
atgacaatccgaacagaacttaccgaactgatggcccgtaaaggatacagccagactcaggtcgccaaagccataggcaaaagctcaacccttattagccagtatattcagggtaaatacccgggcgatgtaaaaaatattgatgaactggtatccagttttattacccgcgagatcgaaagagagaaagccgcgcggatcaacactgctttcgtcaatacagtaacagccagaaaagcactggaagttatcagtctggcgcagcttgacggtgatattaatgtgatttttggtgccgcagggttgggtaaaacaatggtccttcgccagtatgccagcgagcataaagacgccattctgattgaggctgacccgggatacaccgccaggaccgtgctggaggaactttgcggccgactgggactttcccgtaacggcaatatgcaccaactcagcgagtcatgtatctctgcgcttagtgattcgggtcgcctgctgatgattgatgaggcggagaacctgccttaccgcgcactggaaaccctgcgccgtattcacgataaagccagcattggtatcatcctggcgggtatgccacgactcctcattaacctgaaaggcaagcgtggggagtatcagcagttgtatagccgcgttggtttcgctttgccactgggtgaggcactccctaaagctgatatcgaagaaatagcggcaagcatgctggccgagaactgtgatgaagcagtcagtgatgccctgttcaccgccagtaaaggcaatgcccgccgcctgtttaagctggctcgcggtgtcagtcgttacagctcacttaaccaggaacctgtcaccgtaggcgttgttcgtaagttcgcagagatgctaattcattag

SEQ ID NO: 197850 - DNA, 2061 bp, Klebsiella oxytoca
atggaccgcatgctctcttgggttacaagcaaagaacttgtggaactagataaggctccctcagccataagcaccattatccgtaaggccaaaaaagaaggatggattttcaggcagcgtgcgggagttaagggggtcgtatttgaatatgacattcaatgcataccactggactggcaaaatgagcttaaagataaatattataaaaagttaattagtaacaaggagttatctcccgccactcaatctgtacgtaatggaataacgccagttgaagaaaaaggttcaaaacttaacatcatacgccaatgtccagtgctacttgagcgtgaggttaactcgctgaccgagaaacagaagcaggtcgccgatgctcgtgccacgctggcgctgtatgtagaaaaactccgggatgcgggaatgtcacgcactgcggcagttaatttcgtctccatggggtcacgcaaagggactctcccggaacatctgatgaaggctgtcgaactggcaaatgcccgaaaaggaagccgcaccggagttggtacgcgtagcctgcaggagtggctcagcgtttatgaggcgactaaatccggtggtgaacgtctggccatgctggcacccggtcatcttaaagcgaagaagcctgagcagattaaatggctccctgactttctggcgcactggcgcaaccttaatggtccgtcgatgagtgaggcatatcgtagcttccgcaaagagtggaaaaccgtgtactcagagcagcctgagatgcttgatttatgcccgtcatatgatgccgttcgtcgggcaatggccaagcttccccgccgtgagaaagcgtttgggcgcgtcagcggctccgcaaaactggcttatgaggtttatcagaagcgcgactggtcgacgatgccggttaatggctgctgggtctcggatggtaaatcactggatctggtagcgcggcaccctattcatggtcagccatttacgcctgaattaaccctggttcttgatggccgcacccgttactgcgtgggctggagtctgcgattgtctgaaagcatggatgcagttctggatgcttaccggttcggtatgcagcatcacggcaaaccgttatttgtctattccgataacggtggcggcgaggccaacaaaacgtttgatgacaaacttaccggtattttcccccgcatgggaattacccatatgaccagtattccgggacgcccgcagtctcgtggtctcattgagcgacttaacgccgttataccccaccgactggggcagcgttttgaaactttcaacggccgtggcgctgatcgtgagaatgttcgcatgaccaaccgtgccattcagtccgctgtacgtgcggaagctgcaggccgtgaactgacagccagacagaaaaaagacctgaataagctcccgtcatggcagcggctgctggatgtgattgctgaagaggttgacgcctataacaacgaacatgagcacagtgagctgccgagacgtaatggccgccatatgacgccttcagcttaccgaaaaatggttcttgagcaggaaggcgatgagatcgaatacctgacggatgtcgagttgcgtgaagtgtttatggctgaaacgacgcgtaaagctcagcagggctggattcagctgatgaataacgactatttctcgcacgaacttatcaatgtcgacaaggaggacgtccgcgtcgcgtttgatattcatgatgccagcgaaatcgttgttcgccgcatggatggtacttatgtctgccacgcggtctggaacggtaataaacgtgatgcgatcccggtcagcaaaatggaacacgcgatgaagcagcgtaccaagcgccgtcttggcctacttgataagaaacgggaagaagtggaagccgaggctcgtggcctgctgcccggtagcgtggtcaatgaattacctgacttcggaagttttattccgaaagtcgttgatgagccagaaaaagaatatttcttcctggcgactgaacgtgaagagcatctgaaaaaagccggaaaccataaatag

SEQ ID NO: 197851 - DNA, 213 bp, Klebsiella oxytoca
atgaatggtgaacaaagaaaaaatatgcacagggccgacattgtcgctgcattgcacaaaaaagctctctccttatctaagttggggcgagagcataatctttccccccatacattaaaaaatgcgctggataagccctatccaaagggagagaggattattgcggatgcaataggtttacatccacaagacatctggcccgagaggtactaa

SEQ ID NO: 197852 - DNA, 651 bp, Klebsiella oxytoca
atgaacgataagaaggttgttagtcttggaggtcgtaaaaaaggtcttgaagatgaactacttgaaatagctaaaatcattactgatgacacaggcaatgatccacctgaaaataatgataaatcaacaatttatatcaatggctctggtaacgttgttgggcaaggcaactttgttaaccacggagtggttaacataaacaaaactgcacgccgcacggttaatgtaaaaactggtgacggcgttgtaaacgcaacgcaaaagcatcaaattaaatctcttttatatgaatgggttgacacacataactctataaaaaaagctcagataagttatggtttagcctggtcaaagctcaacagctttttgaaagtgaatagctaccatgagattgcatcaggtgattttgataaagcaatcaaatatataagacaaaagctcggcgaactcaggaacatggcttcagccccgaagaaggtaagtaattggcgggcccagacaataaaatccatacaagctcgttgctcggagcgagggtggcaggagtggaggaagacgtatatgtctaaaacattcatgaaaagttcaatgacagagttaactgacgaagaactccaaaagctgtatcagactatctggtccaagagatga

SEQ ID NO: 197853 - DNA, 315 bp, Klebsiella oxytoca
atgatcctttttgaaaacggttcccctcgctacaggcgaataattggcacactactctctttatatccctggctgctgatggtgttggtctctcttaatgtcaggaataaactcgcaggcggatttttcagcgcaggcgcggcatttgcttgtgcgctggccaccctgtcattcattaattttattatttccataattttcattatgctaattaatatatttatcacgaccagagaaaaagtaaacaccggttatttctgggcaataaactctatctctttactgtgggtaattttcccgatatttaatctctaa

SEQ ID NO: 197854 - DNA, 123 bp, Klebsiella oxytoca
atgcccgacgtttacgtttgccccggattgcgctgcgcttatccgggctacatgacgtgtagctggggcgcgctgcgccgcctccgggaagagggattcataccaacagaaaaccccggctga

SEQ ID NO: 197855 - DNA, 765 bp, Klebsiella oxytoca
atgatcagcggggtgcgtggcggaaccattgatatggaaatgtccggttcaaacaatttcaccggcctggccccggtattcaacttacttgatgttccattcctgtttcgcgataccccacatgcgcataaaacgctcgacggtaaagtcggcgatgaactgaaaaaatcactcgagtcaaaagggctaaaagttctcgcgtactgggaaaatggctggcgtgacgttactaactcccgtacgccggtaaaaacccctgccgatctaaaagggttaaaaattcgtaccaataacagcccaatgaatatcgcggcttttaaaatctttggtgcgaacccgattccgatgccgttctccgaagtctataccgggctggaaacccgcacgattgatgcccaggaacatcctattaatgtcgtctggtcggccaaattctatgaagtacaaaagtacctttctctgactcaccacgcttattctcctttgctgttggtgatcaataaaaccaaattcgattctttaagcccgcagtttcaggaagcgctgctaagttccgccaaagaagccggcgactatcagcgcaaactggtcgccgaagatcagcaaaaaatcatcgacggcatgaagcaagccggagtggaagttctgaccgatatcgatcgtaaaacctttagcgatgtgctcggtaaccaggtacgcgatatgttcctgaaagacagccctcagggcgcagatctcctgaaagccgttgatgaggtgcaataa

SEQ ID NO: 197856 - DNA, 180 bp, Klebsiella oxytoca
atgaaaaaacggatgacgtcgacgccgcacgatgcggtattcaaacgatttcttcgccacccggagacggcgcatgatttcctcacgctctaccttccccaggcgatccgccagcggtgtgattttgcgacgctgcggctggagccagcgagctttattgatgaggatttgcgcgcctga

SEQ ID NO: 197857 - DNA, 186 bp, Klebsiella oxytoca
atgctgtttaattacctgattcactcgggcaaagcgcttcggttggggaaatttatccgcgaagtggggcgcaggcaggggaagcgggaaggtcgacttgagggcgttgaggaggggcagcgggccgaagcgctgcgtatgcttaaacgatgctcgccgaaggtatggccctggaaacggtgctga

SEQ ID NO: 197858 - DNA, 240 bp, Klebsiella oxytoca
atggtctgtggacatcctcagatactgagcgactctaattttatgatttttctgactttcatcacccattacactttctccgaccagtcaaaagcgaacaaaccccccaacaaaattgatcattttttaagcgatttcaacctctttatcccttttgaagctataagattcttaccttcattaaatcatcaaggtaatggcaaaaagcttttgcaggggattttgagtgctcgcttttga

SEQ ID NO: 197859 - DNA, 174 bp, Klebsiella oxytoca
atgcacctgttttgggtttttgggattaaatatagccttaatctcggaataaaaatctgcatcatcatgacaacgcaacataatattcgaatgtattttttattgattagattcttctatttaaataaggtgcgtgaatataagaaaaaaccgagtgagttaaacggaggttaa

SEQ ID NO: 197860 - DNA, 234 bp, Klebsiella oxytoca
atgaataaagttaatcgagtaatgaaaaaacatgagcaacaagaaccgctgataaccgccgtcagagaatgggtaatacaaaaacaactaacgaaggtcactctagcagagatatccatttccaaaatacagaggcagtttcgtattggttataatcgtgcttcaggaatccatgaaatgctggaagctgaaattaatacaaaaatttccattattgaggaacactttacataa

SEQ ID NO: 197861 - DNA, 999 bp, Klebsiella oxytoca
atgatagattttattcgagatctgttttcagcattcaaacacacatctttagaaagggtaaagagcccatttcttggagcttttgttttttcttggattggatttaactggccaatgctttcagttttatttttcagcaaaaaagatattgaaacaaggcttgaattcataaacaataattatgatattggtaactatcttttaggtcctatttgtacaacagctctcatatcaatgctgctacctcaaataaataaaatcgttactaaaatacaagacagaccaaacactgagaccgtagaattaaacttagcatctaaaataaaaatcgcagaactacaacaaaatatagctgaaatagaagcaagaaaaaaacttgcagaaaaaaaagaagaaaaatatatagatgaaagtatctatagaattaaaagtgattacgaaaaatcattgagcgatttatctgaattaaaatcctctatagaaaaattaagagaaagcaacaccgaacttcaaggttatctagcaaaaaccgaagtcaaattatcgtcagagcaggaatcaaaaaatgctctccaaagtcatttggccacagaaaaagagaataacaaagcacttaatgttaagtcatcaaaaatacacgaagaaaataaaacactgaaaaatcaaataattaaaatgaaatcagacgaagaagatttaaatagtaccatttcagagttattattcaaaaaatcagagctattaaaagaacttcaaagtattgaaaaaagacatcgagagatattctcattgaatgaagttaatggaaagtggcattttagaatcaacaatcaagccaaacaggatttgcgcttcattaacagcatattaaacaacaaaagacaaaaaatagattataattcaaatatcataattgcgaatagtgatttggaagagcataaaatccaacctattaactatactcatagaattaaaaatcatgataaaaatagcaattaa

SEQ ID NO: 197862 - DNA, 480 bp, Klebsiella oxytoca
atgggacctgaatcgtggagtgctgtagctggtgtcgcatcagcagttgctgctgcgctgagcttcgttgtaacttgtgttggcctgaaatatcagagaaaaacgttgctggaagcaatgagaaagaacgtaattgactcacttagttatcaagcagaaagggctaacgcattttcttcagggaaaagagattctgaatggtcatttctggaatttgcaaacattatgttcgctattgatacagcaagaaacatagtcgcgcggatcaatgaaagtgatggcatcagccgggatgaggcaaggatgtattttgtaagtctccttaaccaacccatcctatcctcgctcaaaaatggttctcctcccgatggtgcttttcaaaataaaggctcaatttccgaggggcttgaagttattaatttatggaatcccaatgcccatttccttggttttactgaagtaaattttggcataagttga

SEQ ID NO: 197863 - DNA, 693 bp, Klebsiella oxytoca
atgattaacactcaatacctccagtatgttcgccagcagctgatagtggccaccgccgatctgagcggcgcgacgaaagggcaactggtagcctttgcagagaacgcgcaattcaccgctacggcgcgcagccggggacggaagaaagtagccgatccggtcaccgggcgcatggtaaacccatcaaacccgccaatccccggacagcagtcccgcgccaaaggttccgcaatagccctcgttatgcccgttgagtactcgacagccagctggcgccgcgcgctgctgtcgctggaagagcaccaaaaagcctggctgctgtggaactacagcgacaatatccgctgggagaaccaggagacgatcacccggtgggcgtgggagcaattcagcgacaagctggccggcgtgcgcattgcaaagaaaacggtagagcgtctgcgtcagcttatctggctggcggcgcaggatgttaaagctgagctggcagggtgtgacatatataaataccaaaaactcgcagaattagggggcgttgcaaagtccacatggtcagaaacctatcttcctcattggctggcgatgcgttgcagctttgtgaagctcgactgtgaagcgctcatatcagtaatgcggacacgttcacaacaaaagacgacaaatttagctataagtcttgcaaaaccgaactga

SEQ ID NO: 197864 - DNA, 276 bp, Klebsiella oxytoca
atgggcattgaaataattattggtctggtaactgcgttcctgaccgttgtcgctggcgcatttgggttaggcaatgcccgcgggaccagcaaggcggaagccaaagccgaacagcagcgcacagaagagaacgcagcagctaccgtcgcagcagcagaaagaaaagcggaagtcacgaaagaggccagcaatgtacagcagactgttagccatatgcctgatgacgatgttgatcgggagctgcgcgagcaattcacccgacccggtagtcgttga

SEQ ID NO: 197865 - DNA, 195 bp, Klebsiella oxytoca
atgacgatgttgatcgggagctgcgcgagcaattcacccgacccggtagtcgttgatacggcctgcatctgggtgagagtcatttacctgactgaccacgatatcgacgtgctggatatgcagaccaagcgagacattctggcgcacaacaaatccgtgctggctaactgcgagaagaaaaccaccaaaaattag

SEQ ID NO: 197866 - DNA, 186 bp, Klebsiella oxytoca
gtggacgtgctgattgacagcgctttcgagggatatcttttcctcttactggatatgtggccagtattgattgttgctttcgtcgggttagctctagcattttatggtgtgctaatgcccaaaacagcagtcatttttctactgcttgccgtgatcgtagggacttcaggatggatatatacctga

SEQ ID NO: 197867 - DNA, 471 bp, Klebsiella oxytoca
atgcaccgtgtctatccccatggactccagttttttactgatacggcgcccaactccccaaacctcattcaccggcagcaaagacatcaacttcctctgccgttccaggttcgacaaatcaaccactccccgggtctgccgctgccactgtttcgcggcgtgattggccagcttcgccagagtttttgtctgggctatgccaacaccaaccgtgaggtgcgtccggcgcagaaccgtctcgcgaatttcccggccaaagtcggtaaggtcgcgacagttacgaactcctgtcagatcgcaaaatgcctcatcaatactgtaaatttcgcagcgcggagacagttcttccagcgtggtcatcacacgattggacatatcggcatagagctcatagttgctactaaacgcgataatgccgtgccggcgaaacgtgtccttttgtttgaagtacggctcccccattttgactaa

SEQ ID NO: 197868 - DNA, 261 bp, Klebsiella oxytoca; identical to SEQ ID NO: 110850

SEQ ID NO: 197869 - DNA, 558 bp, Klebsiella oxytoca; identical to SEQ ID NO: 110849

SEQ ID NO: 197870 - DNA, 2019 bp, Klebsiella oxytoca
atgaacgctgaaacgctcaaggactttctgatctcgcttgggtttaacgttgacgaggccggtgctaaaaagttcgatgctgtagtggcgggtacgacgctgaaagcgattgagctgggcgtcaaggtcgaagcggcagcgctttctgttgtcgcgttcaccgcgaaaatcgccagcagcctcgataacctttattgggcctctcagcgcaccggggcgacggtagagggcatcaagcaaatcgggtatgcagttagccaggtaggcggcagcgtggacgccgcccgcggctctctggaaaacctgtcacggttcgtgcgtaataatcccggcgccgaaggcttccttaaccgcctgggtgtgcagacccgcgatgctaaaggcaatatgcgggacatggcgacgatctttaccggcgtcggccagcgcctcagcagcatgccttactaccgtgcaaaccagtacgcgcaaatgctgggtctggatgaaaacaccctgatggcaatgcgtcgcggtatcggccagtttagtggcgaatacaccgcgatggcgaaggcgatcggctataacgccgatgtggccgctgtcagctctaataagttcatgacctcgctgcgctcctttgggctgatggcaggcatggcgcgggataaaataggctccagcctcgctgatggccttgccggctctctggacaggctgcgtcgacaaattctggaaaacttcccgaaaattgaaggcgcgataaccggtaccgtgaaaggcatactctgggctggtgagatggtaggcagggtaatttaccgccttattcaggctgctagcgatatccgggcctggtggattgggctggatagtgacacacaaaagcttattcagacgcttggtggcttgcttgttgcctggcgattgctgaacgcagcaatgcttgcctctcccgtctcgtgggttttggcactagctgcggctatccttttgctctacgacgattacaggacgtggaaagagggcggaaaaagcctcatcgactggaagcagtgggagcctgcaattgaaaaagccaaagcggcgattctatggcttcgcgacaaactgctcggactgaaggacgatgttggaggctggcagaacgcttttgaagtgctggcaacgttcgtcgctggaagctgggcagcaagaatgctgcttggtattgccaaagtcggtcgtgggtttagcccaattcttgccgcaatggctgctatcagcgcctgggataaaattggccaaattcaggaagaggcaaagcgagaaggaaaagacgtaggtcaatacctggtcgatcgcatgaaccagaagcagggtagtactgatggtcttctgggaggtgctaaccaggcgcttaatcgcctctattcatggtgggacagcattaccgataccggcggtgcgaccaatgcttatgatgcttatgggacagtaaaacgcccacaggcaactaaggcaggcgctcagctgctgggttggatggcacccatgatgggtaagctggaggcgatgtataacctcccggcaggactgctccgcagcgtcgctctgacagagtcgggtggaaatcagtttgctatttcagacgctggagcccaggggttattccagtttatgccgggtacagctcgtgatatgggcttacgcgggaatgatgtcttcgacccgatcaagtcagcggaagcggcggcgcgatatctatcgatgctcctgcagaagaacggcggagatctgggtaaagctctggcctcgtataactgggggatcggcaacgtgcaaaagtacggcatggcactgatgccgcaggaaaccaggcaatatatcccgaaggtattgagcaatatgccgggagctggcgccacattgaaccagaataccgttatcaacatttctggtgtcagcgatccgagagaggcggggaaaatcgtctctgatagccagagcaacgttaatgcacgcgcaacccagcaactaaccagggggccgagctga

SEQ ID NO: 197871 - DNA, 303 bp, Klebsiella oxytoca
atggctgttttagaaatccctctgtcacctgaaaaccagcgattctccatatctgtggcaggtcaaagtctgcaaatgaccgtgacctggcgtgcttctttctggtgtctggatatcatggacagtacgggcgccgacctgataaaaggcattcctcttatcaccggcgccaacctgctggcgcagtatagctatctcgggcttggattttcgctctatgtaaattgcgacgatccggcaaatgataacccaacccaaaccgacctcggcattaaaagccatctctacgtggtaacggagtaa

SEQ ID NO: 197872 - DNA, 297 bp, Klebsiella oxytoca
atgccgaccggtggccgtcaacgtgccaccgttattaatgtactcatccgccagtgtgccgccatcagggctgcgcacatacgtggtgctgccctcagggatattcgcgatatccgcctgcgccgccgccagcgtcatgtactgccgactgagagggatcaggttctgccgcgttgcctctacaacagcagcaccatctgctgctatttgctcgcgctgatcggcagacttttgctctataccggccatagtgtcgcgctcaattccggttctcgttgttacactcaaatcgggtga

SEQ ID NO: 197873 - DNA, 171 bp, Klebsiella oxytoca
atgcacgacttgttcaatctagcctgtccctgtaccctgcaacagccccggacacacttccctaggacagccatatccgctcaacactgtgctggtattgctctgccggaccgggagtgggatgccacgccagcgagtggtcagtacaactatcaggagagaaaggcatga

SEQ ID NO: 197874 - DNA, 255 bp, Klebsiella oxytoca
atgaacgataagatgacggaaaaagggcttataaaatatacattaatatcattgttattagggataatactcatggtaattttattcatcatttatttaatgagtaaagattcaaacatcattgcatatctttatgaattaacaaatggataccaaaaggatttctcagaacaatatttagtcgtaaccactatagcttccacatatactaaagctgcaccaattttcgtgatattaatgtatgtattttgctga

SEQ ID NO: 197875 - DNA, 939 bp, Klebsiella oxytoca
gtgaccgccggcacgtccaggcgcccggacgggaatggtcacgctctgggtattgttgaggcagagctggcgccgttcctggctggcaatggcggcagcgagtaccaggctaaaccgcgcccgatcgataagcccgcccacacaatcctgaaagagtcgcgcgcctgtgtcgtcgctccggttatcgccaggcagttcggcgccagcatcggacaccgtgccgacgaaccaagcgcaacaatcaccgcgggcggtggcggtaaatcgcagcgggttgtaccgacgctcattcaaataggatacggagaacggccaggccaggcacctcgcgtgccaggactagataagccgctgggaaccgttgtggctggtggcgggaaacatgccgtagttggtgcgttcctggcaaaacactacggaggaaattatcagggcgccggcgtgaggctggatgagcctgcgcattcagtaacgactgtcgatcaccacgcattagtcgcttctcatctggttaaactgcgcggtacttgccgtgacggccagcctactgacgagctgatgctgactatcactgccggcggccagcacgtaggggaggttaaaacgactctggcggtcgaggactacgacgaagagcgcgcgcagcaggtgctggcgttcctgcaggaatactgcggggaagatagcaccggactggtgaaaatcgccggggtgacatatcgcattgtcgacattggaatgcgcatgctacagccgcatgagctttaccgggcgcagggcttccccgagtggtacatcattgaccaggattgccgccgcgtgaagtatgcgaaggataagcaggtcgcgcgctgtggtaacgccgtcccgcctccattcactgaggctttggaaagggcaaacttgcctgagatgtgtcagacgcaagtagcggcttaa

SEQ ID NO: 197876 - DNA, 282 bp, Klebsiella oxytoca
atgacacatcatctctaccgccatgttaatggccatgatggcgtagtagatggcggcgacgctggtttcgcgatcgaggtgactatcgcggatattttcaatcagcccggctttcagctggcgcgcgccgcgaagcacggcctctgccgggataccgatacgcgaatggatgctgccgatcaggtactgccgctccgccagcgcctgcaaattctctttctcacacatcaggatatctttcacccacccggccagcgagctactgagccgctcctggactaa

SEQ ID NO: 197877 - DNA, 801 bp, Klebsiella oxytoca; identical to SEQ ID NO: 182362

SEQ ID NO: 197878 - DNA, 483 bp, Klebsiella oxytoca
atgtggggtcttggagccggtgcgaatgcaggcatcagttatctggcggatggtacgatagatccggcaaatgcggctattgctggatgggtaaacgttatcagcatgggaaatggtctggtgggtactgttggatggaatgcggcaggtggcgcgctggggaactggattgacaataaagatccactgtctggtgcacttatcaatggtgtcggttcgggcattggctatggtattggtaaagggctctcatggggcgttaatgctggagcaaactggtggaaaggtggttgggatccgaagtttaatgctgatctgagacagtttactgaagtgaaaggagattatggcctttcaaaagaaatgaaaccaagtaaggtacccagttcttttggtgacttaggcggttctattttctctgaaataacaggtaaaggaatcgagaaaatttcatctccaggtagtaatggagatgaaaaatga

SEQ ID NO: 197879 - DNA, 219 bp, Klebsiella oxytoca
atgatcaatatccttttcgctttattttcaattttggcagggatacttttagctgaaattgcatatatttttttacttatcgttgaatacgtaatgcttggcaattttaactttgaactggcatcagcatggcactatctgaaagtaggggccggtggaggggggataatgggaataggacttgctctgcttcgccattttgaagttaaaggattttaa

SEQ ID NO: 197880 - DNA, 705 bp, Klebsiella oxytoca
atggttttgcgcaaagagccagaaactgcgagggcagccagctgcgagaacgttgtcagggatatgatcaacctcaacatagagcagcagcaagaaatagcaactctgtgttcaatcaaccctcagcaatgtcaacagaagtatggttatttggttgagcagtgggaagtgtttgatgccacaatcaggcgcatggctgctgatggtacgctgccgaatgatttcaggtatgcgatggcaccagtttatacgctgagtcaggaagccggtggcatcaaggcgagcgagggctggaaaaaacgctttgaggcgatgggaatcagggaggaattcgcaacggcgatggcggcaactctcccattagctatgagtggaacgaaaggagctaaagcatcaacaacacaagtagttactaagaatgttaatcctggctcattaataagccgacagaatagtaatgaaatgtcaggttctcaggtaaaacgcattgcaaaggatatgaaagcaaatggctataaagttgataagcccgttgatgtcgctattgtaaacggcaaaatgatcattatcgatggtcatcatagagccgaggtcgcaagaaaggcaggtattaaagatatccccgtcagagttcaccctgttacaaaagagcaaggtgatcaattactgcgtgaagcacagccacagttgcttccaatgggctga

SEQ ID NO: 197881 - DNA, 204 bp, Klebsiella oxytoca
atgtcacattgtttggaatcagtagccttcgagttgagaaatgatgatcaatcattctctatggaagttggtgagttgattggtttcattcatgactctctgctgtcatcattgtatctggaaggcgatgtaatcaacatgaatgaaagtgagtctaaaagacttattagttcttttgagaattcgtattatgggatatcatag

SEQ ID NO: 197882 - DNA, 1119 bp, Klebsiella oxytoca
atgaaaagaacaatgcataacattggtgatacagacaaagaaaataaaggtgaaataaacatatctttatacaactttaaaaaggcagaaggtgttcaagaaaaaataattcacataaaaaaaacgcaattcaagaataaattggttaatttcttttggaacactagtaaaaatgaagttctaaaaggcatgggtaaagttagtagcataagtgactttcacagtacagctcatgcactttcctacagtagtgatactagtgaaataaaaaacagaacagagatacagcttggagactctgttttttactacaaaaaattgagtgtaaataatgaatcatttgtctttgggtatgtcactggaatattcagaaaaaacaacattgagtctattgaaataacaagaacatctcttgataagacaataaacagaagtcaaattaaattgattttagaaaaaaacacaccaatattcttattatcaaatggatataatgatcgatatgaaaaactagccccaacaaacaacaagctaaaaataatgtataaatatcaactagatagccttgagtttgttttggggaatgtgcggctattgcatttaattaagaatagatacagtaacagacaaataccattgggtgagttagcatttaaggaaatacataaatcaatgtttggggacattcatcattgggccggggaataccgtaatcatgaagttatagttggtgataggggcagggagacggtgcaccaaacagagataagtaaatgcatgaagacagcctttcaaaaaacacataaaaacaggttaagcagcataaataacattgactccttatccaacatgctcacaatcctgcataaagatttggcatggattcatccattcgaagatggaaatgggagagcgataagattttatttattaatcctatcgctatctctcggatttaaaatggacttaaaagtgttcattggagacaaaaagcgtaaatcattttaccactatgcggtaagaaaggcgatttacgataataataataaatatctacataggataataaaaaactctctaactatgatatcccataatacgaattctcaaaagaactaa

SEQ ID NO: 197883 - DNA, 876 bp, Klebsiella oxytoca
atgtacaaaaactgcacagagttagatttgtttggagaagatttaaacttttctaaagctaataataattgcgaaatagttattggtgattcaagagaagtaataaaaacactaggtgataaggtgtttgattgcatcgtaacttcacctccatactggggcttgcgagattatggtgttggaaatcaaataggtgctgagataaatattgatgattatatatttgatcttgtctctctttttaaagaagcaaaaagaacattaaaagacgatggtactctttgggttaacattggtgatagttatacatctggaggaagaacctggagagataaggatgataaaaataaaggtagggctatgtcatataggcctcctacacctgaagggctaaagccgaaggatttaattggcgttccttggaagcttgcatttgctttacagcaagatggatggtacctacgatctgatattatatggaataaaccaaattgccagcctgaaagtgtaaaagataggcctacaaggtctcatgagtatatatttctcttttctaaaaacaaaaaataccattatgattccgatgccataaaagaaccatccatggacaaaaaacaaggaaaaaaaaatcggaggacagtttggaatataaatacagagccttacccaggtagtcattttgcagtttatccaagagaaatggcaaggttatgtgttttagctggatcaagacctggaggtttggttcttgatcctttctttggttctggtactacaggtgttgtgtgtaattccttgggtagaaaatgcgttgggattgagctaaatgaagattacgctaagcttgccaaagagcgtatcctatcaggaaggtag

SEQ ID NO: 197884 - DNA, 741 bp, Klebsiella oxytoca
atgagtagagagcatgaattacttaagctatggagacagctaaatgaaacgcagcaagataatttcttaaaatggatgaaagcgtatgaaatcgaaaaaatatatgttaaccacaataaaggttatttcaatcaaaaatttattgataattttggcgacaggctaataactcattatttcaacagcaacagaccattaaccaagacattattcgagcatgctttcaatgattctttaaacgaatctgggatgcaatctcaactagctgaaagtcgaactaatccggggtacgatataacgatacaaaacattaaagctagtttaaaaacagaggcagccaggaatataagtcaaaaaaacattcatgtaagcaaatggatggaacttggtaaaggaaagtgggttttagaagaattactagcgagattcttagcgcatttaaataactacgataaaatattcacactccggtatattaaaccaacctatcttacatttaaatatcagcttattgagataccaaaaacactacttttggagtcaaaaaatgcacatctagttgtaatggaaaatagtactcaagacccaaaaccaggatatggttacgtttttgatcaaaatggtgaaaaaaagttttctctctactttgatgggggctcagagagaaaacttcaaataaaacatctaaatgtaagtttgtgcataattcacgctgaatggtgttacacactaccttcctga

SEQ ID NO: 197885 - DNA, 366 bp, Klebsiella oxytoca
atgaaaaatacttttaataaaatatataaaaaagaatcacctgaaagtttgttaagaacacattgcataagtgttaggttgaaccatgaagaactacagcttctcaatgcaaggcgtggagacaaaagtaaaggtgaatggtttcgcttggcttttctcgataagattccagtagctgtgccgcctatcaacattgaagcctggaaatcccttagcgaaatttcacagaagctgaacaagctacttattcatctcgaaagtaaaagcactggtggtcagcttactaagacagaaatcttcgcagtgaagcgccagatctcagagcttcgctcatgccttaccgcttcaagcacatctgtcaggtag

SEQ ID NO: 197886 - DNA, 255 bp, Klebsiella oxytoca; identical to SEQ ID NO: 189338

SEQ ID NO: 197887 - DNA, 474 bp, Klebsiella oxytoca
gtgctgcgccatatcgccctgtttgcctggctgccgctgctgaccgcatgggtgggcaacgataacggcggcaaaatcgtttttatcgcgctggcgtcgttctttccgatgttcttcagcaccctgcaggccgtgcttcagcgtaacccgcagctcgacgaagtcgccagggtactgcgcctgggcgagttagcgcgcctgcgcagggttattcttcccggcgcggcgccggggatcttcgccggtctgcggctggcgctgatttacgcctggcttggcaatatcggcgcggaatatttcatgtcctccggcgtcggcatcggcagcctgatgatcaatgcccagcagctgctggatatgcccaccattctctgcggcatggtgctggtcggtatcaccggcgcggcgctggataaagccggacgtttactggaaatgcgcgccacccgctggcgtcaacaggagcagctatga

SEQ ID NO: 197888 - DNA, 8415 bp, Klebsiella oxytoca
  misc_feature (8341)..(8350): n is a, c, g, or t
atggataacttgcgcttctcttctgcgccaacagcagattccattgatgcatcgatcgctcaacgctacccggactgcgaacctgtcgcagtcatcggctacgcctgccattttcctgaagcgccggatggcgaaaccttctggcgaaatctgctggaaggccgcgaatgcagccgacgctttacgcgcgaagcgcttctggccgccgggctggataccgccattattgacgatccttgttacgtcaatattggaacggttttagacaacgctgactgcttcgatgccaccctgtttggctattcgcggcaggaagcggagtcgatagatccccagcagcgcctgtttttacaggcggtctggcatgcgctggagcatgcaggttacgccccgggcgccgtcccccataagaccggcgttttcgcctcttcgcggatgagcacctatcccggccgcgaagccctgaacgtgacagaggtcgcacaggtcaagggcctgcagtctctgatgggcaatgacaaggactatatagccacccgcgcggcctacaaactcaatctgcacggcccggcgttatcggtacagaccgcctgctccagttcgctggttgcggtccatctggcctgcgaaagcctgcgcgcaggcgaatccgatatggcggtagccggcggagtggcgctttccttcccccagcaggcgggttaccgctaccagcccgggatgattttctctcccgacggccactgtcgcccttttgacgcctcggcagagggcacctgggccggcaacggtctcggctgcgtggtgctgcgtcgcctgaaggacgcgctgctgtcaggcgatccgattatcgcggtgatcctctccagcgcggtcaacaacgacggaaacagaaaagtgggttataccgcgccgtcggtggcaggacagcaagcggtcatcgaagaggcgttaatgctggcggccatcgacgacaggcagatcggctacattgaaacccacggtaccggcacgccgctgggagacgcgattgaaatagaagccctgcgcaacgtctacgctccccgcccgccgcaacagcgctgcgcgctgggttccgtgaagagcaacgttggtcacctggataccgcggcgggcattgccggactgctgaaaaccgttctggcggtcagtcgcggaaaaattccgccaatgctgaattttcacacgccaaacccggcgcttaagctcgaggaaagcccctttaccgtgccggtgacggcgcaggagtggcaggacgaagtgcgctacgcgggcgtctcctccttcggtattggcggcaccaactgccatatgatcgtcgcttcgctgcccgacgaactcaacataagctaccccgccgcggatgacggcagcaagagttccgcgctgttgctcagcgccgccagcgacaccgcgttgcggcagctggcagcggactatgccgcggcgctgagggaaaacgcggatgccaacaatctggccttcacggcgttacgcgcgcgccgtctcgatcttcccttccgcctggcggcgccattaaatcatgacaccgccgccgcgctcagcgcctgggctggcgcgaaatcgacttcgccggtctatagcggccacggcgccagcggcaaacaggtgtggctgtttaccgggcagggttcgcactggcgcactatgggccagtctctgtaccagcactcaacggcgtttgccgatacgctggagcgctgttttgccgcctgtcgcgacatgctcacgccttcgctacgggaagcgatgtttaatcccgattcagcgcagcttgacaatatggcctgggcccagccggcgattgtcgcgttcgaaatcgcgatggcggcccactggcgcgctgaaggactgaaggccgacttcgccatgggtcactccgtcggcgaatttgccgccgccgtggtctgcggacactataccattgagcaggtcatgccgctggtatgtcggcgcggcgcgctgatgcagctgtgcgcaagcggcgcgatggtggcggtatttgcgcaagaagaggcgctgatgccgttggcccgtcagttcgagctggatctcgccgccaacaatggcacccggcatacggtcttttccgggccggaagcccgtatcgcggagttttgcgccgcgctttcgcaacacgagatcgactatcgtcgcctgagcgtaaccggcgcggcgcactccgctttacttgaaccaatactcgatcgcttccaggaggcctgcgcgggtctgctcgccgagccggggcaaataccgctgatttccacgcttaccgccgaactcattgacgaggcgacgctcaaccaggcggattactggcgccgccatatgcgccagccggtacgttttattcagagtattcaggcggcgcgcaagctcggtgcccgcgtttttgttgaaatggggcctgacgcccagctgattgcctccggacagcgcgaataccgcgatgacgcttactggatagccagcgcccggcgtaaacaggaggcgagcgctgtcctgaatcaggcgcttctccagctatacgcggccggcgtcaccttaccgtgggccgatcttctggcaggcgatgggcaacgtatctccgcgccatgctatccgtttgcgaccgagcgttactggaaagaacgcgccacctccgcctgcgagcctgccgatgctgtgcttgccgctggattagaggtggccaacagcgccgcgacagcgctcgaactcccacgtctggaggcgcttaaacagtgtgccacgcgactgcacgccatctatgtcgatcggctggtacaacgctgtacgggcgatgcgatagataacggcgtggacgccatcaccattatgcgccatggacgactgatgccccgctaccagcagctgcttcagcgcctgctaaataactgcgtggtcgacggcgactaccgctgcgctgaggggcgctactaccgcgcccgccccattgaacatcagcagcgggacattctgctgacggaactcgccgattattgtgaaggttatcaggctatccccgataccatcgcccgtgccggcgatcggttatacgacatgatgagcggcgcggaagagccggtggcgattatcttcccgcaaggcgcttccgacggcgtagaggtgctatatcaggaattcagctttggccgctatttcaaccagattgccgccggggtagtacggggtatcgtccaggcgcgtcagccccatcagccgctgcgcattcttgaagtcggcggcggaaccggcggcaccaccgcatggctgctgcctgaactcaaagacgtaccggcgctggagtaccacttcaccgatatctccgcactgttcacccgccgtgcgcagcagaaattcgccgactatgactttgtgcattacgacgagctggatctcgaacaagaggcgcagtctcagggctttgcggcgcagtcttacgatcttatcgtcgcggctaatgtgatccatgccacgcgccatatcggtcgaaccctcgataatttgcgtcccttgctcaagccgggcgggcgcctgctgatgcgcgaaatcacccagccaatgcgtctgtttgatttcgttttcggcccgctggtcctcccgctacaggatatcgacgcccgcgaaggcgagctcttcctcaccccccatcagtggcagcagcagtgccgaagcgccggattcagcaaagtagcgtggctaccgcaggacgacagcccgaccgccggtatgagcgaacatatcattctcgccaccctgcccggccaggggatgtccacgtcatcagaatccgcgctggaacagacgttgccggataaccctgattatctcgccaactggtccgattgcgcaggtcagccggaacggtttaccgcccgctggcaggaggcctggcggcgcctctccgcgcggcacggcgacgattcccccgtgaaaccgcccctcgttaccgccccgcaatggctgggggaggtgcgcttaagctggcgaaacgcagccttttcccgcggcgagatgcgcgtggaagcccgtcatccagacggcaagtggctgccgctggcgcccgacgcgccgcttcctgcgccgcagacgcattatcattggcgctggaggcccctttgcatcgacagtaatagccgcccgctggtattccgcttcagcgccggtacccttgcctacgaagaggcgctggcgcaatacggcattcttcacgatccgcaggccccttctgttctgatgattgtcgacgagagcgaggagacgctggcgttagcgacacaggtgaaagaggcgctcaccgccagcccaggcggcttgattgtcgtcacccgccgcgcgtggcgaatcgaggaaaacgaggcgatatcagcggcccatcacgcgctgtgggctatgcttcgcgtcgtggccaacgaacagccggaacggttaatcgccgctatcgatatggctgaaaacgcctcgtgggaaacgctgcgtcaaggattaagcgctgtttcattgtcacaacgctggcttgcagcccgggataacggcttctggctcccttcgctggcgcccaatgcgggatgcgccgccgaattaccggcgaaggtgtttgccggcgataaccgctggcatctggtgaccggggcgtttggcggactgggccgccttgccgtgaactggctcagagaaaaaggggcgcgccgcatcgcgctactggcgccgcgcatggatgcgtcatggccaggcgacacagcggacgtggagattcgcgtctgccgttgtgatgtgggtgatgccggagagctggcccgcgttcttgatgagctggcgaccagcggcggcattgccggagcgattcataccgctggcgtattggctgatgggcccttgcaggaactcgatgaccaccagctggccgccgttttcgcggtcaaagcgcaggcggcaagccagctattacaaacgctgggcaaccacgacgcccgttatctgattctctattcgtccgctgccgccgccctcggcgcgccaggccagagcgcccatgcgctggcctgcgggtatcttgacgggctcgcccggcagttctcctcccttgatacgccgaaagtgctctccatcgcctggggcgcatggggagaaagcggccgggcggctacgacggagatgctgacgacccttgccgatcgtggcatgggcgcgttaagcgatgccgaggggcgctggcaccttgaacaagcggtgatgcgcggcgccgcctggcgactggccatgcgcgttttcaccgacaaaatgcccccgctgcagcaggccctgtttaacgccgcagcaacagaacacgccgcgattccggccgcgactcccgctgataaccctgcttttcacggtagcatcagcgataaagcggcggtgatgacatggctgaaaaatcgcattgcggtgcagctaagactgaacgatcctgcttcgctgaacgcagatcaggatctgttacagctgggaatggactcgctgctctttcttgaactcagcagcgatattcaacatgacctgggtgtacgcatcaacgcggaacgggcatggcaggatctctcgccgcacgggctcacacagcttatctgttctcaggcagagacggcgactgccgtatcgccgccggaagcgttgcagcacgatgccgctgagcgttacgcgcccttcccgttgacgccgattcagcatgcctactggttgggcagaacccatcttataggctatggcggcgttgcctgtcacgtgctgtttgagtgggataaacgccacgatgagttcgatctcgccgtactggagaaagcatggaaccagctcattgcccgccacgatatgctgcggatggtggtggatgcagatggacaacagcgcgttctggcgacaaccccgacgtatcgtatcccgcgcgacgatctgcgcgcgctttctccgcaagagcagcgccaggcgctggaaaaacggcgccatgaactgagctatcgcgttttacctgccgaccggtggccgctctttgagctggtggtcagcgaaatcgacgattgccgctaccgcctgcacatgaacctcgatcttctgcagttcgatgtgcagagctttaaagtcatgatggatgatttggccctggtctggcgcggagaaaccctgccgccgctcgatatcaccttccgcgattacgtgatggctgaacaggcgcgccggcaaacaacagcatggcacgatgcctgggattactggcaggaaaaactgccgcaactgccttcagcgccggaactgccggtggtggagacaccgccggaaaccccgcacttcaccacgttcacttcgacgcttgacaggcaagagtggcaggcggcgaaacaacgctggcagcagcagggcctcaccccctccgccgcgctgctcacgctgtttgccgccacccttgagcgctggagccgtaccacggcatttacgctgaacctgacgttcttcaatcgccagccgatccacccgcaaatcaatcagttgatcggggattttacctccgtcacgctggttgattttaacttctcaacgccgctaacgctgcaggagcagatgcaacgaacccagcagcgcctctggcaaaacatggcgcacagcgaagtgaacggcgttgaggcgatccgcgagctggggcgccagcgcggatcccagcgtcaaccgttgatgccggtggtgtttaccagcatgctggggatgacgctggaaggaatggcgatcgaccgggcaatgagtcatctgttcggcgaaccctgctatgtctttacgcaaacgccgcaggtctggctggatcatcaggtgatggagagcgatggcgcgttgacgtttagctggtactgcatggacaacgtgctggaaccgggcgcggctgaagcgatgtttaatgactactgcgccaccctgcaggccgctattgccaaccctgaaggcctgaagaccatggacagcggcattgccgaacacattccccgccgccgctggccgctgaacgcgcagacagactacgatctgcgcgatattgagcaagcggcgcagaaataccccggcatccaacaggccagagcggaattaagcgaaaatggcgcgttaaccctggatattgttgtgaccgaggatccaccgccctcagcgccgttacatgatgagcacgatctcgcctcactggcgctgccgttgcctgaacagacgcaacttgacgagctggaagcgacctggcgctggctggaggcgcgtgcgctgcaggggattgccgccacgctacatcgccaccgtctgttcaccaccccggaggttgcccacccatttggcgaaatagtacaggcgctgagcgcgcaagcgtcacaccggcgcctgctacgccagtggctgcagtgtctggcggaaagagaatggttagtgcgcgagggggatagctggcgctgccgcattccgctcagcgaaattcccgagcctcacgaagcttgcccgcaaacccactggagccaggcgctggcgcagtatcttgacgcctgcatcgcccggcacgacgacctcttctccgggcagtgttcgccgctggaactgctgttcaacgagtcgttgcgcgtaaccgacgcgctgtatcgcgaaaaccccgccagcgcttgtctgaatcgctataccgcgcagattgccgccctttgcggcgcagaacggatcctcgaggtgggcgccggaaccgcagccaccgcggaaccggtgctgaaggccacgcgaaacacgcggctgtcataccacttcacggatgtctccgcgcagttcctcaacgacgcccgaacccgtttccacgatgaatcgcgggtgtcttacgccttattcgatatcaaccagccgctggattttaccgcccaccccgaggcgggttacgacctgattattgccgtcaacgtgcttcacgacgccagccatgtcgtacagtcgttgcgccgattaaagcggttgctgaaagccggcggacgtctgctgatcgtggaagcgacggaacgaaacagcgtattccagctggcgagcgtcggctttatcgaagggttaagcggataccgcgatttccgccgccgggatgaaaaacctatgctcacccgttcggcatggcaggaagtgcttgtgcaggccggttttgccaacgaactggcctggccgccgcaggaatcgtcgccgctgcgccagcatctgctggtcgcacgttcgcctggggtgaatcgcccggataaagcagccgtgagccgctatctgcagcagnnnnnnnnnnaccctgcccgcgttgcagatccggcagcgagaaacgttatttactccgctatcggccccgcctga

SEQ ID NO: 197889 - DNA, 6099 bp, Klebsiella oxytoca
atgatttctggcgccccctctcaggatccgctgttatcggacaacggcgaagcggccgattatcaacaattacgcgaactgttaatacaggaactgaatgtagcgccgcagcagttacaggaagagagcaatctgatccaggcgggcctggactccataagattaatgagatggttacactggtttcgtaaaaagggctaccgcctcacccttcgcgagctgtatgccgcccccacgttggcagcatggcgccagctgatgcgcagccgttcgggtgaaaaaccggatgatgcaagctccccggcggacgcggcgtggccagtcatgagcgagggtatccccttcccgctgacgccggtacagcatgcctatctgacgggccgaatgcccggacagacgctgggcggcgtcggttgccatctgtatcaggagtttgccggccattatctgacggcgccaaagctggagcaggccatcacgatcttactgcaacgccatccgatgctgcatatcgcctttcgcgccgacgggcagcaggtctggctaccgcagccatactggaacggcgtcaccgttcatgatttacgccagaccgacgaggcaagccgccaggcctatctggaaacattgcgccagcgcctgagccaccgtcttttacgcgtggaaatgggcgaaacctttgatttccagttgacgctcttgccggacaatcgccaccgcctccatgtcaatatcgacctgctgattatggatgcttccagctttacgctgtttttcgatgaacttaacgccctgctggccggagagtcgctgccgcccggcgacccccgctatgatttccgcgcttatctgctgcaccagcagaagatcaatcagccgctgctcgacaaagcgcgcgcgtactggctggcgaaagcatcgatgctgccacccgcgccggttttaccgctagcctgcgaacccgccacgctgcgtgaagtccgtaatacccgacgccgcatgattgtcccgacaacacgctggaacgcctttagccaacgggccggtgagaatggcgtgacgccgacaatggcgctggcgacctgttttgctgccgttctggggcgctggggcggcctgacgcggctgctgctcaatatcacgttatttgaccgccagccgctgcacccggcggttgacgaaatgcttgccgacttcaccaatattcttctgctggataccgcctgcgatggcgataccgtcagcaacctggcgcgtaaaaaccagctcacgtttactgaggactgggagcatcgccactggtccggcgtcgagctccttcgtgaactcaaacgccagcaaagccatccccacggcgccccggtggtatttaccagcaatctggggcgctccctgtacagcagccgcgccgagtcgccgctgggcgaaccggaatggggcatctcgcagacgccgcaggtctggatagatcatctggcgttcgagcatcggggcgaggtctggctacaatgggatagcaatgacgcgttgttccctccggcgctggtcgagacgttgttcaacgcctactgccagctgattaaccaactctgcgatgatgaaagcgcctggaagaagccgttcgcggacaggatgccccaaagccagcgggagatacgtcaacgggttaacgcaaccgacgcacccgttcctcagggcttgctgcatgaaggcattttccgcatcgccctccggcaaccgcaggcgctggcggtaacggacgcgcattatcagtggaattatcgtgagctgaccgagaacgcgcgccgctgcgctggcaggttaatcgcgtgcggggttcagcccggcgacaatgtcgctattacaatgtcgaaaggcgcgggacagctggttgcggtcctcgccgttctgctgtccggggcggtgtacgttccggtttcgctcgaccagcccgccgcgcggcgcgggaaaatctacgccgacgccaaagtccggctggtgctcacctgccagcacgacgccagcgcctggtcagacgatattccccacctgacctggcagcaggccattgaggcggagccgctagccgaccaggcggcgcgcgcgccgacgcagccggcctacattatctatacctccgggtcgaccggcacgccgaaaggcgtggtcatttctcaccgtgcagcgctgaatacctgctgcgatatcaatagccgttaccaggtgggtcccggagacagagtgctggccctctccgccctgcattttgatttatcggtttacgacatttttggcgttctgagcgccggcggctcgctggttatcgttatggaaaatcaacggcgcgatccccgcgcatggtgcgaattgatccagggtcatcaggttacgctctggaacagcgtcccggcgctgttcgatatgctgttgacctggtgtgaaggtttcgccgacaccgcgccggagaaactgcgggcggtcatgctttccggcgactggatcggcctcgatcttcctgcccgctatcacgccttccgcccccagggacagtttatcgccatgggcggcgccaccgaggcgtctatctggtctaacgcctgtgaaattaaccgggtccccgaccactggcgcgccatcccttatggttttccgctggccaaccaacgttaccgggtggtggatgaactgggccgggactgcccggactgggtaccgggcgaattgtggattggcggtatcggggtcgcggaaggctactttaacgatcctgtacgcagcgagcagcagtttgtaacgcaatcgaacgcgcgctggtatcgcaccggcgatctcgggtgctactggccagacggtacgttagagttcctcggtcgtcgcgataagcaggtcaaagtcgggggatatcgcatcgagctgggtgaaatcgaaagcgcgctcagccagctggcgggagtgaaacagtcaaccgttgtggcgatcggcgaaaaagaaaagaccctggcagcctgggttgtgcctcagggttcggctttctgtgttacccatcatcgggacccggcgctgccccaggagtggcgcgggcttgccggaacgctgccctgctgcgtctgccccccggaaatctccgccggccaggtcgctgattttcttcagcatcgcctgttaaaactgaaaccgggtcaaactcctggcgccgatcctcttcccctgatgaatgctctcgctatccagcctcgctggcgggccgtggtggaacgctggttagcctttctcgtgacccaacagcggctgcagcccgccgctgagggttatcaggtttgtgcgggggaagcgccggagaatgaccctccttctttcagcgggcatgacctcaccttaacgcagatccttcgcggcgctcgccacgaactgtcattactgaacgatgcgcggtggtcgccggaaagtctggctttcgaccatccggccagcgccctgtatatcgaggaactggcgacaatctgtcaacagctttcccggcgtttacagcgcccggtacgcctgctagaggtgggtgtccgcaccgcccgcgccgcagagtgcctgctaacccggctcagcgctgacgagattgagtatgtcgggcttgagcacagccaggagctgctgctgagcgcccgacagcggattgcaccgtggtctgacgcccgtctggccctctggagtgcagacacgctggcggcgcatgctcattcggcggacattatctggctgaataacgccctgcatcgtctgctgccggaagagcccgggctcctcgcggcattacagcagctggccgttccaggcgcgctgctctatgtgttggagtttcgtcagttaacgccctccgccctgctcagcacgcttctgttaaccgatggtcagcccgaagccttacttcacaatagcgctgactggggggcgatatttaccgccgccgctttcaactgccagcacggcgatgaagtcgagggattgcagcgcttcctcgtacaatgccccgttagccaggtacgccgcgatcctcgtcagctgcagtccgctctcgccgaacgtctgccggggtggatggtaccgaaacggatcttcttacttgacgccttaccgctgacggcgaacggcaaaattgactatcagacgctaaagcgctgtcataccccggaagctgaaaaccggactgaagcggatttacccctgggcgatattgagaagcaggttgccgtcatctggcagccgctcttgtcgatgggcgccgtcagcagagaaaccgacttcttccagcatggcggtgatagcctgctagccaccaggctgatcggacagctccaccaggcgggttatgaagcacgattaagcgacctgtttaatcacccccggctggctgattttgccgccacgctgcgtaaaaccgacctccctgttgaacaaccctttgtccactcccctgaagaacgctaccggcctttcgcgctgactgatgtgcagcaggcttacctggtcgggcgtcagccgggctttgcccttggcggcgtaggctcacacttctttgttgaatttgaaattgccgatctggatattcaccggctggagaaggtctggaaccggttaatcgcccgccacgatatgctgcgcgccgtggtgcgggatggacaactgcgggttctcgaacagactcccccgtgggtgatacccgcgcacatcctgcacagccccgaagaggcgctgcaggtacgcgacagactggcgcatcaggttctcaaccctgaagtatggccggtattcgatcttcaggtcgggttcgtcgacgggatgcccgcccgcctgtggctgtgtctggataacctgttgcttgacgggttgagcatgcagatcctgttgtcagagctggaacacggctatcgctatccgcagcagcagctgccgccgcttcccgttaccttcagggattatctgcagcaacccgcgctgcggacgcccaatcccgactctctggcatggtggcaaacgcagtttgatgatattcctccggcacctgcgttaccgctacgctgcttgcctcaggacgttgagacgccgcgcttcgcacggctctatggggcaatggacagcgcgcgctggcgtcgcctgaaacagcgggcggctgatgctcatctcaccccgtcggccgtactgttatccgtgtggtcaacggttcttgctgcatggagcgcacagcccgatttcacgcttaaccttacgcttttcgacagacgacctctgcacccgcaaatcaaccagatcctgggcgactttacttcgctgatgctgctgagttggcatcccggcgagagctggctgcaaagcgcgcggttattacagcagcgactaagcgagagcctcaaccaccgcgatgtgtcggcaatacgcgtgatgcggcaactggcgcggcggcaaaacgtaccggctgtcccaatgcccgtcgtctttaccagcgcgctgggctttgagcaggataacttccttgcccggcgcaatctgctcaaaccggtgtggggtatatcccagacgccgcaggtctggctcgatcaccaggtttatgaatccgaaggggaactgcgctttaactgggattttgtcgccgccctgtttcctgacgggcaggtggagcgccagtttgcacagtattgcgcgttgcttaaccgaatggcggaggatgacagcagctggcagctgccgctcgccgacctggttcccccgcttaaggtcacggagcgacgcgcccgccggctgcgccctgagcgcgctcagccgcggatcgcggcggacaagagcagcgtcagcctgatttgcgacacctttcgcgaggtggttggcgagcctgtcgcacccgcagagaacttttttgaggcgggcgccacgtcgctgaatctggtgcagctgcacgtcttgttacaacgtcacgaattcgccaccctgacgctgcttgacctgttcactcacccttctcctgtcgcgctggccaattatctcgccggcgtagccctggaggagaaaaccaaacgcgtgcggccggttcgccgtcgtcagcggcgcatttga

SEQ ID NO: 197890 - DNA, 1017 bp, Klebsiella oxytoca
atgcagcggcagcgccagcttccagtccatcgccattttgtacaccggcgagcgctgggcggcatcaatcacgttttgcggaatcccctgtttcagcgcttcttcaatcaccgccgggtcgtgggggttgaggaacacctcgcactgccgctcgtagaggtcggtttcgcgctcggtgctggcggcctcttcaatgcggtcggcgtcgtacaacagcacgccgaggtagcggatacgtcccacgcaggtttcggaacagacggtgggctgtccggactcgatacgcgggtagcagaagatgcacttctccgatttgccgcttttccagttgaagtagattttcttgtacgggcagccgctgatgcacagacgccagccgcggcatttgtcctggtcgatcagcacgatgccgtcttcttcacgcttgtagatggcgccgctggggcaggtggcgacgcagctcgggttcaggcagtgctcgcacaggcgcggcagatacatcatgaaggtattttcaaactggccgtacatctccttctgaatcttgtcgaagttacggtcgcgggcgcgcttttcaaactcgccgccgagcagctcttcccagttggggccccagatgattttatccatccgcttgccgtcgataagcgaacgcggacgggcggtgggcaggtgttttccctccggcgcgttgtgcagatgctggtaatcaaaggtaaagggttcatagtagtcgtcgatctgcggtatcaccggattggcgaaaattttggtgatgacgcccattttgccgcccagacgcgggcgtattttgccattaacatcgcgcacccagccgccttcccacacctcctgatcttcccagtttttcggatagccgatgcccggtttggtttcgacgttgttaaaccaggcgtattccatcccttcgcgtccggtccagacgtttttacaggtgacggaacaggtgtgacagccgatgcatttatcgagattgagaaccataccgacctgtga

SEQ ID NO: 197891 - DNA, 195 bp, Klebsiella oxytoca
atgaaccgatcacctgaatacgcccagggtgcattggccgccctgcacgaagccaaaatcctcaatctcgcaaacgcgacaccgctcgctgtactggaaagcccggaggccgcgaagaccctcgttaatctgatgaatctggtgcttgacccgcttatccagaaatacaccgtgatggaggcgaaccgtgattaa

SEQ ID NO: 197892 - DNA, 645 bp, Klebsiella oxytoca
gtgactcagactccgacagcgactcggattctgacagtgactcggattctgacagcgactcggactccgacagcgactcggactctgacagcgactcggactctgacagcgactccgactccgacagcgactcggattcagacagcgatgctgactctgacagcgactccgactctgacagtgattcggactccgatagcgactcggattctgacagcgatgctgactctgacagcgattcggattccgacagcgactcggactccgacagcgactcggattctgacagcgactcggactccgacagcgactcggattctgacagcgactcggattcagacagcgattctgactctgacagtgactcggattcagacagcgattctgactctgacagtgactcggattcggacagcgactccgactctgacagcgattcggattccgacagcgactccgactctgacagcgactcggactctgacagcgactcggactctgacagcgactcggattcagacagcgactcggattccgacagcgattcggactccgactctgacagcgactcggattccgacagcgatatcgaggccatccccgatagcaacagcccggacgttgtcgcgctggaaggtaacctga

SEQ ID NO: 197893 - DNA, 702 bp, Klebsiella oxytoca
atgagtaattttaatccctttgagaaagagataaagaaaactgtattaaattacctattaatcaaagggaaaataaaaaatgaaactatagtcataaatgaattaactattgactctttcgcaagaagagtagatttggctatattagtcgatggaaaaataatagcgtatgaaataaaaagtgacgcagatagtctctataggctatctggacaacttgaaaaatataagcagtattttgataaaatcattgtgattacaacgattaaacatgttgaaaatattttaaacatgatccctgaaaatattgaagtatgggaggtagcagacgaaaatataaaaataaagaaaagaggaaagctttccaaaatcgaagataagggaaactaccttgatttgttgagagtacaagacatgaggaaattagctaaaaaatttaaaatccaattaggcagtagtggaaaaagagaaattaaggatattttaaagaaaaatttaaacaaaattccagcacaaaatttaaaattttttgtcattgatgcgatatctcaaagatataaaactacgtcatctaattttatagaaaacattaagataggtaacaaagtcactatcaatgacttgaatagattaagcccatattcacaaaaaacaagagacgaaaagatattcgaagatagtatcttaggaaaattaaaatag

SEQ ID NO: 197894 - DNA, 1161 bp, Klebsiella oxytoca
atgcctaaagtctcaaatgagcagaaagcagtgatggacatacttgatcttattcattttcataatgtatatacatcaagactgatatcttcagaagatcaaaatctatttcaagatatagcactggatgttcagggtgctgtaaataaaatcagcactgaagaagcgctactagatattttaacccactatttgatatgtggtttggaaatttcattaagtggcgatgatgtaaaatttatgagtaagttgaagggtaaatatgagattcctgatgaagtactcgattctattttgaaaaagaagaaagaaatatctttcgctcttctgagttgtatggtgtcggagcatggtattaaaaaggctgattttatagatcagttggtgaatctgacaaagaaatatgaggggatatatatcccagccactatagcttatagacttgctaataattttaatagtcttgttcatcctcttgatcatcttcacttctatggatatcttaatgatattggtgtaatgacatgcgcgaaatatcggtgtaacaaaaaaaatgataataaggactcttttaatcggatagcattgctcatggaatttgagattcttagagtatttgcacgattttgtattgatccaggcggcatggatgaaatcactttaaagcttcctccgaaagatattcctgatgagttaaggaaaaagattatagatgaatataaatattttattgagaatgttgttaatacagaaggcattatttataaatttacaggctctaatttaaatgaggagaaaacagctttacttctcctgaaaaatgtaagtctattttttaaacgtaaaaggatttttgaagggactatagccagatggcctggtgcttggggagcttttttaatggaattgttaagacaggaagattcaaggagggcaatttattgcgagaatgacaattctaattgtgtcagtgaagaagctagtgagattatgagtaattttaattttaaagtatccgctagaacactttacttacgatataattcctttaaaagaaaagaattaaaactcattaatgattatagatatttattgtctcaagcaccttacacaccgtcatgggacggtgaaagttatctttataaaataataagcccatga

SEQ ID NO: 197895 - DNA, 540 bp, Klebsiella oxytoca
atgaaaatcaacgtagtagggaccagcggcgtcggcaaatccaccctcgcgcgtcggctggctcaggaactgtcactgccttatattgaaatggatgtgctctactggctgcccgagtggcaagggacgccggacgatgagttctacgccaaactcgccgccgcgctcgccgcgcccggctgggtgctggacggcaactataaccgcagccgcccggtaaaatggcgcgatgtggatctggtggtgtgggtggactacagcttctggcgcacgatccgccaggcggtccgtcgcgcggcttcacgcgcaagccgacggcaggagctgtggcccggcaccggcaattgcgaaaccttccgccgctctttctttagccgggattctattattctctggacgctgaaaacctggcgcaacaatcgccggcgttacctggcggatatgcaggacccgcagtatcaacacattcgctttgttcgtttacgcgaccagcagcagaccgaggcgctggtgcgcgagcttcggcagaatagccgataa

SEQ ID NO: 197896 - DNA, 1548 bp, Klebsiella oxytoca
atgctcgcttatctcattcctcagaatgatgagagagccagcagcacgaaccacttcatggacattgacaggaaaatagcgacatcaatgaatacaaaacactctagcgtggcggagcagcacgctgccaaacgccactggctgaactcccaggagtcgggctaccacaaggcgatgggcaaccgtcaggtgcagatgattgccatcggcggcgcgattggtaccggcctgttcctcggcgcgggcgcgcgcctgcagatggccggaccggccctggcgctggtttatctggtctgcggcctcttctcgttctttatcttacgcgcgctgggcgagctggtgcttcatcgcccctccagcggcagcttcgtctcctatgcccgcgagttcctcggcgaaaaagcggcttacgttgcgggctggatgtactttatcaactgggcgatgaccgggatcgtcgatatcaccgccgtcgcgctgtatatgcactactggggcgcgtttggcgacgttccgcagtgggtcttcgccctcggcgcgctggcgattgtcggcaccatgaacatgatcggcgtgaaatggttcgccgagatggagttctggttcgcgctggtgaaagttctggcgatcgtcgcgtttctggtggtcgggactatttttcttggcagcggaaagccgctggatggcaatgctaccggtttccacctgattaccgataacggcggcctgttcccgcacggcctgctgccggcgctggtgctggttcagggggtggtgttcgccttcgcctctatcgaactggtgggtaccgccgctggcgagtgtaaagacccgcagaccatggtgccgcgcgccattaacagcgttatctggcgtattggtctgttctacgttggctcagtgctgctgctggtgctgctactgccgtggaatgcctatcaggccgggcagagcccgttcgtcaccttcttctcgaagctgggcgtgccgtatatcggcagcgtgatgaatatcgtggtgttaaccgccgcgctctccagcctcaactccggcctctactgcaccgggcgtattctgcgctccatgtcgatgggcggttcggcgccgaagtttatgtcgaaaatgagccgccaccacgtgccctacgccgggattctggcgacgctggcggtgtatgtcgttggggtattcctcaactacctggtgccttcgcaggtatttgaaattgtccttaacgtcgcgtcgctggggattatcgcttcatggggctttattgtggtgtgccagatgcgcctgcgtaaggcgatcaaggaaggcaaagcggcggacgttagcttcaagatgccgggtgcgccttttacctcctggctgaccctgctgttcctgcttagcgtgctggtattaatggctttcgattatccgaatgggacttataccatcggttcgcttccgctgattgccgttttgctggtcgccggctggtttggcgtgcgcaagcgcgtgcatgacattcatagcaccgcgccgaatattgaaaaacagcaataa

SEQ ID NO: 197897 - DNA, 222 bp, Klebsiella oxytoca
atgaaaaaatcattaatggttgtttgcgccggcgcgatgctggctcttctggcgggctgtagctcaaactatgtcatgacgacaaaaagcgggcagactatcgtaacgcagggcaagccgaagctggataaagataccggaatgaccagctatactgatgagtcgggcaataagcgccagattaacagcagcgatgtggctcagctggtggaggataattaa

SEQ ID NO: 197898 - DNA, 1062 bp, Klebsiella oxytoca
atgtcattacgtcatctgtccgcgccgcgtctgcgccgttcactgttgttaacttcgttactgctggcggggagctttagcgcccacgcggcggaagaaatgctgcgcaaagccgtcggcaagggcgcatacgaaatggcctatagccagcaggagaatgcgctgtgggtggccacctcgcaaagccgttcgctggataaaggcggtatcgtttaccgtctcgatccgacgactctcgaagtcacgcagattattcataacgatctgaaacccttcggcgcgacgatcgataacgccactcagaccctgtggtttggcaacaccaccgacagcaccgtcaccgccattgatgctaaaaccgggaaagtgaaagggcgtctggtgcttgacgcccgccagcgcagcgaaaccgtacgtccgctggccccgcgcgagctggcggtcaacgagaaaaccaacaccgtctacatcaccgggctgggtaaagagagcgtgatttgggtggtggatggcgacaagctaacgctgaaagacaccatcgccaatactggcgcaatggcgaccggcctggcgctggacgcggaagcgaaccgtatctataccaccaatgctgacggggaactggtgactatcgacagcaccagcaacaaaatcctgtcgcgtaaaaagctgcaggatgatggcaaagagcatttctatctcaacctgagcctggataccgccggacatcgcgcctttatcaccgacggtaaacagccggaagtgctggtggtcgatattcgcgatggcaaagtgctggagaaaatcgccgcgccggagtccctggccgtgctgtttaacccgacccgcaatgaagcctacgtgacgcaccgtaaagccggcgaagtgagcgtgatcgatggtaagacctacaaagtggtcaagaccttcaaaacgccgactcatccgaacagcctgacgctctccgccgatggtaaaacgctgtacgtcagcgtgaagcaggagtcgacgcgtcagaaagaggcgacccagccggatgacgttatccgcatcgcgctgtga

SEQ ID NO: 197899 - DNA, 2112 bp, Klebsiella oxytoca
atgaaaatcctttccgtgcgcgccgccgcgctccccgctctgcttttgccgctggtctccgcagggccaaccgctctcgccgctgaacagactatggtggttaccgccgcgccgtcggcggtttctgaactcgatacccccgccgccgttagcgtggttaacggcgatgagatgcgccaggccgcgccgcgggtaaacctctccgagtcgctgggcgcggtaccgggactgcaggtgcaaaaccgccagaactacgcgcaggatctgcagctttcgattcgcggcttcgggtcccgctccacctacggcgtgcgcgggctgcgtatttacgtcgacggtatcccggccaccatgccagatggccaggggcaaacctcgaatattgatattggcagcctcgattcgctcgaggtgctgcgcggacctttttccgccctgtacggtaactcctccggcggggtgatcaacgccaccagccagaccggaagccagccgcctactatcgaagccagcagctactacggcagctttggcacctggcattacggtatgaaagcgaccggcgcggtgggcgacggcagccatgcgggcgacgtcgactacgtggtttccaccaaccgcttcactacccacggctcccgcgaccatagcggcgcgcgtaagaatctcgccaacgcgaagctcggcgtgcgcatcaatgacgtcagtaagctgaccctgctgtttaacagcgtggatattaaagctaatgacgcgggcggcctgagctacgacgaatggcaaaataatccgcgccagtcgccaagaggcgatgagtacaatacccgcaaaaccatcaaacagacccaggccggtttacgctacgagcgacagctgagcgagcaggacgatctgagcgtgatgatgtacgccggtgaacgtgaaaccacgcagtatcaatcgattcctcgcgcgccgcagctcaaacccacccatgctggcggcgttatcgacctgacgcgtcactaccagggaattgatacccgctggacccaccgcggcgagctgctggtgccggtcacctttaccaccggtcttgattacgaaaccatgagcgagcgccgcaaaggttacgaaaactttgttatgagcaacggcgcgccgcagtacggtgaaaagggagaccttcgccgcaacgagcgtaacctgatgtggaacgtcgatccctatctgcaaacccagtggcagctcaccgagaaactctctctggacgcgggcgtgcgctacagctcggtttggttcgattccaacgattattacattacgccgggcaacggtgatgacagcggcgaggccagctatcataaatggctgccggcaggatcgctgaaatatgcggtaaccgacgcgtggaacgtctacgtctccgccggccgcggtttcgaaacgccgaccattaatgagctttcctatcgctccggcgaccagggcgggctgaactttggcctgcagccgtccaccaacgaaaccgttgaaattggcagcaaggcgcgtatcggcaacggcctgttgaccgccgcgctgttccagaccgacaccgacaatgagattgtcgtcgacgccagcagcggcgggcgtaccagctacaaaaacgccggaaaaacccgtcgccaggggatggagctggggctggatcagcagttcggcgagagctggcgtttaaaagcggcctggacctggctggatgcgacctatcgtaccaacgtctgtgatgataccagctgtaaaggcaatcgcattccggggatcgcccgcaacatgggctatgcctcctttggctaccagcccgaaaaaggctggtacgcgggcagcgatattcgctatatgagcgatattatggctaacgatgagaacaccgccaaagccccatcctggacggtggtcggcctgacgaccggctataaatggagctacggcaaaatggatatggatctgtttggccgcgtcgataacctgttcgaccgcagctacgcgggctcggttatcgttaacgaatccaacggccgctactacgaaccggcgccgggccgtaattacggtatcggtctaaatctggcatggcggtttgagtaa

SEQ ID NO: 197900 - DNA, 300 bp, Klebsiella oxytoca
atgaaagatgttgtagataaatgcagtaccaaaggctgcgccattgacgtgggctcgattattgataatgaggactgcgtctggcgggtagagaaaaacttcgccacccgcgaagaggccgagtccaccatcgcggccgtccgcgaacgcgccctggccgccgcgcccgccagcgagccgccgcaggtcgactataccatcgtggccgccggcgatgaggcaaagcttgaggcttcgattgccttctcctgccaggcggaaaagatcattttcgaattgtcgttaagaaacgtgatttaa

SEQ ID NO: 197901 - DNA, 936 bp, Klebsiella oxytoca
atggcactgccagtgattatcgattgcgatccgggtcatgatgacgcgattgccctcgttcttgccctcgcctcacccgaactcaatgttaaagccgtcacctcttccgcgggaaatcagaccccggacaaaaccctgcgcaacgtcctgcggatgctcaccctgcttaagcgcccggatattccggtagccggcggcgcgctcaagccgttgatgcgggagctgattatcgccgataacgtgcatggcgagagcggtcttgacggtccggcgctgccggaaccgggctttgccgcccagacgtgcaccgccgtcgagctgatggccaaaaccctgcgcgacagcgccgagccggtcaccatcgtcgcaaccggcccgcaaaccaacgtcgccctgctgctcaacagccaccctgaactgcatgccaaaattgcccgcatcgtgataatgggcggtgcgatggtgctgggtaactggcagccggcggtcgagtttaatatctacgtcgacccggaagcggcggagatcgttttccagtccggcattccggtggtgatggccgggttagacgtcacccataaagcgcaaattcacgttgaggatattgagcgcttccgccgcattggcaacccgatatccaccatcgtcgccgaactgctcgacttcttccttgagtaccataaggatgagaaatggggctttgtcggcgcgccgctgcacgacccgtgcaccattgcctggctgctgaagccggagatgtttaccaccattgaacgctgggtcggcgtggaaacgcaggggaaatatacccagggaatgaccgtggtcgatttctacaatctgaccggcaggaagccgaacgcaacggtgatgctcgatgtcgatcgccaggcgtttgttgacctgctggcggagcggctggccttttacgcgtaa

SEQ ID NO: 197902 - DNA, 1038 bp, Klebsiella oxytoca
atggctttcaatccgcaacgccaccgccgttgggtgctggcatcccgtccgcacggcgagccgaccggggaaaacttccgcctggaagagggtgaggtcgcttctcccgggccgggacagctactgctgcgcaccgtctttctgtctttagatccctatatgcgcgggcggatgagcgacgcgccttcctattcgccgccggtcgccgttggcgcggtgatggtgggcggcaccgtgagccgcgtcgtgacatcgaaccatgatgattatcagcccggcgactgggtgctgggctacggtggctggcaggattatgaactctccgacggcagcgggctggtgaaattaggcgagagcccggaacacccttcctgggcgttggggatcctcggcatgccgggctttaccgcctatatggggctgctggatattggtcagccgaaagcgggtgaaacgctggtggtcgccgccgccaccgggccggttggcgcaacggtcggacagattgctaagctgaaaggctgccgtacggtgggcatcgcgggcggcagcgagaagtgccgctatgcggtagaaaccctcggcttcgacgcctgcatcgatcaccgcgcgcccgatttcgccgtcaaactgcttgaagcctgcccgcaggggatcgatatctactatgagaacgtcggtgggaaagtgtttgatgaagtgctgccgctgctgaacacctcggcccgcgtgccggtttgcggcctggtcagcggctacaacgccaccgcgctgcccgacggcccggatcgtttaccgctgctgatggcgacaatcctcaaaaaacgcatccgtatgcagggctttattatcggccaggattacggtcaccggattgccgagttccagcaggagatggggcgctgggtgcaggcagggaaaatcaaataccgcgagcaggtggttgacggcctggagaacgcgccgcaggcgctcatcggtctgctgaagggcgagaacttcggtaaagtggtggttcgcgtctctcctgacgagtag

SEQ ID NO: 197903 - DNA, 576 bp, Klebsiella oxytoca
atgaatactatagaagacaacctcaaccagcgaatcagcgcacgcatccgaatcgagcgggaatcccgcggctggtcgctcagcgaactcgccgagcgggctggggcgtcgcgggcgatgatccacaagatcgagcgcggcgaaagcagcccgacggcgtcgatgcttggacggctttccggcgccttcggcattagcatgtcgacgctgatcgccagggcggagatgcaggaaggcaagctgctgcgttttgctcatcagccggtgtggcacgatccgcagagccactatcttcggcgtcacgtttctccgcgtagcgacctgcctatcgatctggtgcaggtggaacttccggctggcagcgacgttcctatgcccgcgtcatcctatgcgctggcccggcagctcatctggctacagcagggcgaactggtctttctcgaaggcaacgcgcgccacgaaatgcaggcgggggattgcctggagctcgggccgccgaacgactgccgctttattaatgaaaccacgcagccctgcgtctatctggtggtccggctcaatcaatctgcctcataa

SEQ ID NO: 197904 - DNA, 1296 bp, Klebsiella oxytoca
atggcgcgtacacaaaatatgaagaaattaatgccgtcaatattggcaatggccacgggggctatattgggcaattccgctatggcggctgaaaccaccgcgctacaggcggcaccggcttataccgcgacgcagactaaaggggagacgctgtggagcaatgacgatacggcaatcggtattttaggatccgtacgtttaatggccaaaacggactctaatcatactcaggaacataatatacagaataatgactcgcggctgggggttgccgtgcggcataattttgacctgaacggcctgagtaattatgccgtcggttattatgagaccggcgttcatggtttagattccgccaccgatgaccagggcaatgatgtttatacccggcaggcttatgccggtattggcaacgaccgctatggcgtggtgaccttcggcaaacagtatgctcccacggactgggggctgggtattgatacgacttatgcctggggcggtaaagcgaaacatgataccgccggaatgtcgacggatattattaattccgcggcaatctattattacaatgataacaatatgacgattggcgtcatggggcaaggcaatgacaacgtcgacagcatcggctttgcggcctacggcgatgggccgaatctgcatgacgcttaccgcgatggttcagccaccgttcacggcggcgccgcggttgccgcgcagtaccgttgggataacggcttctccgtctccagcgcggtggcgtataacaattacacggtaaatagcgggtcagtcagcggctgccagaattttggcccgaacggacactgttttaattacaccgataataacggcgatgcctatgacggcaatacttatagcatgggcatgaacgcgaaatatacgacaagcgttggcgatcatgcctggtataacggtgcggaagtgacttattacctcaataaagtgaatgatgttacagcggcgaccagcggccattacgaacataataaccagcagggtgatgaccaggaaacggtgcttggcctggaatatgattcacagtttaaaatcaccccggcctggggcgtgtacgttgattttaactggtcgcagggaggcgatgcgatggatgggcagcacttccagtcgacggtattgggcaccgattactggctggggaaaaacgcggtgacctatcttgaatacggctacgaaaaagcctggggcaacgataacgaagcgtggaatattgacgacaatcttggcgcagtggggctgcgcgtctttatctga

SEQ ID NO: 197905 - DNA, 519 bp, Klebsiella oxytoca
atgagcatccgccatgccagcaaagacgattgcgcggcaatcgctgaaatctacaaccatgcggtcgtccataccgccgccatctggaacgacaaaaccgtcgataccgacaaccgtattgcctggttcgaagcccggcagatagccggttatcccgtgctggtgagcgaagaaaacggcgtgattaccggttactcctccttcggcgactggcgcgcctttgacggctttcgccacaccgtcgaacattccgtctatgtccaccccgctcatcaggggaaagggctgggccgcagcctgctcgtcgccctcatcgccgaggcgaaacggctgaataagcacgtcatggtcgccggcattgaagcgcaaaacgaggcttcattgcatctgcatgaaacgctgggctttatcaccaccgggcagatgccgcaggtcggcacgaaatttggccgctggctggatctgacctttatgcagctgcagcttgacgatcgccgcgatccggacggcagcgcatga

SEQ ID NO: 197906 - DNA, 450 bp, Klebsiella oxytoca
atgaatcaaacgctgaccctggcctgtttaatcgccgctggcgtcgggctggtgctgcaaaacacgctgatggtgcgcattacccagtccgcatcgaccatcctgatcgccatgctgcttaactcgctggtcggcatcgtgattttcgtgacaatactgctgcttaagcacggcgcggcggggtttcaggagctggcggtcagcgtaaagtggtggacgcttattcccggtctgctgggctcgttctttgtctttgccagcatcagcggctatcagaacgtcggggcggcaaccacgattgcggtattgattgccagccagctggttgggggcttagtgctagatctgattcgcgcgcaccacgtcccgctacgcgcgctggttggcccgctctgcggggcggtgatgctggttatcggcgcctggctggtggccagacgccagttctag

SEQ ID NO: 197907 - DNA, 234 bp, Klebsiella oxytoca
atgtcgcatctggatgaggtcgtcgcgcgcgtggacgccgcgattgccgaaagcgttattagccatatgaatgaactgctgatcgcgctgagcgatgacgcggggctggggcgggaagagcgctacgttcagcagcagcgtttgcgtaacgccatcgcccaccacggccgccagcagcacgaggagcaggaagctcgccgggagcagctgacccgcggcggcgagattcactag

SEQ ID NO: 197908 - DNA, 1599 bp, Klebsiella oxytoca
atgtctacagggaaaacgtttcttgcgctggcgttgagcgcgctactgccggcgtcaggcgcctgggcggcgggcaacgatacgctggtctattgttccgaagcttcgccggaatctttcaacccgcagattgccagctcgggcccgtctttcgtcgccagttcccaggtgctttataaccgcctgataaactttgacccggtcaaaaatacgccgattccctcgctggccaccgaatggcgcgtctccccggacggtaaaacctggactttcaccctgcgtaagggcgtgcagttcaacagcaacaaatacttcaagccgacccgtgatttcaacgccgatgacgtgctgttctcggtgctgcggcagaaagatgccagccatccgtaccataatgtttcccagggacattacgaatacttccacgacgttgggctggataagctgatcaaagacgtcaaaaaaatcgatgattatcacgtgcagtttgtgctgaacgagccgaacgcggcgttcctcgccgactggggaatggattttgcgtcgattctgtctgccgaatatgccgatgcgatgctgaaaaaaggcaccccggagtatgtcgatacctggcctattggaaccggaccctacgcgctgcagcaatataaagcggattcgctgatccgctatgtcgccaacccgcactactgggacggtgacgtgccgaccaaacacctgattttctcgatcacaccgaacgttgagacgcggctggcgaagctgcaaaccaatgaatgccagattatccccgcgccgtcgccggtacagttcccggtgattaagggcaataaagatctggcgctgcatgcggttgaggcgctcaacgttggctatctggcctttaataccgagaaaaagccgtttgataacgtactggtgcgccaggcgctgaactacgctaccgacaagcaggcaatcgtgaaagcggtcttcctggactccggcagcgtcgcgaaatcgccgatccccgccaatatgctgggctataagaaagatctgcctgattacgactacgatccgcaaaaagcgaaagatctcctcaagcaggccgggctggaaaaaggggccgaagtaaccctgtggtcgatgccggtgcagcggccgtataaccccaattcccgacgtattgccgagatgattcaaaatgactggagcaaggttgggatcaaagccaaaatcgttacttatgaatggggtgaatacctcgccggcatgcgcaaaggcgagcacgacagcgcgctgtttggctggatgtctgataatggcgatccggataacttcgccggcaccctgttaagctgcgataacattaaaaccggctctaacgttgcccgctggtgcgataaatcctacgatgcgctggtgaaaaaggctatcctggtcagcgacccacaggcgcgcgccggactctacgcgcaggcgcaggagatttttcagcagcaggccccttggatcaccctggcgaccggtaacaccttctacgcgacgcgcagcaacgtgagcggctacagcgtgagcctgatgggcagcgatttttccaaagttaaactcaattaa

SEQ ID NO: 197909 - DNA, 1434 bp, Klebsiella oxytoca
atgacaataacctgcaatctgtacaccaacggccagtggcatgatgctgaaggtcatgccacctttacccgcgataatccgctcacgcacgaacgcgcctccgttgccagcgccgccagcctggcggacgcccgccgctgcgccgctgccgccggcgcggcgttcccgcagtggcgcgatacggtacccgccgagcgccgacgtctcctgctggaggccgcggaagagatgctgcgccgtgaggcgaaatttatcgccgcgatggcggcggaaacgggagccaccgcgcactgggccggttttaacgttcatctggccgccgatatcctgcgcgaagccgccgccctgaccacacaaattgagggccaggtgatcccttccaacgtgccgggaaatctggcgttgggcatccgccagggcgcaggcgtggtgcttggcatggcgccgtggaacgcgccattaatcctcgcgacccgcgctatcgccacgccgctggcctgtggaaatacggttatcctcaaaggcgcggagctttcaccggcgacgcaggggctgattatcgatgccctggcggcggcaggctttcccgcgggcgtggtcaattatctgacctgcgcccccgccgacgcgcctgcgctggtggagttactgattgcccaccccgccgtacgccgcatcaatttcaccggctccacgccggtggggcggataatcgcccgcacctgcggcgaacatctgaaacccgcggtgctggagctcggcggcaaagcgccgctgctggtgctggatgacgccgatctcgaacaggccgcggcaggcgcaatttttggcgcattcgccaacgccggacaaatctgcatgtccaccgagcgcatcatcgtcgacgcgacagtcgcggaagcgtttgtggcgcagctggccagacgcgccgccgccctgcccgccagcctgctcggcccggtggtggacatgaagaccgtcacccgctgcaatgccttgatagaggacgcgctggcgaagggggcgcgcctgctggccggcggcctatccgattcgacgcaaatgcgcgccaccctgcttgatggcgtcacccgggaaatgcgcatctggcatgaggaatcgttcggtccggtgaaatcgattattcgcgttaaggacgaagctgaagcgctggccgtcgccaatgaaagcgaatatggcctctcgtcggcgatatacagccgggacagcgccagggcgtggaacctggcgcaaaatctgcaaaccggcatttgccacatcaacggccccaccgtacatgacgaagcgcaaatgccgtttggcggctgcaaatcgtcaggctacggccgctttggcggacgcgcaggaattgccgagtttaccgagctacgctgggtaacgctgcaaacggtcccgcgcgagctcccgttttaa

SEQ ID NO: 197910 - DNA, 1257 bp, Klebsiella oxytoca
atgcgaaaaatcactatcctgggtatctcggctttactctttacaccgctgcttctgcaagggtgcgcgacgcaaactccccgcgggacgacctcccgtccgcagcttacggcggcagaagcggcaaccttcaccattgagcgctattttgcgcaaggcggcgcgttaaatgaccccgatggcccctggtcgccatcgccagttcacctcccgcaaaccgagagcgcgtggcgcgtggcaccctcgggagcgccgttcacccgcattcagcaggcggttaacgcggcaataggccagcatggggcgcaggaggcgcgcatctatatccgcatcgaaccgggcatctatcgggagacggtctatatccctgaaggcgcgccgccgataaccctctacggcgccggagatagtcctgaagaggtgagaattgagctggcaatagactcgcagttctcggtagcgcgctatcgccagcgggtaaatagccaacagcaataccgcgaaggcgatccggcatggtatcagtatgcgctgtgcgccgggcgaaccagcaagacgataggcaccaactgcgcggcggtggtctggtcgcaaagtgcggattttcagctgctgaatctcagcgtagccaatagcctgctggataccgtcgacggtgggacgcatcagggcgtggcgctgcggacggacggcgatcgcgtgcagctggagaacgtccgcctgctcggacgtcaggacacgctctacgtaaataccagcaatcggcgcaatgaggcggtaaccgaccgtatcagccgggtatacgtgaaagacagctacgtcgaaggggatgtggactacgtctttggccgggcgaacgccatttttgataacgtccattttcacaccgtctcaacgcgccgctcgcccgaggcatacgtgcttgcgccgaatacgttgccggataatccatacggctttctggtgaagaatagccgctttaccggcgacggcggctatcagggcagcttcaaggcgaagctgggccgcgcctgggatcagggggcggggaagaccggttatttagcgggtaaaaccgctaacgggcaggtgcttattgccaacagtattatcgatcaaagctacgatcggctttccccctggggcgctgcggccaccaccgcccggccgttccgcggcaacacttccgcagaacggcagcttgatgatgttgccttcaatcgcctgtgggaattcaataaccactggcagccctga

SEQ ID NO: 197911 - DNA, 771 bp, Klebsiella oxytoca
atgcttagtttttactcttcacaggctggcgctatagtgcgctggctcgatctgcccggtcgcggcgaccctgttgtttttatccacggcctgggctgcgcctctacctatgactatccgcgcgttgccgccgacccggcgctggccgggcggcgaatgattcttgtcgatttacccggtttcggctacagcgataaacccgagtccttcggctaccgtattggcgatcaggccggggtggtggttgagctgctggaccgcttagggcttgagcgctgctatctatatggccacagcatggggggcagcgtcgcgattgaagcggccgagcggctcgccggacgggtgcgggcgctgctggtgaccgagcctaatctctatcccgggggcggcatgtacagtagacgtatcgccgaacagactgaagaacgctttattgctcgcggctactccgacatgctgtccgccgacgcttcgccttgggccggctgtctgcaaaacagcgccccctgggcggtgtggcgcggcgcgaccagcctggtgatgggcgttaatccctcctggtttagccgctttatccacttatcctgtcctaaggctctgatatacggtgaagattcgctaccggcccgggaagcgacggatagcgaagccgccgggatcccgctgctggtgataccccaggccgggcactcaatggcgtgggaaaacccatcggcgctggcccgtacgctcgccgatttttactccgccatggaggcagaagcctga

SEQ ID NO: 197912 - DNA, 174 bp, Klebsiella oxytoca; identical to SEQ ID NO: 188944

SEQ ID NO: 197913 - DNA, 285 bp, Klebsiella oxytoca; identical to SEQ ID NO: 179045

SEQ ID NO: 197914 - DNA, 123 bp, Klebsiella oxytoca
atgtcaggaatcgcccttctcattgtggcgcttattttactcattgctgcaatttataatcttttttcctatgttcgcgaacgtcgccaggcgaatttaccgagcaaaaaaacaaaacgttag

SEQ ID NO: 197915 - DNA, 1428 bp, Klebsiella oxytoca
atgcaaaataaccttttgattaacggtaagttagtggctggagaaggcgagaccgtgccggtgtttaatcccgccaccggtgacgagatcctgtcgattgctgaggccacggcggcgcaggtagacgctgcggttgaggccgcggatcgggcctttgttagctggagtcagaccacgccgaagttccgcgccgaatgtctgttgtcgctggcggacgtgattactgaacatgcgcaggcgctggctgagcttgaatcgcttaactgcggtaagccgctgcactgcgtggtcaacgatgagctaccggcggtcgccgatgtcttccgcttctttgccggcgcggcccgctgtctgccgggcatggcggcgggtgagtatctcgaaggccacacctccatgattcgccgcgacccggttggcgtggtggcctccatcgcgccctggaactacccgctgatgatggcagcatggaagctggccccggcgctggcggcaggcaactgcgtggtgatcaaaccctcggagatcacccctttaacggcactcaaactgggtgagctggcaaaagacgttttcccggccggggtgcttaacgtgctgtttggccgcggcgcaacggtcggcgatccgctgaccgctcacgcgaaggtccgcatggtgtcgttgaccggttcgatcgccaccggcgcgcatatcatcggccataccgcatcgtcgattaaacgtacgcatatggaactgggcgggaaagcgccggttatcgtctttgatgacgcggatatcgacgcggtggtggagggcgtacggacctttggattctataacgcaggccaggactgtaccgccgcctgccggatttacgcccaggccggagtttatgccctgctggtggaaaaactcggcgccgcggtcgccagcctgaagatgggcccgccggaagacgaaacgaccgagctggggccgctgagctcgcaggcgcatctggacagagtctgcgccgccgttgatgccgcccgcgcgctaccgcatattcaggtggtcaccggcggcagcaaagcgccaggcaacggttactactatcagccgacgctgctggcgggagcgaagcaggaagatgcgattgtccagcgcgaggtcttcggcccggttgtcagtattacctcatttcatgacgaagagcaggcgctgagctgggccaacgattcgcagtatggtctggcttcgtcggtctggaccagggacgtcggcagggcgcatcgcctgagcgcgcgtctgcagtatggctgcacctgggttaacacccatttcatgctggtgagcgaaatgccgcacggcgggcagaagctttcgggctacggcaaggatatgtcgatgtacggtctggaggattacaccacgatccggcacgtcatgattaagcacggatag

SEQ ID NO: 197916 - DNA, 807 bp, Klebsiella oxytoca
atgcactctgaacgcgcaccgctgctcctgaaagtggcaacctggggaggggtgatctttctccatttcccgctgctgattatcgcgctctatgcgtttaatacagaagatgccgccttcggctttccgccacagggcctgacgctgcgctggtttagcgaagcggcggagcgcggggatattatcgatgccgtgacgttgtcacttaaaatcgccgcgctctccaccgctatcgctctgctacttggcacgctggctgcaggtgcgctatggcgcagcacgttttttggcaagaacgccgtctcgctactgctgctgttgccgatagcactgcccggcattatcaccggactggcgctgctcactgccttcaaggccgtcaatctggaacccgggttgctgacgatcgtcgtggggcatgcgacgttctgcgtcgttgtggtgtttaacaacgtcattgcccgctttcgccggacctcctggagcctggtagaggcgtcgatggacttaggcgctacgggctggcaaacctttcgctatgtggtgttgcccaatttggggtcggcgctgctggcgggaggtatgctggcgtttgccctgtcgtttgatgaaattatcgtcaccacgttcaccgccgggcacgagcgcacgctgccgctctggctgctcaatcagctcggacgcccgcgcgatgtcccggtgaccaacgtggttgcgctgctggtgatgctggtgacgatgatgccgattctgggggcctggtggctcacccgtgacggcgacgtcagcgctgaaaacggaaaataa

SEQ ID NO: 197917 - DNA, 930 bp, Klebsiella oxytoca
atgacgatggcgattccgtccgccaccaccgggcgcgtatccgcgctgttctggcgtaaaccctcgctggccctgtttttgcttctgcttggcccgctcatgtggtttggcattgtctatctgggatcgttgctgaccctgctatggcaaagcttctacaccttcgacgatttcaccatgtcggtcactcacgacctgacgctggccaatctgcaggcgctgtttaacccggcgaactacgacatcattatccgtaccctgacgatggcgctgtcggtgaccgtcgccagcgcgattctggccttgcctatggcctggtacatggcccgctatacccggggcaagatgaaggcgtttttctacatcgccgtgatgctgccgatgtgggcaagctatatcgtcaaagcctatgcatggacgctgctgttggcgaaagatggcgttgcgcagtggtttctgcgccatcttggcctggaaagcgtactgagcatggtgctgacgatcccggcggtcggcggcaatacgctatcgacgtccggactggggcgcttcctggtgttcgtctatatctggctgccgtttatgatcctgccggtgcaggccgcgctggaacgcctgccgccatcattgcttcaggcctccgccgatctgggcgctcgtccgcgccagaccttccgctacgtggtgctgccgctggcgattcccggcattgccgcaggctcgatttttaccttctccctgacgctcggcgattttatcgtgccgcagctggtggggccgccggggttctttatcggcaatatggtctattcccagcagggggcgattggcaatatgcccatggcggcggcgtttaccctggtgcccatcgtgctgattgccctttatctggcgtttgtgaaacgtctgggagcgtttgatgcactctga

SEQ ID NO: 197918 - DNA, 1011 bp, Klebsiella oxytoca
atgcacgcggtagagttcgataatgtttcgcggctgtacggcgacgtgcgggcggtggacggcgtcagcatcgccattcgcgatggcgaatttttctccatgctggggccctccggctccggcaaaaccacctgcctgcgcctgattgccgggtttgaacagctttcgggcggcgccattcgcatttttggtaaagcggccagcgaactgccgccgtggcagcgcgacgtgaatacggtgttccaggattacgcgctgtttcctcatatgtcggtcctcgataacgtcgcctacgggctgatggtcaaaggcgtcggtaagaaagcgcggcatgcccgcgcgctggaggcgctggagaaggtcgcgctcgcgtttgtccacgcgcgcaggccatcgcagctttccggcggccagcgccagcgggtggcgatcgcccgcgcgctggtgaatcagccgcgcgtcctgctgctggatgagccgctcggggcgctggatttaaaactgcgtgaacagatgcagctggagctaaagaaactgcagcaggcgctgggtattacctttatttttgtgacccacgatcagggcgaagccctgtcgatgtccgatcgcgtggcggtgtttaataatgggcgaatcgaacaggttgatgcgccccaggacctctatttgcggcctaaaacggcgtttgtggccggctttgtcggcaccgccaacgtattcagcagcgagcaggcgcacaagctgtgcgcgatggcgggaacgtggtcgttgcgcccggaacatatccggctgaacgttgccggggagatccagacggagggcgttgtgcaggcggtgcagtatcagggggccgcgacccgcgtcgaactcaagctggcgaatggcgagaagctgttggtgagccaggcgaatagtgatggtcatgccgcgctaaacgcgccgccggtagggcaaacggtgatggcttcgtggtcgcgagcggcgatggtgccgctggagagcggaggctga

SEQ ID NO: 197919 - DNA, 1146 bp, Klebsiella oxytoca
atgagcaaaaaaattgcccgtggcagcctttgcgtgctgggtatggtatgcctgacggcgcaggccgccgagccgccgacatctctcgataaaggcgaaggccgtctcgatattatcgcctggccgggatatatcgaacggggacagaccgataaaagctacgactgggtaacccagtttgaaaaagaatccggctgtcaggtcaacgtcaaaaccgccgccacgtccgacgagatggtcagcctgatggcgaaaggcggttatgacctggtcaccgcgtccggcgacgcctcgctgcgcctgattatgggcaagcgcgtgcagccgattgacaccgcgctgatcggtaactggaagtccctcgacccgcgcgtggaaaatggcgcgtggttcaacgtcaacggtaaggtttacggcactccctaccagtgggggccgaacctgctaatgtacaacacgaaaaccttcccgacgccgccggacagctggagcgtggtgttcgtcaaacaaaacctgccggacggtaaaaccaaccttggccgcgtgcaggcctatgacgggccgatttatattgccgatgccgcgctgttcgtcaaagccacccagccgcagctgggcatcagtgacccctatcagcttaccgaagcgcaatatcaggcggtactcaaggtgctgcgcgatcagcacgccctgattcatcgctactggcacgataccaccgtacagatgagcgattttaaaaacgaaggcgtcgtggcctccagcgcctggccctatcaggccaacggtctgaaggcggaaggtctgccgattgcgaccgttttcccgaaagagggcgtcaccggctgggcggataccaccatgctgcatagcgacgcgaaacacccggtttgcgcctataaatggatgaactggtcgctgacgccgaaagtgcagggggatgtcgcggcctggtttggttcgctaccggtggtacccgaggggtgcaaagccagcgcgctgctgggggacaaaggctgcgagaccaatggttacaacgaatttgccaaaatcgcgttctggaaaacgccggtagcggaaggcgggaaatttgttccctatagccgctggacccaggattacattgcgattatgggcggtcgttaa

SEQ ID NO: 197920 - DNA, 1413 bp, Klebsiella oxytoca
atgaaaaagtaccagcagctggcgcagcagattaccgaacagattggccttggggtgtggttacccggcgaccggctgccctcactgcgggaacaggtggtcagcagcgggatgagtttcatgaccgtcagtcacgcctaccagctgctggaaagccagggccggatcattgcccgcccgcagtccggctattatgtcgcgccgcagccgatcaaacagcgccagcctgagccgcccgcccaggtgacgcgcgatgagtccgttgatatcaacacctacattttcgaggtgctgcaggccagccgtcaggcgtccatgctgccctttgcctccgcttttcccgatccgcgcctgtttccactgccgcagcttaaccgctctctggcgcaggtcagcaaaaccgccaccgccatgagcgtgattgaaaacctgccgccggggaatgatgaactccgccatgccattgcccgccgctacgcgctgcagggaatgaatatctcgccggatgaaatcgtcatcaccgccggagcgctggaggcgttgaaccttagcctgcaggccgtcactgaaccgggcgattgggtcgttgtggaaaacccctgcttctacggggcgctgcaggcgctggaaaggctgcgcctgaaggcgctgtcggtggcgaccgatgtcaaagagggcattgacctcgacgcgctggagcaggcgttgcagaattacccggttaaagcctgctggctgatgaccaacgggcaaaacccgctcggctttacccttagcgcggagaaaaaaacgcagctggtcgcgctgctggcgcgctacaaggtgatgctgattgaagatgatgtttacagcgagctctatttcggccgcgagaaaccgctgccggcaaagtactgggatcgcgacgatatgacgctgcactgcagctctttttccaagtgcctggtccccgggttccgcattggctgggtggcggcgggcaggcacgcccgacgcattcagcagctacagctgatgagcacgctctcaaccagttcacccatgcagctggcgctggtggattacctttcgaccaagcgctatgacgcccatttgcggcgtttgcgccgccagcttgccgagcgcaagcagctggcctggcaggcgctgctgcgccatctgcccgcggaggtgaaaatccatcatagcgacagcggctattttctctggctcgagcttcccgccgggagcgacgcgggggagctgagcgcccgcgcgctggcgtataatatcagcattgcgccggggaaaatgttctccacctccgccagctggaccgcattttttcgctttaataccgcgtggggctggggagaaagagaggagcagggggttaagcggctgggcgaactgattcgcgagatgctggcgtag

SEQ ID NO: 197921 - DNA, 1398 bp, Klebsiella oxytoca
atgttcggtcttgatgcattccacctggcgcggatccagttcgccttcaccgtgtcatttcatatcatcttccccgccatcaccatcgggttagccagctaccttgcggttctcgaaggcttatggttaaaaaccaaaaacccgacctggcgctcgctctaccacttctggtcgaagatcttcgccgtcaacttcggcatgggggtggtctcaggtctggtcatggcctatcagtttggtaccaactggagcggattctccgagtttgccgggagcattaccggcccgctgctgacctacgaagttctgaccgccttcttccttgaagccggattcctcggcgtcatgctgttcggctggaaccgcgtcgggccgggcctgcacttcttcgccacctgcatggtggcgctggggacgataatctccaccttctggatcctcgcgtccaatagctggatgcaaacgccgcaggggtttgagatcgtcaatggccaggtggtgccggtggactggttcgcggttatctttaacccgtcgtttccctaccgcctgctgcatatgtcggtggcggcctttctcagcagcgcgctgttcgtcggcgcatcggcagcctggcacctgctgcgcggcaacaacacgcccgccgttcgcgcgatgttctccatggccctgtggatgacgctgattgtcgccccggttcaggccatgattggcgatatgcacgggctgaatacgctcaagcaccagccggcgaaaatcgccgctatcgagggtcactgggagaatatccccggagaacccaccccgctgctgctgttcggctggccggatatgcagcaggaacggacgcgctatggtctggaaatcccggccctcggcagcctgatcctcacccacagcctggataaacaggttcccgcgctgaaagagttcgcggcggaagatcgccctaacgccaccatcgtgttctggtccttccgtctgatggcctgtctcggcatgctgatgatcctgctcggcgcgctggccctgtggctgcgctatcgcggtcgcctctatcactcccgaccctttttacgctttgcgctatggatggggccatcagggcttatcgctatcctcgcgggctgggtgaccaccgaggtgggccgccagccgtgggtcgtctacggcgtacagcgtaccgcagatgccgtctccgctcacggcgacctgcatatgtccatcagtctgctgacgtttatcgtcgtctacgcttcggtattcggcgtcggttatagctatatgctgcgtctgattcgcaaagggccgcaggacgctcagccgcctggcgccggtacgcctgcccgcccgctttccgccgcaacggaccatgtacagcagaaggagtcctggtaa

SEQ ID NO: 197922 - DNA, 1011 bp, Klebsiella oxytoca
atgggtatcgatttatcggttatttggtttgtcatcatcgtcttcgccaccctgatgtatatcgtgatggacggcttcgacctgggcattggcattttattcagtaccacgcgggacgcggcggatcgcgacgtcatggtgaacagcgtcgcgccggtctgggatggcaacgagacctggctggtgctcggcggcgcggggctgtttggcgcttttccactggcctatgcggtaattatcgatgcgctggcgatccccctcaccctgatgctgatcgggcttattttccgcggcgtcgcttttgaattccgctttaacgcgacgccatcgcaccgcccgttctgggatcgcgcctttatgggcggttcgattctggccaccttcacccaggggatggttgtcggcgcggtgatcaacggcttcacggtcagcggccgcagcttcagcggcggggtgtttgactggtttacgccgtttaccctgttctgcggcctgggactgtgcattgcgtatgcgctgctgggcgccagctggctggtgatgaagagcgagaatgcgctccaccgcaatatgcgcgtgaccgcgcgcggtttgctgctggcgctgctggcggtaattgtcgccatcagcatctggaccccgctggcgcagacggccatcgccgagcgctggtttagcttgccaaatctcttcttcctgctgccggtaccgctgctggtcgcggcgataagcgcctggctgtggcgagcgctgcgcaacagcgccagccacctgctgccgtttgtcctcacgctggggctgatctttctcggctttagcgggctgggaatcagtatctggccgtatattattccaccgggcatcaccctctggcaggccgccgcgccgccgcaaagccagggctttatgctggttggcgcgctgcttattctgccggtgatcctcggctacaccttctggagctactacgtttttcgcggcaaagttcaacacggcgaggggtatcactga

SEQ ID NO: 197923 - DNA, 126 bp, Klebsiella oxytoca; identical to SEQ ID NO: 188933

SEQ ID NO: 197924 - DNA, 234 bp, Klebsiella oxytoca; identical to SEQ ID NO: 188932

SEQ ID NO: 197925 - DNA, 1983 bp, Klebsiella oxytoca
atggataacgacgagcgtatgcgcctgcaaaaccatcatcttgaactactgagtcctgcccgcgatgccgggatcgcccgtgaagcgattttacacggcgcggatgcggtctacatcggcgggccgggctttggcgcgcgccacaacgccagcaacagcctgagcgatatcgccggtctggtaccgtttgcccatcgctacggcgcgaaagtgttcgtgaccctgaacaccattcttcatgatgatgagctggagccggcgcagcgcctgataaccgacctgtatgaaaccggcgtcgacgcgctgattgtccaggatatgggggtcatggagctggatattccgccgattgagctgcacgccagcacccagtgcgatatccgcagcgttgagaaagcgaaatttctctccgacgtcggcttcagccaaatcgtgctcgcccgcgagctgaatcttcagcagatcaaagcgatttacgataacaccgacgcgaccattgagttcttcatccacggcgcgctgtgcgtggcctattccggccagtgcaatatttcccatgctcagaccgggcgcagcgccaaccgcggcgactgctcgcaggcctgccgtctgccctataccctgaaagatgaccagggccgcgtggtggcgtatgaaaagcacctgctgtcgatgaaagacaacgatcagaccgccaacctggccgcgctgatcgatgccggggtacgttccttcaagattgaaggccgctacaaagatatgagctatgtgaagaacatcaccgcgcactatcgccagatgctcgacgccattattgacgatcgcggcgacctggcccgcgcctcggcggggcgtaccgaacacttctttgttccgtcaacggataagaccttccatcgcggcagcaccgactattttgtcaacgcgcgcaaaggtgatattggcgcgtttgactcgccaaagtttattggtctgccggtgggggaagtcctgaaagtcggtaaagattttctcgacgttgaggtgagcgaaacgctgaccaacggcgacggcctcaacgtgatgatcaaacgtgaaatcgtcggctttcgcgccaacacggtggagaaaaccggcgaaaaccgctatcgcgtatggccgaacgagatgcccgcggatttacacaaagtgcgtccgcaccagccgttaaaccgcaacctcgatcataactggcagcaggcgctgctgaaaacctccagcgagcgccgcatcgccgtcgatatcgaactgagcggctggcaggagcagctggtcctgacgatgaccagcgaagagggcgtgagcgtcacccacacgctggacggcgagtttgccgaggcgacccaggcggagaaagcgctggcgaaccttcgcgatggcgtggcgaagctcggccagaccctttactattcgcgcaacgttgagattaacctgcccggcgcgctgttcgtgccaaacagcctgctgaaccagctgcgccgtgaaacggcggaaatgcttgatgatgcgcgtctgaaggccgtggtgcgcggcagccgcaagccggtttcggtgccgccgccggtctatccggaaacgcatctgtcgtttctggctaacgtctacaaccacaaagcgcgcgagttttatcaacgctacggcgtgcagctgatcgacgccgcctatgaagctcatgaagagaagggcgacgtgccggtcatgattaccaagcactgcctgcgctttgccttcaacctgtgtccgaaacaggccaaaggttcgattaaaagctggaaagcgacgccaatgcagctgatccacggcgatgaagtgctgacgctgaaatttgactgccgcccatgcgaaatgcacgtggtcggtaagataaaaaaccatatcctgaaaatgccgctgccgggcagtatcgtggcgtccgtgagtcccgatgagctgatgaaaaccctgccgaaacgcaagggcgcctga

SEQ ID NO: 197926 - DNA, 531 bp, Klebsiella oxytoca
atggatattgcgcaacacctgtcggcaacgttaaaaacgctgcgccagcagcgcggctggagcctgtcgcgcctggcggaagagaccggcgtgtcgaaggccatgctgggccagattgaacgcaacgaatccagcccgacggtagcgacgttatggaaaattgccaccgggcttaacgtgccgttttccgcctttatcgttgccgatgaggccggtgaaccgacggcatttgatccccagcagcaggccatggtggtcacgccgcttttcccttgggacccggtgctgcgcttcgatcacttctccatcaccctggccccgggcgcgctgagtgagtcaacgccgcatgagcaaggggttatcgaacatgtggtggtgattagcggcgtgctggatctttgcctgcaggacagctggcaatcgctgcagcccggagaagggcggcgtttcgccggcgatttagcgcacgcctatcgcaatagcggcgcgcagactgcccattttcattcgctgatccactacccgaaataa

SEQ ID NO: 197927 - DNA, 1167 bp, Klebsiella oxytoca
atgcgctctttcactctcccttttccgagtctgctcgccggcttcgtcgccgtgctggtcggctatgccagctctgccgccattatctggcaggcagcggcggcggcaggcgccgatgctgcgcaaatcgccggctggatgaccgccttaggtctgggaatgggcatcagcaccctggccctcaccgtatggcgaaaggtgcccatcctgacggcctggtcaacgcccggcgcggcgctgctggtcagcggcctgcagggggtcacgctctcccaggcggttggcgtctttatttttgccaatgccttaatcgtgctttgcggcatcactggcatatttgcccggctgatgaagattattccccattcgctggcggcggcgatgctggccggcatattgctgcgctttggcatgcaggctttcgccagcctgcaggctaatctgctgttatgcggcagtatgttagccgtatggttactgtgcaaagcctggcttccccgcttcgcggttgtcgccgccctgctgacaggaagcgcggtggccggattgagcggagaagtgacaacgtcacaaataagcttcagcgttgtcgccccttcctggatcgcccctgaatttacgccagcgctgttgatcagcgtcggtataccgtttttcctcgtcaccatggcgtcgcaaaacgcccccggcttcgccaccctccaggcctcgggctatcgggtccccgcttcaacgcttattgtcgccaccggcggcctggcgctgctgctgtcgcctttcggggtctactcgatctgcatcgccgccattacggccgcgatttgccagagcccggaagcccatccggacccgcaaaaacgctggctcgcggcggcggcggcgggcgtgttttatctgctggcggggatatttggcggctcaatcacctcgttgatgtcggcgctgccgatagcgtgggtccagatgcttgccgggctggcgctgctcggtaccatcggcggcagcctgtttcaggcattgaatcatgagagtgagcgcgatgcggcggtagtaacgtttctggtcaccgccagcggcgtgacgctggccggtatcggctcagcgttttgggggctggttctcggcggcgtcagctacgttttgctgtcaacgctgcgccgcgcgtag

SEQ ID NO: 197928 - DNA, 876 bp, Klebsiella oxytoca
gtgaaggctatggcttacgggactttcgaaacattgcgtcaaaaaaatgccgtgctgcgggggacggtgaacctcaactccggtattcagctggcggcgtggtataacaatcttgataccatcacggtacaaagcgaccaccataccctgagcctctatattgccgatggctacgaaagctaccaaaaaactccccacggctggaaaaacggcggcgggccggatcgtttttgcctgatgccgaaaggcgatgagagcacctgggatatccgcggcgatctctcttttgtgcatctttactgcaccgatgaacacctgcgccgggtaggcgagcagatttgggaccgcagcccggcctcgttcacgctgcaggagaaaacgttttccagcgatgacaaaatcaccgccgtctaccgccagtttctcctcgacaacgactggcagcagcaggcgaatcagctgacgttgagttcggccagcacgctgctgctcacccacctgattcagcactattcgaacgttcagtggcgtttaccgaccgtgaccggcgggctggcgccgcacgtcttgcgcaatctgctggcatggattgaggagaacctcgaccagccgctcactcttgccgatctggcgcaggaagcggcgttaagcgaataccattttgcgcggatgtttcgccagtcgatgaagatggcgccgcatcagtacgttatgcagcgccggatggttaaagcgcaggcgctgattagccagagtcggctgccgttaaccgatatcgccatggcctgcggttttagcagcgccagccacttcagcaaccgggtgaaaagcgccaccggcctgacgccctcgcagctacgcgcggcgcagcgttga

SEQ ID NO: 197929 - DNA, 918 bp, Klebsiella oxytoca
ttgaacgcattactctacgggttggtcgtggttatctggggcaccacctggattgctatctttttgcagcaggggccggttgccgcgccggtgtctattttctggcgcttcgccgtcgccagcgtcgcgatgttgaccattttgctggttacccgccgcctgcggccgcttgccgcgcgcgaccatctcttttgcctgctacagggctgctgcgttttctgctttaatttctggtgtttctataccgccgccgcgtatatcaataccgggctggagtcggtgatcttctccatggcggtgttgtttaacgcgatcaatagctttctcttctatcgccagcagcctccgggccgtttctggctggccgccgcgctggggctggcggggatcgtgacgctattctgggatgatttatgggccagcggcctgaacgcctcgctcctgctgggtattgccctcagcgcattgggcacctatggattttcgctcggcaatatgctcagcatccgccaccagcgccgcggtctggagacgttgaccaccaacagctgggccatgctttacggcaccctggtcatgggcgcgatcgcgctggttcgcggtgataatttcgcgccgcagtggaccctcagctatatgggcgcgctactgtatctcgccgtgtttggctcggtgattgcctttggcgcctattttacgctggtggggcgaatcggcgcgggtaaagcggcatacagcaccctgctgtttccactcgtcgcgctgactatttcgactttttatgaagattacgtctggcacagtagcgccgtggccggactggcgctgatcctggtcggaaatctggtaatgttcgctcgcccggagcagtggctgctgcggcgcaggctggcctgggttcgctcggatcgctgctga

SEQ ID NO: 197930 - DNA, 1593 bp, Klebsiella oxytoca
atgcaacgcagattcacgacgcttgctctggcgttagcggccctgacggccagctcggccattagcgcaaaaacgctggtctactgttcagaaggatcgccggaaaactttaacccgcaactctacacctccgggaccagcgtggacgccagcgcggtgccggtctataaccgactggtcgatttcaaagccggcaccacagaactggtgccgagcctcgccgaaagctgggaagtcagcgaagatgggaaagtttatacttttcatttacgcaaaggcgttaaattccagagtaataaatattttaaacccagccgcgattttaatgccgacgacgttattttttcgtttatgcggcaaaaagatcctcaccatccttatcataatatctccagcggcaattactccaattttgaaagcctcgaatttggccagttaattaccgcgattgataagcctgatgaatatacggtgcgtttcacgctggcccatgccgaagcgccctttgtggccgatcttgcctggtatttcgcttctattttatcggcggaatatgccgatgcgatgctaaaagccggcacgccagagcgcgtggatatggacccgattggtaccggacctttcaaactcgcgcaatatcaaaaagattcccgaattcttttcaccgcgttcccggaatactggcaggggaaggcgcatatcgatcgtctcatttttagtatcacgccggacgcctcggtgcgctacgccaaactggagaaaaacgagtgccaggtgatgccgttccccaatccggccgacctgccgcgaatgaaagagaacaacgcgatcaacctgatgagcaaagcgggccttaacaccggtttcctggcgtttaacacccaaaaagcgccgctggacaacgttaaggtgcgtcaggccttagcgatggcgatcaataaaccggcgatcattgaagcggtgttccacggtaccggtacggcggcgaaaaacctgctgccgccgggcgtatggagcgcggatagccagctgaaggattatgactacgacccgcagaaagccaaagcgctgctggcggaatcgggggttgcggggccaattaccatcgatctgtgggcgatgccggtgcagcgaccctataacccgaacgccaaacgcatggccgaaatgatccaggccgactgggcgaaaattggcgtgcaaacgaaaatcacaacctatgagtggggtgaatacttaaagcgggtgaaggatggcgaacatcaggcggcgctgatgggctggacgaccgcgaccggcgacccggataacttcttcggcccactctttacctgccagtcggcgaacggcgggtcaaactcggcaaaatggtgctatcagccgtttgataaaattatcgccgaggcaaaatcgataaccgatcgccaaaaacgcgaagcgctctatcgccaggcgcagcagatgatgcatgaccagatgccggcagtcatgattgcccactcgacaatatttgaaccggtgcgtaaaaacgtgtcaggctacgaaatagacccctttggcaagcatattttttatcaggttgatatcagataa

SEQ ID NO: 197931 - DNA, 1230 bp, Klebsiella oxytoca
atgtcatcagccctggccagtcaattaacccaacgcttctttcgctacctggcgataaccagccaaagcgacccgcgagccacgacgctgcctaccaccgccgggcaacacgcgatggcgcaggcccttgcggatgagctacgccagctggggctggatgagattgtgattgacgagcacgccaccgtcacggcggtgaaaaaaggcaacgtcgcaggcgcgccgcggattggctttattacccacatcgataccgttgacgtcggtttgtcgccggatattcatccacaaattctgcgttttactggtgaagatctctgtttgaacagggataaagatatctggctgcgcgttgcggaacatccggaaatcctcgcttatcccaatgaagagattattttcagcgacggcaccagcgtgctcggggcggataacaagtccgccgttacggtggtgatgacggtgctggaaaacctgacggcggaacaccgccacggcgacatcgtggtcgcgtttgtgccggatgaagaagtgggcctgcgcggcgcgaaggcgctggatctcgcgcgctttgccgtcgattttgcctggaccatcgactgctgcgagctcggcgaaatcgtctatgaaaactttaacgccgccgcggcggagattcgctttaccggcgtgaccgctcaccccatgtcatcaaagggcgtgctggtgaacccgctgctgatggccaccgattacatgagccatttcgatcgccagcaaacgccggagcataccgccggacgcgagggctacgtttggtttaacggtatccagggcgatcagaacagcaccctgctgcaggccagcattcgcgatttcgacctcgaaagttttcatcgccgtaagcagcaaattagcgaggtggcgcagaaaatcgccgcgcagtatccgaccggtaaggtggaatttcacatcagcgacacctatagcaacatcagcaatgccatcggcgaagaccgccgcgccgttgatctgatgttcgaagcgatggaaagcttaggcattacgccgaaaccgacgccgatgcgcggcggcaccgacggcgcggccctgtcggcaaaaggcgtattaacgcccaacttctttaccggcgcgcacatcttccactcgaaatttgagtttctgccgctgcgcgcctttgaggcctcttatcagaccgcattacagctctgcctgttagcggcgcgttaa

SEQ ID NO: 197932 - DNA, 597 bp, Klebsiella oxytoca
atgacgcttcgtgacgaaaactactttaccgataaatacggcatgacccgcacccactctgaggtgctgcacgccgccacgctgatcgcgccgggcaaggcgctggatctgggctgcggcaacgggcgcaatagcctctatctggcggccaacgggtttgatgtcaccgcgtgggataaaaatccggccagcatcggaaatcttgagcgcattcgtcaggcggaagggctggagaatctgcggacggcgattaaggaccttaacgccctcagctttgacggcgagtatgactttattctttcgaccgtggtgatgatgttcctcgacgcgaagaccatcccgggtctgattgctaacatgcagcgctgcaccagacccggcggctacaatctgattgttgcggctatggataccgacgattatccgtgcagcgtcggcttcccgttcgcgtttaaaccgggagagctgcgcaatgattatgaaggctggacgttactcaaatataacgaagacgtcggtgaactccaccgcaccgacgccagcgggaaccggattaagctgcgtttcgccacgatgctggcgcgcaaaccggcttaa

SEQ ID NO: 197933 - DNA, 999 bp, Klebsiella oxytoca
atgaataaagagcagcgcgtgagccgggtgctgaatctcccggcgggctattttggtatggttctgggcattatcggcatgggcttcgcctggcgctacgccagcacgatctggccggtgagccggacaatcggcgacggtctggttatcgtggccaccctcgtctgggcgctgctggcgctggcgtttatcagccgtgcagtccgtttcccgcacagcgtactgcaggagatgcgccatccggtggccagcagttttgtcagcctgtttccggcgacgaccatgctggtggccatcggctttgttccctggctgcggccgctctcgctggtgttattcgcgattggcgtagtgctgcagctaagctatgcggcctggcagagcgccgggctatggcgggggaagcatcccaatgaggcgaccaccccgggtctctatctgccgacggtggcgaataactttatcagcgccatggcctgcggcgcgctgggctttaccgacgccggactggtgtttcttggcgccggcttattctcctggcttagccttgaaccggtgattctgcagcgcctgcgcagcgacggcgaactgccgatggccatgcgcaccgccctcggcattcagctggcgccggcgctggtggcgtgcagcgcctggctgagcgtgaacggcggcgaggcggataccttcgctaagctgctgttcggctatggtctgctgcagctgctgtttatgctgcgcctgatgccgtggtacctgcgccagccgtttaacgcctcgttctggagcttctcgttcggcatctccgcgctggcgaccaccggcctgcatctcggtcatcagcatccggacggctttttccatactctggcgttcccgctgtttctgtttaccaatctgatcgtcggcctgctgctggttcgtaccttcttgctgctggtgcgcggtaaactgcttattcgcgttgaacgcgacgcattattaaaaaataaggattaa

SEQ ID NO: 197934 - DNA, 981 bp, Klebsiella oxytoca
atgcgcaaatattacctcagtgagaaggttcgccagtttcactatgaagccgacggaaacaaacatagtgtcaatctgcggcaaattgtcgccttacgcgatttcgctgacgtgaagcgcggcgatgaaggcggctggctggacaatgaagcagccctgagccacgaaggcgagtgctggatttatgacccgaatagcgcggtgtttgccggtgcgaaaatcgagggcaatgcccgcttaaccggcgagtgcattatcagccatggcgccatcgtcagcgataacgcgcgactggacagcgtgcaggcaagccactgcgcgcgcataagtgacaacgtcaccgtttcgcattcgcagattcggggttattgtcacctggccgacaatgcgcagatcctcccccactcgcttattatcgccgcccagggtctgaccgccgacagcgacaaaatcctgcgcatttatcagcgggcaacggtcagcgcttcgcgcatcgttcaccaggcacaagtttacggcgacgcgtttgtcgaacacgcgtttgttgagcatcgggcggaaatcttcgattgcgcgcggctggagggtaacgacgaaaacgacgtctgggtctgcgataacgcgcgagtttatggccacgcgaggattatcgccgggcgggaagaggacgccatccccaccctgcgctacagctcgcaggtggcggagcacgcggtggtcgaaggcaactgcctgctgaagcatcgggtgatggtcggcgggcatgcgcacctgcgcggcgggccgattctgctggacgatagcgtgttaattgaagggcatgcggtgatttgcggcgatgtggtgattgaacatcaggtgacgatcggcgacagggcgcgaattgaagccagcgcgggcgacgccatttctatcagaggggagaaagtgataaacggcgacgaactttttacccgcacgcccattgtcggctttctataa

SEQ ID NO: 197935 - DNA, 585 bp, Klebsiella oxytoca
atgactgacgaaaacgcgcctgcgagagaaactatccccgtcaccgagtcgctttctctgcgcgctgtggatgaaagccacgtcgctgagctgcatcagctggtgatcaagaaccagcgctggctccagcaatcgctgagctggcccgctgaagtcagtcacgaagacgaaacccgccgccacgtgcagggcaacgtgatgctgcaccagcgcggttacgccaaaatgtttttgctctttctgcgagaagagatcgtcggcgtgctgtcgtttaaccagattgagccgatcaataagaccgcatacatcggctactggattgatgaaagccaccaggggcaggggctactttctcaggcgctgcaggcgctgatggacgcttttgcccgcagcgggacggttcgccgcttcgtgattaaatgtcgggtagcaaaccagagaagcaatcaggtcgccctgcgtaacggtttcaccctcgaagggtgcctgaagcaggccgagtatctgaacggttcgtacgatgaccagaatatctacgggcgcattattgattgtgacaccgggcaattcccggctcgcggctga

SEQ ID NO: 197936 - DNA, 1656 bp, Klebsiella oxytoca
atgaaccgcagacgttttctcaaatcttccatggctgttgccgccgtatgcggaacgtcaggagttgcctctctattctcgaaagcggccttcgccgaggactcgggaattgccgacggccagacccgtcgctttgactattccgtacttcagtcgatggcccacgatcttgcgcgtcagccctggggcggcgcgccgcgcgatctgccgccaaccctggcaaacctgaccccgcaggcctacaacagcattcagtacgatgctgcgcactccctgtggagtaatatcgaagagcgcaagctggatattcagttcttccacgtcgggatggggttccgccgccgcgtacggatgttctccctggattcacaaacccagcaggcgcgggaaattcacttccgtcccgagctgtttaaatataatgacgccggcgtcgacaccaaacagctggaaggccagagcgatctcggctttgccgggttccgcgtgtttaaggcgccggagctggcgcgccgcgatatcgtcgccttcctcggcgcgagctacttccgcgcggtagacagcacttatcaatacggactctccgcccgcggcctggcgatcgatacctttaccgatacgccggaagagttcccggacttcacctctttctggtttgagaccgtgaaaccgggggctacggtatttaccgtctatgcgctgctcgacagcccaagcgtcaccggcgcctataagttcgtggttaactgtcaggagacgcaggtgattatggatgtggaaaaccacatctacgcgcgtaaagacatcaaacagctgggcatcgcgccgatgaccagtatgttcagctgcggcaataacgaacggcggatgtgcgacactatccatccgcagatccacgactccgaccgcctgtcgatgtggctgggcaacggcgagtgggtgtgccgcccgctgaacaacccgcagaagctgcagttcaacgctttccaggataaaaatccgcgcggttttggcctgctgcagctggatcgcgacttctcccactatcaggacatcatgggctggtataacaaacgcccgagcctgtgggtggagccgcgcaaccagtggggtaaaggggccgtcaacctgatggagatcccgacgaccggtgaaacgctggacaatatcgtttgcttctggcagcccgagaagccggttaaagcaggggatgagctggacttccgctatcgactctactggagcgcgcagccgccggtccgttcgccgctggcgcgggtattggccacgcgtaccggaatgggcggtttcccggaaggctgggcgccgggtgagcactacccggataaatggacccgtcgttttgctatcgattttgtcggtggcgacctgaaggccgcggcgccaagaggcattgagccggtgattaccctgtcgagcggcgaagcgaagcagatagaaattctctacgtggaaccgtttgatggctatcgcatccagtttgactggtacccgacctcggattcgaccgacccggtcgaaatgcgcatgttcctgcgctgccagggggaagcgatcagcgaaacctggctctatcagtacttcccgccagcgccagacaagcgtaactatgttgacgatcgggtaatgaaataa

SEQ ID NO: 197937 - DNA, 1509 bp, Klebsiella oxytoca
atgcagaatccgtctaccccgctggtgaaaacccggcagggcaccctatccggcaccgctgaagagaacatgcatatctggcgcggtataccctatgccgcgccgcccgtcggcgatctccgctggcgcgcgccgcagcctgccgcccgctggcagggcgtgcgccgggcggagagtttctcagcctccagctggcaggatattgagtactgtcgtgagctcggcggcggcgatcccggccgcttttccgaggattgcctctaccttaacgtctggtcgcccgcttcgcgcgcgcagccgctgccggtgatggtctggctgcacggcggcggctataccatcggcgcgggaagcttaccgccctatgacggtaaagccttagcgtcccgtgacgtggtggtggtgacggttaactaccggctggggcatctgggcttttttgcccatccggcgctggaggaagaagagggggagcgcatctataatttcgcgctgctcgatcagatcgccgccctgcagtgggttcaggaaaacattcatgccttcggcggcgatgcggccaacgtgacgctgttcggcgagtccgccggggcgcgcagcgtgctgtcgctcatggtttcgccaaaatcaagagggctgttccataaggcgattattcagagcggctataccttgccggatctgccgcgggaaaaggcgctggccaaagggcagctcatcgcggagcacttctctttaccgcaggccagcgccgaacagctgcgggcgattccggcggacgcgttctggtcgctgaccgcaccgcttaccatcggcccggcgcccattgttggcgatgccgtactgccgcagccgatgctggagactttttttagcgggcgtcagcacccgctgccggtgatgattggctcgaacagcgatgaggccagcgtcatggcggtgtttggcgtcgatatcgccgggcagatccagaagcttcgccgcgaacgccgttttggtctcggtttgattaagctgctctatcccggcgtcaagggcgatgaagcattagggcgtgaagtttgccgcgatatggcctttaccaccctgggttacgtggtgatgcaggcgcagcagcgggtagggcaaccgtgctggcgctactggtttgactacgttgccgaggcggaacaccaaacctatccgcacggcgcgtggcacggtaatgaagtggcgtacgtttttgacaatctggaccttgccgagccggtgcgacagtatgcgaacgatcgcgaccggacctttgccgcccgggttgccgactattgggctagctttgcccgtgtagcgggtaacggctgccacgagctctccgggccggtgcgctggcccgccagcgtgcgcggacgggaccgtctgttgcgcatcggtttgcacaagcgggccggttttaaagtggaaaaccgctttatgcgcgcgcgtctggcgctgtttcggcgggtgatgaagcaccatgtgacgctggattaa

SEQ ID NO: 197938 - DNA, 1344 bp, Klebsiella oxytoca
atggcgaacaccatcacggctgatgagattcgggaaagcttttcgcaggcgatgtcggcgatgtaccagcaggaagttccgcagtacgggacgctactggagctggtggccgacgttaacctggccatactggagaataacccgacgctgcacgaacaactggccaacgccgatgaactggcgcggctgaacgttgaacgccacggcgcgatccgcgtcggtacggcggaggaactggcgaccttgcgtcgcatgtttgccattatgggaatgtatcccgtcagctattacgatctgtcgcaggccggcgtaccggttcactccaccgcgtttcgccccattgatgacgccgcgctggcgcgcaatccgtttcgcgtttttacctcgcttctgcgacttgaacttatcgccaatgaagctttgcgtcagcgggcggcggatatcctttcccgacgcgatatcttcacgccgcgctgtcgtgaactgatcgcgttacatgaacagaaaggggagtttaccgccgcagaggcgcgcgagtttgtgcaacaggcgctggaaacctttcgctggcatcgacacgccaccgtcgatgaggaaacctatcacgcgctgcatgaagagcaccggctgattgccgatgtggtctgtttccccggctgccacattaatcatctgacgccgcgcaccctggatattgaccgggtgcaggcgttaatgcccgagtgcggtatcgcgccaaaagcgttgatagaagggccgccgcgccgcgatgtgcccattttactgcgccagaccagctttaaggcccttgaggaaccggtgatgtttgccggagagcatagaggcacgcatacggctcgctttggcgaaatcgagcagcgcggtatcgccttaacgccgaagggccgcgccctgtacgaccgactgcttggcgaggcgggggtgggcaaagataatctcacccatcagcgtcatctgcaggaggtgtttagcccgttcccggacagcgaattcctgctgcgtcagcaggggctggcgtactttcgctatcgcctgacgcccgccggcgaagcgcaccgtcaggcgtttcgtccgggcgacgatccgcagccgctgattgaacgcggctgggtcatcgcacaaccgattatttatgaagactttttgccggtcagcgccgccgggatttttcagtctaacctgggcaacgagatacagacccgcagccacggcaacgccagccgccaggcctttgaggaggcgctgggctgtccggtctatgatgagtttgccctttatcaacaggcggaagagcgcagtaaacgacgttgcggtctgctgtaa

SEQ ID NO: 197939 - DNA, 741 bp, Klebsiella oxytoca
atgaacgacaaatggtcaccgcgcgaggtcctgcaccgcgactacagcagccatcctcccgcttacgccccgggctataaaaccagcgtgctgcgctcgccgcgcaatgcgctcatttccctgcagaattccctttctgaaatcaccggaccggtgttcagcagcgacgatctcggcgcgctcgataacgacctgatcctcaactacgccaaagacggcctgccgattggcgaaaggataatcgtccacggctacgttcgcgatggatttggccgaccaatgaaaaatacgctggtcgaagtctggcaggccaacgcgggcggacgctaccggcataagaaagatcaatacctggcgcctatcgacccgaactttggcggctgcggacgggtgctgaccgacgaaaacggctactattgtttccgcactatcaagcccggcccctatccgtggcgcaaccaggtaagcgactggcgtccggcgcatattcacttttcgctctccggcgacgcctgggcacagcgcctgatcacgcagatgtatttcgaaggcgatccgctgattaaacagtgtcctattgttaaaaccatcaataacgatgatgccatcaggacattaatcgccgagctggatacccatgccgccgtaccgctggactctctggcttaccgttttgatctcgtgctgcgcggccatcgcgcaacgctgtttgaaaaccgcacgcagggggccgcccgatga

SEQ ID NO: 197940 - DNA, 621 bp, Klebsiella oxytoca
atgaaagattatttacctgaaaccgcgtcacaaaccgccggcccttatgtgcatatcggcctcgcgccggacgccgccggtttccatatctttgagaaaaattttggcccgacgctgacaacggcagacaccgagggcgaacgcattactatcgaaggcagagtcatcgacggctccggcacgccggtgcgcgatgtgctgctggaaatctggcaggccaacgccgccgggcgctataaccatcccgacgaccgacagcagggcaagaagctggatgcggcgtttcgcggctggggacgcagctgctcggacttcaccagcggcgtctggcgcttcgaaaccattaaacccggggccgtggtaggtcgcgatgggcgcaccatggcgccgcacgttaatctgtgggtggtcgcccgcgggattaatattggcctcaacacccggatgtacttttccgacgagcaggatgccaaccaggtcgacccggtgctgaatctgattgaatgggaagtgcgtcgccagaccctcatcgcgcagcgcgaggtccgcggcgcggagatcgtatatcgcttcgatattcacctgcagggcgaaaacgaaaccgtcttcttcgatatctga

SEQ ID NO: 197941 - DNA, 924 bp, Klebsiella oxytoca
atgcaaaaaaatggtcttttcagtcagcgcattcgcttgcgccatctacatactttcgtggccgtcgctcaacagggaacttttgggcgtgcggctgaaaccttaaatctgagtcaaccggctttatctaaaacgctaaacgaactggagcagctgaccggtacccggctgtttgagcgtggacgcctcggcgcgcagctcacgctggtcggcgaacagtttctcacccacgcggttaaagtgctcgacgcgctcaataccgcgggacaggcgctaaaccgtaaagaaggcctcaacagcgatatcgtgcgcatcggggcgctccccaccgccgcgctggggatcctgccctcggtgatcggccagttccatcagcagcaaaaagatatcaccctgcaggtggcgaccatgaataacaccatgctgctggccggactcaaatcgggagaaatcgatatcggtatcggacggatgtccgatccggagttgatgagcgggttgaactatgaactgctgtttctcgaatccctgaagctggtggttcgtccggggcatccgctgctgcaggaaacggttacgctgagtcgggtcatggagtggccggtggtggtttcgcccaaaggtacgctgccgcgacagaacgccgaaaccctgctgcaaagccagggctgcaaaattccgtctggctgcatcgagacgctgtcggcttccctgtcgcgccagctcaccgtcgattacgactacgtctggtttgtcccctccggtgcggtcaaagacgacctgcgccgtgggctgctggccgcgctgccggtgcccacccagggcgcgggcgaaccgataggtattctcacccgagtggacgccacgctcaccgcgggaacacaaaccctgctgagcgccattcgtaaatcgatgcccgtctga

SEQ ID NO: 197942 - DNA, 2373 bp, Klebsiella oxytoca
atggcaactggcaacgcgccgcgaggattcccccgggtcctgcagtggcttctcgccgggctgatgctgatcatcggcctggctatcggtattcttggtgcaaagctcgcctccgttggcgggaccttctattttgcgattatgggcctggtgatggttatcgccgcggtgctcattttccgcagccgtcgcggcggtatcatactgtacgcgatagcgtttatcgcctcgatcgtctgggccattagcgatgccggctggacctactggccgctgttctcgcgcctgttcgcgctcggcgtactggccttccttgccgcgctggtctggccgtttctgtcccggcagccggcgaaaaaagggccggcgtttggcctggcagcggtgctggcggtggtactgttggtcagtttcggctggatgtttaaatcccagccgctggtcagcgccagcgaggcggtgccggttaaaccggtcgccgcgggcgagcagcagaaaaactgggcgcactggggcaacaccacccacggcgaccgtttcgccgccctcgaccagattaacaaacagaacgttgaccagctgcaggttgcctgggtcgcccacaccggggatatcccgcagagcaacggctccggcgcggaagaccagaatacgccgctgcagattggcgatacgctttacgtctgtacgccctacagcaaggtgctggcgctggatgtcgatagcggtaaagagaaatggcgctatgattcaaaagccaccgcgccgaactggcagcgctgccgcggcttaggctattacgaagagagccaggcccaggcttcccctgccgccgacacgcagccggccgcctgctcccgccgcctgttcctgccaaccaccgacgcccgtctgatcgctattgatgccgataacggtaaactgtgcgacgccttcggcgaccacggtattgtggacctgagcgttggcatgggggaaatcaaagcgggttactaccagcagacctccacgccgctggtggcgggtaacgtggtcgtggttggcggtcgcgtggcggataacttctccaccggcgagcccccgggcgtcgttcgcgcctatgatgttcataccggcaaactggcgtgggcatgggatccgggcaacccgaacctgaccggcgaaccgccggccggacagacctacacccgcggtacgccgaacgtctggtcggccatgtcctatgacgcgaagctgaatctgatttatctgccgaccggtaacgcaacgccggacttctttggcggcgaacgtaccgcgctggacgataaatacagttcctccatcgtggccgttgacgccacgaccggccaggtacgctggcattatcagaccacccatcacgatctctgggatttcgacctgccttcccagccgctgctgtacgatctgcctgacggtaaaggcggcaccacgccggtgctggtgcaaaccagcaagcagggcatgatctttatgctgaaccgcgccaccggtgaaccggtcgccaaggttgaggaacgtccagtccccgcgggcaacgtcaagggcgagcgctactcgccgacccagccctactccgtcggcatgccaatgatcggcaacgagacgctgaccgagtcggatatgtggggcgcgacgcctgtcgacctgctgctgtgccgcatccagtttaaagagatgcgtcaccagggcgtcttcaccccgccgggcgaggatcgttcgctgcagtatcccggctcgctgggcgggatgaactggggcagcgtgtcggttgacccgaacaacagcctgatgttcgtcaatgatatgcgccttggcctcgccaactatatggtgccgcgcgccaaagtggcgaaggacgccagcggtatcgaaatggggattgtgccgatggagggcacgccgttcggcgccatgcgcgaacgtttcctgtcgccgctgggcattccgtgccagaaaccaccgttcggcactatgtcagcggttgatttgaaaaccggcaaactggtgtggcaggttccggtgggcaccgttgaggacacaggcccgctggggatccgcatgcatatgccaatccctatcggtatgccgacgctgggcgcctcgttatcaacccagtccggcctgctgttcttcgcgggcacccaggacttctacctgcgcgcgtttgataccgccaacgggagagagatctggaaatcgcgtctgccggtcggcagccagtccggcccgatgacctacgtatcgccgaaaaccggcaaacagtacatcatcatcaacgcgggcggcgctcgccagtcgccggaccgcggcgattatattatcgcctacgcgcttccgcagcagaagtaa

SEQ ID NO: 197943 - DNA, 276 bp, Klebsiella oxytoca
atgaaaagttcaccctgccgcctgctcgcaggcaccttcatgttagccgccgcctcggctcaggcgttaaaagccccggaagtggacctgcgcgatccgacgatttgggaagagaaagcggcgtctccgctcaccgccaacccacagccctgcgaggtgttcagcggcccgcactgcgcggtgtgggaagatgagaaatcggatattcaacgtgaacgggagcggcgggaacagcggcgatggcagaatggttatgaaaacctgcggcgggagtaa

SEQ ID NO: 197944 - DNA, 1119 bp, Klebsiella oxytoca
atgaaatcacgtgcagccgtcgcgtttggcccaggccagccgctttcaatcgttgagattgacgtcgcgccgccgaaaaaaggcgaagtgctggtcaaaatcacccataccggcgtatgccacaccgatgcctttaccctctcaggcgacgatccggaaggcgttttcccggcggtactgggccatgaaggcggcgggattgtcgtcgaagtgggggaaggcgtgaccagcctgcagctgggtgaccacgttattcctctgtataccgccgaatgccgcgagtgtaagttctgtaaatccggcaaaactaacctctgccaggcggtgcgcgccactcagggtaaaggcctgatgccggacggcaccacccgtttctcctacaacggtgaaccgatttatcactatatggggaccagcaccttcagcgaatacaccgtagtggccgaaatttcgctggcaaaagttaacccgcaggcgccgctggataaagtctgcctgctgggctgcggcgtcactaccggtatcggcgcggtgcacaatacggcgaaagtaaaagagggcgataccgtcgccgtcttcggcctcggcgggatcggcctggcggtgatccagggcgcggtacaggcgaaagccgggcgcattctggcggtggataccaacccggaaaaattcactctcgcgaaagagatgggcgcgaccgactttatcaacccgaatgattacgataagccggttcaggatgtgattgttgaactcaccgacggcggcgtcgactttagcttcgagtgtatcggtaacgtcaacgtgatgcgcgcggcgctggagtgctgccacaaaggctggggcgaaagcgtcatcatcggcgttgccggcgcgggccaggagattaaaacccgcccattccagctggtcaccgggcgcgtctggcgcggctccgcgttcggcggcgtgaaagggcgtacccaactgccgggaatggttgaagaggcgatggcggggaaaattcgcctcgatccgtttattacccaccgtatgccgctggatcaaatcaacgaagcgtttgatctgatgcatgaaggtaaatccattcgtaccgtcattcatttcggcgagaattga

SEQ ID NO: 197945 - DNA, 276 bp, Klebsiella oxytoca
atgccacattcacctgaagataaaaagcgtgccctcagtcgggtaaggcgcatccgtggccaggttgaagcgctcgagcgggcgctggaatccggcgaaccctgtatgaccattctgcaacaaatcgcctcaattcgcggcgccgccaacggcctgatgggagagatggttgaaattcacctgcaggatgaactggtcagcggcgaaacgacgccagaccagcgcgccgccagaatggcggaagtcgggcatctgctacggtcctatttaaaataa

SEQ ID NO: 197946 - DNA, 528 bp, Klebsiella oxytoca
atgcgcgataaatattctggcctgcaaattggcatccactggctggtgtttcttttagtgataggcgcttacgcggcgatggagctgcggggctttttcccccgcagcgcgcggcccgtcatcaatatgattcacgtctcctgcgggatttctatttttgttctgatggtggtgcgcctgttggtgcgtctcaaatccccggcgccgccaattgtgcctaagccgtcgccgatgatgaccggcttcgcgcatctggggcatctggttatctatctgctgtttatcgcgctgccggccatcggcatggtcatgatgtactaccgcggtaacccgtggttcgcgtttggcctgaccatgccgcacgcggcggaaagcaactttgaactggtggataccctgaaagcgtggcacgagctgctggccaataccggctactttatcattggcctgcacgcgctggcggcgctgttgcaccactacttctggaaagataacacgctgctgaggatgatgcctcgcaggcgttaa

SEQ ID NO: 197947 - DNA, 243 bp, Klebsiella oxytoca
atgttcgtagagctgatttatgacaagagaaatttcgagggattggccggcgctaaagagatcattcttaatgaactgacgaagcgagtgcatcgcatttttcccgatgccgacgtccgcgttaagccgatgatgaccctggcttccatcaatactgacgccagcaagcacgagaaggagcagatcagccgcgccgtgcaggagatgttcgaagaagccgatatgtggatgcaggaagattaa

SEQ ID NO: 197948 - DNA, 165 bp, Klebsiella oxytoca
atgaacactttcagcataatagccatccccctctttgccgcagcggtggtaatgttgacgttgggggcgacccggaaaaaccgtgcctgcgctatcgtcggcggcgttttgatggccgcgaccgtggttaacgcggtgaccggcatggcgctacagggcgggtaa

SEQ ID NO: 197949 - DNA, 198 bp, Klebsiella oxytoca
atgaagaacaaagaagagcaaacggggctgattggtcttgccattggcgcggcggttattggcctggtctctggccagaagccaattaaccgggaaagcattgttgaagaactggtgagactgggtagacagaagggggatggcatcgaggacgagatttttatgcaggcggcaacgctggtgcgcaagggggtataa

SEQ ID NO: 197950 - DNA, 204 bp, Klebsiella oxytoca
atgatcacttacgatcgtaaccgcaatcctattactaacggcagccaggtgatgattaacgggacgggtaaaaccggtaaaattatcgctatccacgcgacgggcttaacgccagcccagctgcgccgtaataagacagtcgaagtggaagggacggaaggtaagttcgagcccgttgaactgatccgccttggtctccactaa

SEQ ID NO: 197951 - DNA, 972 bp, Klebsiella oxytoca
ttgaaattagccggactccatcccgatgaactgcgtcgcctgcaatcgctgcgggcatccggattacttaatagcggaaaagaagagcgtttcgatcgcctgacccggcttgcgcgtacgctctacgatctgccggtggcgtcggttagcctcgtgggagaaaataccctgcatgttaaatcctgcgccggacttgaagtcgataccctgccgagggatatcacgttctgcgcgcatactattctgcagaccgaccctttaatcgttaatgacctgcagcaggatctgcgctttcacgataacccgctggtcacggaagcgccttttatccgcttttatgccggatacccggtacagctgcctgacggcgcgacggtcggcgcgttctgcctgatggaccacaagccgcgcgccttttccgtgcatgagatacaaatattaagcgacctggccgccatcgttgaagatgaattcaaggtgctcgacgcggcgaccgccgatgagctgacggggctgttcaaccgccggggttttatgtcgttagcggagtacgcgctgctgacggccaggcggcgcaatgaaccggcgagcctcgtatttatcgatctcgatcgctttaagctgattaacgatacctggggtcatgaacagggggataaagccctgacggcgatggctgatttgatgaaagccaccttccgggagtcggatatcattgccaggcagggcggagatgagtttattatcctgcttgctaatactgcccagcaggcggcgggcatcgcgatggcgcagctaagcaataacgttgctgaatataatcaacaggcgggcaatccgtggcagctggccttttcctggggctgcgttgaatacgaccctgcaacgcatcatagcctcaatgagatcgttgcggtggcggaccggcgcatgtatcaggcgaagaccagccatggcgccgagcgccggtag

SEQ ID NO: 197952 - DNA, 927 bp, Klebsiella oxytoca
atgatgaatattatgcatcctgcgcttcgccgtcttgatttgaatctgctgccggtatttgaggcggtctaccgctatcgttcggtccgcctggcggcggaagagctggcgatgagcacatcagcgttaagccacgcgctatccagactgcgcgccgcgctcaacgacccgcttttctatcgcgaaggtcatcgtatgtgccccagcgtttacgccacccagctcgcgccttccatcgcttcggcgctcaagtttttagatcaggagcttactccgcagccgaagtttgtggcctcagccagtaccgactgcctacagatagcgatcacggacttcaccgcgcagtgcgttttcccgacgctgatgcccaggctacagcagcaggcgccaggcctgcgtttcgaactgcgctatctgccgcacagcccggcgctgacggaactgctggccggcgaggtggatttagcgctgggatttagcgcgctggatgaagcagagcatccggagctggatgagatttgctggctgaaagatgattatgttgcgataagcagcgccaggcgatcccggctcacgctggcggactacctggcagcacggcatctggtagtcaccccgtggaatgaaagccagggcgttctcgacgtgcagcttgcgaaaatgggcttctcgcggcatatcaccatcaaaaccccctctatgctgagcgcgccagctattattgcgcaaagtgaactgcttatggcgataccgcgctctgccgcggcaaaaatgactgacgcggcgacgctgaaggtctttgaattaccgtttgaggttccgccgtttgaagtgaaaatctattcccacaagcggagcgggcagcgcggcgcgagccagtggctgaaagagaggctgagggagtgggccgcgacggaacgaacctga

SEQ ID NO: 197953 - DNA, 495 bp, Klebsiella oxytoca
atgaatatgaccattcgtcaggcccgcccggcggacgcaaaagcaatttatgacatgatttacgagcttgcggtttatgaaaaagcgccggagcaggtggtcaccacggtagatgaaatccaggcatcgcttttcgccagcgacagcaaaacggaagcgctaatctgcgagattgacaataaggttgccgggtacgcggtgttcttcaccagctattccacctggctcggtcgaaacggcatctatatggaagatctgtacgtcactcccgaatttcgcggccgcggcgctggaaaagcgctattgcgaaccatcgctcagctggcggtaaaaagagagtgcggtcgcctggagtggagcgtgctcgactggaaccagccggccattgatttttatctgagcattggcgccgttgcgcaaagtgagtgggttcgctatcgccttgacggcgccgcgcttgccgcttttgctgaacggggcgggaacgccgaataa

SEQ ID NO: 197954 - DNA, 999 bp, Klebsiella oxytoca
atgagtaaactcgggattaatggatttgggcgtattggacgtttagtactgcgccgattactggaggttaatagtcctttagaggtcgtcgccatcaacgacctcacctcccctaaggtactggcctacctgcttaagcatgattctaactacgggcctttcccgtggagcatcgattttactgaagatgcgcttatcgttgacggcaaaaaaattaccgtttatgccgaaaaagaggctcagcatattccgtggaaagcggtcggtgccgagctgatcgtcgagtgtacgggtttttatacctccgcggaaaaagcgcaagctcatctgaccgccggcgctaaaaaagtgcttatctccgcgcccgctggcgatatgaaaaccattgtctataacgttaacgacgacacgctggaggcaaacgatacgattatttccgtggcctcctgcaccaccaactgcctggcgccgatggcgaaagtgctgaatgacgcctttggtattaaggtggggaccatgactacgattcacgcctataccggtacgcaatcgctggttgacggcccccgcggcaaagatctacgcgcttcccgcgcggcggcggaaaatatcattccgcatacaaccggggcggcgaaagccatcgggctggttattccagcgcttagcggcaagctgaagggccacgcccagcgcgtaccgacgaaaaccgggtcggtgactgagctggtgtcggtgctggagaaaaaggtctccgctgaagaagtcaatcaggcgatgaaaaacgcggcgacgaacaacgaatcattcggttacaccgaagaggagatcgtctcgtcggacgtgattggcagccatttcggttccatttatgacgccacgcagctggagattgccgaggttggcgatctccagctggtgaaaaccgtctcctggtacgataacgagtatggcttcgttacccagcttatccgcgtgctggataagttcgccaaataa

SEQ ID NO: 197955 - DNA, 1440 bp, Klebsiella oxytoca
atgacagcacccgttcaacaccctatgtatattgacggccagtttgaacccggccgcggtgatgcatggattgatgtgatcaatccggcgacggaagcgctgctttcgcgtattcccgacggcagcgcggaagatgcccggcgcgcgattctggccgctgagcgcgcgcagccgggctgggaagccctgccggcgattgagcgagcggggtggctgcgcaaaatcgctgccggtatccgcgagcgggccgaggagatcgccgcgctgatcgtcgccgagggcggaaaaatacagcagctggccgcggtggaggtctcctttaccgccgattatctggattatatggccgaatgggcgcgccgttatgaaggtgaaattgtacagagcgaccggccgggggaaaatattctggtattcaagcgcgcgctgggcgtgaccaccggcattctgccgtggaattttccgttcttcctgattgcccgcaagctggcgccggcgctcattaccggtaataccatcgtgattaaaccgagtgaatttacgccgaataacgccatcgcttttgcgcaaatcgtccatgatatcggcctgccgaaaggggtctttaacctggtgctggggcgcggcgaaaccgtgggccaggagctggcgagcaatccgaaagtggcgatggtcagcatgaccggcagcgtcgccgcgggcgagaagattatggccgcggcggcgaaaaacatcaccaaagtgtgtctggagctgggcggtaaagcgcccgctatcgtgatggacgatgcggatcttgagctggcggttaaggcagtggtggattctcgcgtcattaatagcgggcaggtgtgtaactgcgttgagcgcgtctatgtgcaaaagggcatttacgatcgcttcgttaaccgtctgggtgaagcgctgaaggcggtgcagtttggcgatccggcgtctcgcgacgatatcgcaatgggaccgttgattaacgccgccgcgctggagcgcgtggagcagaaggtggcgaaagcggtggcccagggcgcgcgcgttgtcctgggtgggaaagcggtgacgggtaaggactatttctatccgccgacgctgctgctggacgtgcgccaggagatggatatcgtgcatgaagagacgttcggcccggtgctgccggtggtggcgtttgatacccttgaagaagcgctggcgatggccaacgacagcgattacgggctgacgtcgtcaatctatacccgcgatttgaacgtcgcgatgaaggcgatcaaagggttgaagtttggtgaaacctatattaatcgcgagaatttcgaagcgatgcagggtttccatgccggatggcgtaaatcgggcatcggcggcgccgacgggcgtcatggtctgaatgagtatctgcaaacccaggtggtctatctgcaggcctga

SEQ ID NO: 197956 - DNA, 792 bp, Klebsiella oxytoca
atgtcagagcattttccatcgctgccggaggcggtactggccgcggcgaaccagctgggggcctggctggcgcaggatgatttaccgcaggatccgcaaatagagctggtggtgctggcaggcaatgcggtgatcccgaccattgatttcgcctgccggctggcggcgcatcacgccgttcctctgctgatcagcggcggtatcggccactccacctcgtttttataccagtcggtgctgaatgacccgcgctatcgcaccattccggtagacgatcgcgccgaggcgcatattctggccgacattgcccatcagttctgggcgattccgcgccaacgaatcgtggtggaagaccgctccaccaactgcggcgagaacgcgcgttttacccggcagatgctggagcagaagggcattgcgcaccgtacgggggtggtggttcaggatccgaccatgcagcggcgaacgatggcgacatttgcccgcgtctggcaagacgacccgcgtgcgccgacgtggtacagcgcgccgggctgttcaccggtgttgtgtaacgggcgtgacggcgtcacgttcagcgggaaagaggcgggtctgtggccggtggggcgctatctggcgctgatcctcggtgaactgccgcggctggcggataacccgcagggctacggcccccagggtaagggatttatcgctcatgtggatattccgccgtacatcgctcaggcgtggcagacgctgcgcgacgaccgcctgctctccgatgcgctaagcgcgcgtcagctggcttag

SEQ ID NO: 197957 - DNA, 1275 bp, Klebsiella oxytoca
atggaaaagttatcttacgcttctgaaagtagtacatctccatggaccacctacctgcgtcaaatcgatcgcgttgcgccctatctcggcgatctcgcctactggattgaaaccctgcgccatccgaaacgcgcgctgatcgttgatattccggtacaaatggatgatggcactatccgccacttcgaaggctaccgcgtccagcacaacctctcgcgtggaccgggtaaaggcggcgtgcgctaccatccggatgtcgatttgaatgaagtgatggcgctttcagcctggatgaccatcaagtgtgcggcagtcaatattccctacggcggcgccaagggcggtatccgcgtcgacccgttctcactatcagagggtgaactggaacgtttgacccgtcgttataccagcgagatcggcattatcatcgggccgcaaaaagatattccggcgccggacgttggtaccaacggtaaagtgatggcctggatgatggatacttactccatgaaccacggcaccaccatcaccggcgtggtcaccggcaagcctattcacctcggcggttcgctgggccgtgaaaaagccaccggccgcggcgtattcgtcaccggtcgcgaagtggctcgccgcagcggtatcgaaatcgagggtgccaaagtcgcgctgcagggttttggtaacgtgggcagcgaagcggcccgcctgttcgcaggcgtcggcgcgcggattgtggtgattcaggaccacaccgccacgctgtataacgagggcggcattgatatggccgcgctgaccgcatggcaggcggagaacaagcaaattgccggcttcccgggcgcccgcgaaattgacaaagaagcgttctggacgacgccgatggatattctgatcccggcggcgctggaaggtcagattacgcgcgagcgcgcggaaaccctcagctgcaaactggtgcttgaaggcgctaacggcccgacctatccggaagcggacgacgtgctggccgagcgcggcatcgtggtggtgccggacgttatttgtaatgccggcggcgtcaccgtgagctacttcgaatgggtgcaggatatggccagcttcttctggagcgaagaagagatcaacgccaaaatggaccgtatcatgaccgatgcgatcgttcacgtttacgaaaaagcggtggaaaaagcgtgctctttgcgtaccgccgcctatatcgtggcctgtgagcgaattctgatggcgcgtaaagatcgcggtatttatccgggataa

SEQ ID NO: 197958 - DNA, 432 bp, Klebsiella oxytoca; identical to SEQ ID NO: 188897

SEQ ID NO: 197959 - DNA, 1653 bp, Klebsiella oxytoca
atgccgcgtcgtcacgctaatccctatgttcctcacgactgggccccgcacgaaaaaccggcgatcctcggctcgccgtcgacccccatccacagtacgccaaaacgtattgcctacgggatcgtcgggctgctggtctgcctgacgggcgcgctcggcaacgcggtggtgaccgccaatcttcagctgttgcagggtacctttgccgcctggtcaaccgagattgcctggctcccggcggtctacgtgatgaccaacgtctccatcaacctgctgctggtgaagtttcgccagcagttcggcctgcgcgcttttaccgagggttttctcgttctctacgtgctggtgacctttttccacctgttcgtcaacgacctcagttcagcgctgatggtgcgcgccgcccacggcatggtagccgcagcgctaagttcgctggggatttattatcaggtgcaggcctggcccgcccgccatcggctcaaagcgctgaccatcggcatcaccggttcatccctggcgatcccgctggcgcgcctgttctcaaccgagctgctgcaaatcgacgagtggcgcgggctgtacttctttgagctggggctggcgctggtgtcgctggcctgcgtgatcgccctcaagctgccgccaagcgatcgtaaaaaggtgtttgagaagaaagacttcatcaccttcttcctgctggcgccggggatggcgctggtcaccgcggtgctgtcgctgggacggctggactggtggtttgaagcgccgtggatcggctgggcgctggcgggcgcggtggtgctgattgtctccgcgattgcctttgagcataaccgcagcaacccgctgctcaatatcaaatggctctccagcggcagtattctgcgtctcgggctgattatgctgctgatccgcatcgtgctggcggagcagaataccggcgttatcggctggctgcagtacgtcggtttgcagaatgaacagatgaccaacctggcatggtcaatttttgccgggatcgtctgcggcatcgtcgccagctgcctgacgctcaacccgcagcgcctctactggcccaccgccacggcgctggcgttgattatggttgcctcgctgctcgacagccagtcgacgatcctgacgcgaccggagcagctgatgttcagccagtttctgctgggcttcggcagcgcctttttcctcgccccggcgatgctggcggggattggcggcgtcattgccgaccagcgcaacctggtgagcttctcggtgctgttcggcatgagccagaatatcggcggcctgctgggttccgctattctcggcacctttcagacctggcgggagaagtttcactccagccagctcgccgatcagcttaccacgctcaatccgctgattaccgagcgtttgcagcagtacagccagatgtatcaaagccagattggcgacagcacgttgctcaacgttcaggccaccacgctgctgcaaaacgccgccaccctgcaggccaatattctcgcttacaatgatacctatctgctgacggcggcgatttcagccgccacgctggtatgggttttctggcgcttaataagattacgtattaccgctcgtatcgcgctgaagcgcgcgacgggaagcaaataa

SEQ ID NO: 197960 - DNA, 1086 bp, Klebsiella oxytoca
atgagtcagcaggatgcggccaaacagcaggccaatacccgaaataatattcgcatcgtctctatttttaccgccgccgccattggcatcgttggcgtactggttattctctacgcctggcagctgccgccgtttacccgagaaagccagtttaccgataacgcctacgttcgcgggcaaaccacgtttatcagcccgcaggtcaacggttatatcaccgaggttaaggtccaggattttaatcaggtaaaagccggcgacgtgctgtttcaaatcgacgaccgcatctataagcagcgcgtccatcaggcggaagctcagctggcgatgaaagaggcggcgctgaagaacaatcagcagcagcgtaaaagcgccgaagcggtcatcacccgtaacgaagcggcgctgcaaaacgcccgcgcgcagaatctgaaaacccaggcggatttaaaacgcgttcaggagctgaccgccgacggctcgctatcgattcgcgaacgcgattccgcccgcgccagcgcggcgcagggcaccgcggatatcgagcaggccaaagcaacgctggagatgtcgcgccaggatttgcaatcaaccatcgttaatcgtgactcgctgctcgccgacgtcgacaatgcgaaagccgcgctggagctggcgcagatagacctgcaaaacacccgtattatcgcgccgacggacggtcagcttgggcaaatctccgttcgccttggcgcatacgtgaccgccgggacgcatttgacctcgctggtgccgccgcagcactggctgatcgctaacctgaaagagacccagctggcccaggtgcgcgtcggacagccggtgacctttaccgtggatgcgctgaacagcgagaaattcaccggtacggtgcagagcatctccccggcgaccggcgtggagttcagcgctatttcgccggataacgccaccggtaactttgtcaaaatcgcccagcgcattccggtacgcatcgccgttgatgaggggcagaaaaacggccagcgcctgcggccgggcatgtcggtgcaggtcaccatcgatacccgtgcggaggagcagcaatga

SEQ ID NO: 197961 - DNA, 1380 bp, Klebsiella oxytoca
atgatccgtccgctcgctctcgccgttatgcttgcgctggccggctgccagtccgccgacgttcaacgggccgcgcccgggctgcagatccccgccgcctggcgggcggatgtcggcccctccagcccggttgagggcgtgtggtggcgcaacttccacgacagtacgctcaatctctacgttgaccaggcgctgcgctacaacagcgacgtgctgatagcccgcgaacgggtcaacgagtaccaggcgcgggcttacgccgccgatagcagcctgtttccctcccttgacgccggattgaccggcacccgcgcgcggtcacagtcggccgctaccggcctgccggtccacagtacggtgtataaaggcgcgctaaccgccagctacgatgttgatctctggggagtaaaccgcagcgccgccagcgcggcgcaagccagcctggaggcgcaaaaggcggctgccgcagcggcgaatctgaccgtcgcctcttcggtagcggccggctatatcaccctgctctcgctggatgaacagctgcgggtgacgcagcaaacgttaaaatcgcgcgaagatgccttcaacctggcgaagcgccagtttgagacgggctatacctcacgcctggagctgatgcaggcggactccgaactgcgctccacgcgcgcgcaaattccgccgctgcgccaccaaatcgcccagcaggaaaatgcgctcagccttctgctcggcgccaatccggacgccgttaagcgcaacgcgttcgcgcagctgtcgccgctatcgctaccttcccagctgccgtcaaccctgctcaaccgccgaccggatatcgttcaggcccagcgtcagctggtggccgccgacgccaccctggcgtcatcgcaggcgcagctgctgccgtccattaaccttaccgccaccggcagcctgcaggatcgcaccctgcccgacctgctggataatccgctacgcttatggagcctcggcggcagcattctggcgccgctgctcaaccgccaggcgctgaatgcccaggtggacgtttcgatggcccagcgcaatcaggcgctgtttagctatgagaaaacggtacgcggcgcgtttaaagaggtgaatgacagtctcgatgccatcggccgctacggcgagcagctggcggagctgcaggcgcaggagaaggtgacccaggagacgctgcgcatcgcgcaaaaccgctatcgcaacggctactcctcctatctggacgtgctggacgcccagcgcacgctgttttccacccagctcagcgtggtacaggtgaaaaacaacctgctgctggcgcaagttgatttgtaccggtcgctgggaggcggctggtctgattcatcagggatgtaa

SEQ ID NO: 197962 - DNA, 660 bp, Klebsiella oxytoca
atgcaacaacagtggtcggcagtagataattatctcgtgacagcgttaatccccaccgatccgctactcagccaggttctggagaataaccagcgcgccgggcttccggctatcgacgttgccgctaatcaggggcagtttctggccctgctggtgcgcatgacgggcgccagacgcatcctcgagattggcacgctcggcggctacagcaccatctggatggccagagaattgcccgccgatggcgaattacttaccctggaggccgacgcgcaccatgccgccgtcgcccgcgagaacctgcgcctggcgggcgtggacgatcgcgttgcggtgctggaaggtccggcgctggccagcctcgaaacgctgggagagcgcccgccgttcgatctcatttttatcgatgcggataagcccaataatccccactatctgcgctgggcgttacgctattcccgtccggggacagtgattgtgggcgataacgtggtgcgcgatggcgaagtgacgaatccggatagcgcggatgagcgggtgcagggtgtcagagcgtttatcgacatgatgggcagcgacccgcgactgacggtcacggccctgcaaaccgtgggcagcaaaggctgggatgggttcaccctcgcgtgggtgaacgcctga

SEQ ID NO: 197963 - DNA, 3903 bp, Klebsiella oxytoca
atgacagaacaacaaaaaataaccttctcatcgctctttgaacggcttgatggcctgatgctgcgcgataagtcgcgcttctcccgtcgcctgcacggcgtgaagaaggttaaaaatcctgatgcccaacaggccattcttcaggagatggcgcaagaaattgaacaggcggcagggagagtcctgctgcgcgaagccgcgcggccggcgatcgcttatccggaaaacctgccggttagccagaaaaaacaggagattctcgaagccgttcgcgatcaccaggtggtgattgtggcgggggaaaccgggtcggggaaaaccacccagctgccaaaaatttgtatggagctggggcgcggcgttaaaggcttaattggccatacgcagccgcgtcgcctggccgcgcgtaccgtcgccaaccgcatcgccgaagagctgcaaacggagccgggcggctgcatcggctataaagttcgctttagcgaccacgtcagcgataacaccatggttaagctgatgaccgacggtattctgctggcggaaatccagcaggaccggctgctgatgcagtatgacaccatcatcatcgatgaagcgcacgaacgcagcctcaatatcgacttcctgctgggttatttgcgggaactgctgccccgtcgcccggatctgaaaattattatcacctcggcgaccatcgatccggaacgcttctcgcgccactttaacaacgcgccgattatcgaagtgtccgggcgcacctacccggtagaagtgcgctatcgacccatcgttgaagacgccgacgacaccgagcgcgatcagctgcaggcgattttcgacgccgttgatgagctcgggcgtgaaagccccggcgatatcctcatttttatgagcggcgagcgcgaaattcgcgataccgccgatgcgctcaataagctgaatctgcgccataccgaagtactgccgctgtatgcgcgactgtccaacagcgaacagaatcgcgtgttccaggcccacagcgggcggcggatcgtgctggccaccaacgtcgcggaaacttcgctgaccgtgccgggcatcaagtacgttatcgatccaggcaccgcgcgtatcagccgctacagcttccggactaaagtacagcgcctgccgattgagccggtttcccaggcgtcggctaaccagcgtaagggccgctgcggccgcgtctccgaagggatctgtattcgtctttattctgaagacgacttcctgtcgcgtccggagtttaccgacccggagattctgcgcaccaacctggcgtcggttattctgcaaatgaccgcgctcgggctcggcgatattgccgcgttcccgttcgttgaagcgccggacaaacgcaatattcaggacggcgtgcgcctgctggaagagctgggagcgattaccactgacgaacagcagaccgcctataagctgacgccgatgggccgccagctgagccagctaccggtggacccgcgtctggcgcgcatggtgctggaagcgcaaaaacacggctgcgtgcgcgaggcgatgattatcacctcggcgctctctattcaggatccgcgcgagcggccaatggacaagcagcaggcgtccgacgagaaacaccgccgcttccacgacaaagagtccgactttctggcgttcgtcaacctgtggaactacctgggcgagcagcaaaaagcgctctcctcgaaccagttccgccgccagtgtcgggttgattttctcaactacctgcgcgtgcgcgagtggcaggatatctacacccagctgcgtcaggtggtcaaagagctcggcctgccggtcaatagcgagccggcggagtatcgcgaaattcataccgcgctgctgaccggtctgctgtcgcacatcggtatgaaagacgccgacaagcaggagtttaccggcgcgcgcaacgcccgcttctccatcttccccggatcggggctgtttaaaaagccgccgaaatggacgatggtcgccgaactggtggaaaccagccgcctgtgggggcgcatcgccgcgcgcattgagccggagtgggtcgagccggtggcgcagcatctgatcaaacgctcgtacagcgaaccccactgggagcgcgggcagggcgcggtgatggcgacggagaaggtgaccgtttacggcctgccgattgtcgctgcccgcaaggtcaactacagccagattgacccggcgctgtgccgcgaactgtttatccgccacgcgctggtggagggcgactggcagactcgccacgctttcttccgcgaaaacctgaagctgcgcaacgaaattgaagagctggagcataaatcacgccgtcgcgacattctcgtcgatgacgaaacgctgtttgagttctacgaccagcgcatcagccatgacgtcatctccgcgcgccactttgataaatggtggaagcaggccagccgcgagacgccggatctgctcaactttgaaaagagcatgctgattaaggaaggcgcggagcaggtcagcaagctcgactatccgaacttctggcatcagggcaacctcaagctgcgtctgacctatcagttcgagccgggcgccgacgccgacggcgtgacggtgcatattccgctgccgctgctcaaccaggtggaagaggccgggtttgagtggcagatcccggggctgcgccgggagctggttatcgccctgattaaatcgctgccgaagccggtgcgccgcaattttgttccggcgccaaactacgcggaagcatttctcggccgcgcgacgccgctggagctgccgctgctggattcactggagcgcgagctgcggcggatgaccggcgtgactatcgaccgcgaggcctggcaatgggatcaggtgcccgatcacctgaaaatcactttccgggtggtggacgagaaaaataagaagctgcaggaagggcgttcgctgcaggatctgaaagatgcgctgaaaggtaaggtgcaggagacgctgtccgcggtcgccgatgacggtatcgagcagagcgggctgcatatctggagctttggccagcttccggagagctacgagcagaagcgcggcaactacaaagttaaggcctggccggcgctggtggacgaacgcgacagcgtggccatcaagctgtttgataatccgctggagcagcagcaggagatgtggcgcggcctgcgccgcctgctgctgctgaatatcccgtcgccgataaagtatctgcacgaaaagctgccgaataaagccaagctggggctctatttcaacccctacggtaaagtgctggatctgatcgatgactgcatcgcctgcggcgtggataagctgattgacgaagcgggcggcccggtatggagcgaagagggctttgccgcgctgcatgaaaaggtgcgcgccgagctgaacgagacggtagtggacattgccaaacaggtcgaacagatcctgactgcggtctttaacgtcaacaaacgcctgaaagggcgcgtggatatgaccatggcgctggggctgtcggatatcaaatcgcagatgagcgggctggtgtatcgcggtttcgtcaccggtaacggcttccgccgccttggggacacgctgcgctatctgcaggcgattgaaaaacggctggagaaaatggccatcgatccgcaccgcgaccgcgcgcagatgcttaaagtggagagcatccagcaggcgtggcagcagtggctgaataagctgccgcctcagcgccgtcaggatgacgacgtgcaggagatccgctggatgattgaagagctgcgcgtcagcctgttcgcccagcagctcggcacgccgtatccgatttccgacaagcgggtactgcaggcaatggagcagattacggcctag

SEQ ID NO: 197964 - DNA, 606 bp, Klebsiella oxytoca
atgagcaaagtattagttctgaaatccagtattctggcagggtactcgcaatctggtcagctgtccgactattttgttgaacaatggcgtgaaaagcacgcggaagacgttatcaccgtgcgcgacctggctgcaaacccaattccggtactggacggcgagctggttggcgctctgcgtccgagcgacgcgccgctgacgccgcgtcagcaggaagcgctggcgctttctgacgaactgatcgctgaactgcaggcgaacgatgtgattgttatcgcggcgccgatgtacaacttcaacatcccgacccagctgaaaaactacttcgacctggtggcgcgcgctggcgtgaccttccgctacaccgagaaagggccggaaggtctggtgaaaggtaaacgtgcggttgtcgtcaccagccgcggcggtatccataaagataccccgaccgatctggtgaccccttacctctccaccttcctcggctttatcggcattaccgatgtgaacttcgtgtttgctgaaggcatcgcctacggcccggaagtcgcagcgaaagcgcagtctgatgcgaaagccgctatcgacagcgttgtagccgcataa

SEQ ID NO: 197965 - DNA, 408 bp, Klebsiella oxytoca
atggcagagaaattatccgctcggtgccactgcggcgcggtggcgtttaccgttgagcttagcgatggcttcaacaccgttcgccgctgtaactgttcatattgccggatgcgtggggcggttgcggtctccgcgccgctttcaggaatagaggtggtgcgcggacgggataagctcacggagtatcgttttaataccggtcaagccgtgcactttttctgctcggtatgcgggatttacacttttcatcagcggcgttcaaacccgcagcagtacggcgtgaatgtggcctgcattgacggcgtgtcgcccttcgattttccctgcgtggaggtcaacgacggcgtgaatcatccgaaagatggcggcggtggcgtggtggggtatttgcgctacgagaaaaagtga

SEQ ID NO: 197966 - DNA, 597 bp, Klebsiella oxytoca
atgcccatttatcagattgacggtatgacgccggttgtaccggacgaaagctatgttcatcccaccgccgtgctgattggcgacgtgatcctcggcaaaggggtctacgtcggccctaacgccagcctgcgcggcgattttggccgtatcgtggtgaaagatggcgctaacgtccaggataactgcgtgatgcacggctttcccggccaggacacggtggtggaagaagagggacatatcggccacggcgcgattctgcacggctgcaccatcggccgcaacgcgctggtggggatgagcgcggtgattattgacggggccaggattggggaaaacagcatcgtcggcgcttcggcctttgtgaaagccaacgctgaaatgcccgccaaccatctgattgtcggcagtccggcaaaagccattcgtacattaagcgaacaggagctggcctggaagaagcaggggacgcgggagtatcaggtgctggtggagcgctgcaaacagacgctgcatcaggtggaaccgctcaaagaagcagagtcggacagaaagcggctgatctttgacgagaatttgcggccgaaatcttcatcctga

SEQ ID NO: 197967 - DNA, 936 bp, Klebsiella oxytoca
atgaatcagatgagtaaactcgacacctttattcaacaggccgtcgccgcgatgcccatcagcgggacctcgcttattgcttctttatacggcgacgccttgctccagcgcggcggagaggtctggctcggcagcgtggcggcgctgctggaagggctgggattcggcgaacgattcgtgcgtaccgcgctgttccgcctgaataaagaagagtggctcgatgtggtgcgcattggccgccgcagcttctaccgcctcagcgacaaaggcctgcgcctgacccgccgggcggagcataaaatctatcgcgccagcgccccggagtgggacggtacctggctgctgctgctgtcggaagggctggagaagagcactctggcggaagtcaaaaaacagctgctgtggcagggatttggcgcgctggcgccgagcctgctggcttcgccatcgcagaagctggcggacgtgcaatctctgctgcacgaagcgggcgtagcggaaaacgttatctgcttcgaagcgcattccccgctggcgctctcccgggcggcgctgcgcgctcgtgttgaagagtgttggcatctcaccgagcagaacacaatgtatgaagcgtttatcaccctgtttcgaccgctgctgccgctgcttcgcgactgcgagcccgcggagctgacgcctgaacgctgctttcaaattcagctcctgctgattcacttctatcgccgggtggtgctgaaagatccgctgctgcccgaagaactgctccccgcgcactgggccggacaaaccgcgcgccagctgtgcatcaatatttatcaacgcgttgcgcccggcgcgctggcgtttgtcggcgagaagggcgaaagctcggtgggggaacttcccgcgccggggccgctctatttccagcgcttcggcgggctgtcgggcgtataa

SEQ ID NO: 197968 - DNA, 429 bp, Klebsiella oxytoca
  misc_feature (5)..(14): n is a, c, g, or t
gtgcnnnnnnnnnncgaggcgctggcggattatctgctgcagtttgcccgccatctgatttacagcaccgccatgccgccggcgcaggcggtggcgctgagcgccgcgctggccgtgattcgcagcgacgagggtcagcagcggcgggaaacgctggccggccatatcgccgactttcgccggggaatgtcccactatcccggcgagctcactgattccggcagcgcgatccaaccgctgatcgtcggcgacaacgcccgcgcgctgcggctggcggcgcgtctgcgtgaggaaggctgctgggcgacggccattcgcccgccgacggttcccgtcggcagcgcgcggctgcgcctgacgctgaccgccgcgcacgagtctgccgatatcgcccgcctgctggaggtgctgcatgacggcggtgaataa

SEQ ID NO: 197969 - DNA, 174 bp, Klebsiella oxytoca; identical to SEQ ID NO: 107918

SEQ ID NO: 197970 - DNA, 384 bp, Klebsiella oxytoca
atggacgtacaacccaacgtacagactgacacggtcattaaggcgtttctccgctcggagttgcagttgatacgtagtcagaaaaaacttctcagtgtgttgcctcgtgatctcgcgtcggactaccgctatataccggagaacctgctggagcgttttttccatcccgccactgatgcgcgtctaaatagaattgccctgtcagaagccagaccaggtagcctgctagttccccgtgtcaacgggaagcctgttttatggggtgagttaataaagttaatcctggatgactctcagttactgaagtttgaaacgtacggcagaccttttgacagtaccgagatgaaaccaaatgagccatgcgaattattgagcgggaagtag

SEQ ID NO: 197971 - DNA, 474 bp, Klebsiella oxytoca
gtgccgccgctgtcgccgattcagtcggccgccgacgcaggggaactgggcagcaacggtattctgccggacgtcgaaagcctgcgtatcccggttcagtatctggccaacctgctgaccgcgggcgatacccagccggtactgctggcgctgaaacgcatgctggcgatgcgccacttcaaacgcgcggaaaccgtcgacggcgtactggatacccgggcgctggaagaggtaggcctcactgaggcgcaggcgcaggagatgtatcgctatctggctattgctaactacgaagaccgtttcgtggtgccgagcagccaccgcgagcaggcccgcgacgccttccctgagaaaaacggttgcggctttaccttcggcgacggctgccacggttctgacagccagttcaatctgtttaacagccgccgtatcgatgctatcgacgtcaccagcaaaacggagccgcacccatga

SEQ ID NO: 197972 - DNA, 735 bp, Klebsiella oxytoca
  misc_feature (656)..(665): n is a, c, g, or t
atgattaatagctatggtattaaatttttggctgtaataaacccttctaaatcagatttttcgccttctgattatatccccccgaaaaaaagtaactgtgagtatggaacatatcccttaagtaaaataaaattagatatgttcgaaaaaaaacttactaaatatctcgagttgttatccaagcgaggagtttctatagacgcattcgaagtcggcaacgaattagatctttactgcaacaatgctgatatgcctgataagaatgattttatttacaacaaatggaaatggtttttgtcgacaactcaaattgaaaaatttacagcaggatacgcaccctttttgaaaagcagtgtttctttaattaggaaatattacccaaattcaaaaattataacctttggcatgagtaatcctaccggaaactctgcatctttgatcaaagcgttatctcagtataaagacgggaaagggcaagtcactgacttaacattgcttgtcgatggatatggtacacatatttaccctaagggtaaaacgacaaatgcgatggttaatgatagtataagccaattatctagtcaggctgctttactaccacatctgtccgaaaaaggaatttggataactgaatggaatgaaactccttcagcatnnnnnnnnnntcagcattgtgggctggaaataaatggtattttcagtacaaatcaaatggagaacaaggtggcgatttga

SEQ ID NO: 197973 - DNA, 189 bp, Klebsiella oxytoca
atgaatgactatttaatggataatgatgatgcatactttaaatcctttgtccttccttataaatattgggatgatggtaagttttttaaagcaatatcatcttttatattgaacgtttaccgttgtgacagtgatgctgtttttttgaatattatgaataaatttaaatctcgcttaaaaaggaagtga

SEQ ID NO: 197974 - DNA, 1251 bp, Klebsiella oxytoca
atgtcccttaccgatgcgaaaatccgcactcttaaaccttctgataaatcctttaaagtctccgattctcacggtctgtatcttcttgtcaaaccgggcggctcacgtcactggtatctcaaatatcgtataaacggcaaagaatcccgcattgcactgggtgcctatcctgccgtttccctgtctgatgcccgccagcagcgcgaaggtatccgtaagatgctggcgctgaacatcaacccggcacagcagcgggcagttgaacgcggagcctacacatcggagaaagtatttaaaatcgtggcactggcgtggcataaaagtaataaaaaatggtcgcagaacaccgctgaccgtctgcttgccagcctgaacaatcatgtatttccggttatcggccacctgtcagtctcagagcttaaaccccggcatttcattggcctgctgaaagggattgaggaaaaaggactgcttgaagttgcgtcccgcacgcggcagcacctcagcaacatcatgcgtcatgcagttcatcaggggttaatcgacagcaacccggcggcaaaccttgacggcgtgacggctcctcccgtcagacggcattatcccgccctgccactggagcggctgcctgaactgcttgaacgtattgaggcatatcatcaaggccgtgaactgacccggcttgccgtcctgttgacgctgcatctgttcattcgctccagtgagctgcgctttgcccgctggtcagaaatagatttcagaaatagaacctggacgatacccgccacacgcgaagccattgcaggcgtgcgttattccgggcgcggtgccaaaatgcgcactgctcatatcgtacccctctcagaacaggccatcgccattctgaaacggattaaagatatctccggtgatggtgagctggtcttccccggcgaccataacccatataaaccgatgtgtgaaaacaccgtgaataaggcactgcgccttatgggttacgacactaaacaggatatctgcggtcacggcttcagggcaatggcatgcagcgccctgatggagtccggtttatggtcgcaggatgcagtggagcgccagatgagccatcaggagcgcaacagcgtgcgggcggcttacatacataaagcggaataccttgatgctcgaaaagcgatgatgcaatggtggtcggattatcttgcaattaatcgaaaggtttttatttcaccatatctttttgaaaaaaattaa

SEQ ID NO: 197975 - DNA, 597 bp, Klebsiella oxytoca
atgtttgatatcggcgtgaatctgaccagctcgcagttttcccgcgatcgggacgaggttattgcccgagcccgggcggcgggagtcacaggaatgctgttgacggggaccaaccttcatgaaagcgcgcaggcgcagcagctggcgcatggttatttcggatgctggtcaacggccggtgttcatccccacgacagccgcagctggacggaatcggccgcggcagcggtctacgagctggcccgcgagccagaggtcgttgcgattggcgaatgcgggctggatttcaaccgcaacttttcaacgcctcacgagcaagaggcggcgtttagcgcccaactggcgctggctgcggaactgtcgatgccggtatttttgcactgccgcgatgcgcacgaccgtttcctggccctgctaaccccgtggcttgataagcttccggggccgtggtgcattgctttaccggtagccgcgaagagatgcgcgaatgcgtggagctgggattatttattggcattaccggctgggtgtgcgatgagcgtcgggggctggagctgcgggctctcctggccgatatcccggccgatcgcctgctga

SEQ ID NO: 197976 - DNA, 621 bp, Klebsiella oxytoca
atgaataacagaatgttatatcatttcaaaaggcttgtattcgctatctcaccacggatggccgaaaatatgggtgtggacttcagaatgaacttgcccaatagagtgttcttagagaagcaaatatttggctttatgaactcatcggcttatggtctaaaagacagaaaatgtctttttgttggaataaaaagatataactggcattatcatcggttattggacttcgattattactcaatagattccaaccctaaagaggccaaatatggtaccaacggtaaacatacagtgggctcggttctagaactatgtgactacttcgatgaaaacagctttcagtttgttatcgccaatgggttaattggctttggaatcaatgatgagataagtagcaataaaatgtttacacagattcatcgcgtattaaagaatgagggtattcttattcttggctacaatgaacaatcttcgcgcctgacgtttaagctggaatcatctgcagggttctcgctatttgaccgcttcacaccggcgatcagagggctcactgacgagccatatatgataaatgatgattcaaatcattgttatatttttctaaagaaagttatagcctga

SEQ ID NO: 197977 - DNA, 315 bp, Klebsiella oxytoca
atgaacgcgccccgctccaatcgaaggccggacggtagtcatcactggcggcaacgacgtgccgcaaacgatcgcttcaggaacgttttcgcaccgggaacgtataatagtttcggttatcagcttgctttggcgctctcgggcatagaggcaaaagtcgtcattgctttaagaaatgcgcacgagggacaagagtcggtagtggtgattgaagtgcagagcgtgcagtttgaaactctcgacctcgtgtctctcataccggagcaagccttagagaacggcttaactcgtggatcggtcgggttgatatcttaa

SEQ ID NO: 197978 - DNA, 1380 bp, Klebsiella oxytoca
atgaaaatagccatcgcaacccgtatgtcttttatgtttgggctgactatgaccctgctgacgctagccctggcagtggtgatgtggtgttcgctttactcctcgctgctaaaccagatgtccaaagagctgcactttcgccactcgctcattgagccgtttctggcaagcaaaggtacggtggagaactggtctgacgtcaaagataagcttaatattatgtcggccagcgacagcggctacgtgaaacattggattttaagcgatatccccgcctaccggattggcgatgcgtctccagccgtcgcgctgaccgacggattttccaccgcgcccaatccgcacggggacgacccgttctatatgctcacctcaactctgccgccgcttggtaaccgtccggccatacgttatgttgtcgcggtggattcaaccccctatatggccacgctgttcgaattcacccgcatgctggcgttaatctctctgctggccattagcgcggcggcaatgctcggctatttaatcgcccgctcagggatgcgccccgtgcgcagtctgagccagcaggcccacacgatgatgcccggtaatgaggggcagcgcctcgacagcgccgcgctccccgcggaattgcagcacctggccgacgcgttcaacgggatgctatcccgccaggaggcggcatggtcgcagctggagagctttaactccgacgttgcccacgagctgcgcactcccctgaccaatctgattggccagacccagcttgggctctcgcgcaagcgcagcgtgaacgagctggaggaactgctgcagtccaacctggaagagctggcgcgcatgacctccatcgtcaatgatatgctgtttctgtcacacgcccaggcgggccaccataccaccgaactcagcgaggtctcgcttcgggaggaaagtagcaaaaccgccgaatatgtcgaaccctcgttccttgagaacaacctgacgctggagattcatggcgaagtcgaggcctgtatcgacaggcgtttattccatcgcgcgctggctaacctgctggagaatagcgcccgtcacgccctgccgggaagtacggtgattatcgagttgcaggagctaaacggccaggcccatatcgcggtgaccaatcggggagagaccattcccccggaacaccaggcgcggctgtttgaacggttttatcgggtggattcatcccgtgtgcgcagcgatatttatcatggcctcggcctggccatcgtacgcgccattgcgctgatgcatcggggagatgtgttcgttaaaagtgaaaatggccgcaacaccttcggcttttcgcttatacatcgcccgcagccccataaaatagatctgtga

SEQ ID NO: 197979 - DNA, 714 bp, Klebsiella oxytoca
atgcggttattgctggttgaggacgaagagaaaacgtcatcatatgttagccgggctttaagcgagctaggttttacggttgatattgcgggtgatggcatcgatggtcttcatctggcggtacagcaggaatatgatgccgtcattctcgacgtcatgctgccgggtaaagacggctactcggtgctcgagggattacgggcgattaaacaaaccccggtgctgatgctctccgcgcgcggatcggtcgatgaacgcgtcagagggcttcgccagggggcggatgattatctgccgaaacccttttcgctgatcgagctggtcgcccgcattcaggcgctgttgcgccgccgcagcgtggacggtatcgacgtctcccagctgcagatagacgatttacacgttgatttactctcgcgtaaggtgaaccgcaacggcgatcgcattgatttaacggcgaaagagttcgcgcttctcagcctgctggcccgccatcagggggagattctgtcaaaaatgatgattgcggagcaggtgtgggacatgaattttgacagcgacgccaacgttgtggaggtcgccattaagcggctgcgcaacaaaattgatgcgccctatcaggtgaaattactgcataccgtgcgcggtatggggtatgtgcttgaaactcgccattcccatgaacaggctcgcagtccgggccacttacgatga

SEQ ID NO: 197980 - DNA, 1209 bp, Klebsiella oxytoca
atgaacgtcagaattatctctcttgctatcggtgtggttattatctcaatttcgctgtccctgtggttgctgatggtcgcaagaaagacatccgctattcctccctcagcgccgccgctgagggtcggggtggtgacgctcaaaagcgagccgataacgctgaccagcgaattgcccggccgcgcggccgcatggcgtaacgcggaggtcaggccgcaggtcgccggcattattcagaagcgcctgtttactgaaggcgacgaggtcaaagcgcagcaaccgctgtatcagatcgatcccgccttatatcaggcggagctgaagcgcgcgagcgctgcgctggcccgcgccagagcgcagctaagctctgccgcgctgctggtgcagcgctatcgtccgctggccgacagtcgcgccatcagccgccaggcctatgatgatgcccttgtcgcccatcagcaggcgcaggcggacgttcaggctgccgaagccgcgcgcgagacagcgcgaattaatctcgaatatacccaggtgctgtcgccgattgacggcgtgatagggcgttcggcggtgaccgaaggcgcgctggtgacgtcacagcagagcgccgccgtcgcgacgatacagcagattgaccctatctatatcgatgtgacgcaatccagcgcccagctgctgcgtcttaaaagcgccctggcaagtggcgccctgaccgccggcgacgatcggctgctggcgtcggtgaccctgaccctcgaggatggcagccgctatgcccatcagggccagctgcagttctcagaaatttcggttgaccgctcaacgggctccgtcgtcctgagagccatgttccccaatccgcagcgccagctgctgccggggatgtttgtccgggcccgcatcgtggacggcgttgcccccagcggagggctgctggtcccccagcgcggggtgacccataacccgcagggggacgcgacggcgctggtcgtggacgagagcggcaaagtagccttgcgggccattaaaaccgaacgcgccataggcaatcagtggctggtgtccaccgggctgtctgcgggagacaaggtcattgtcgaggggatacagcaggcgcggcccggcgcgcaggcgatcgccgaggagtggcagccaccggcggtcacggcccagcgtaccgcgcagcgcaaggagcccgatcatggttaa

SEQ ID NO: 197981 - DNA, 3177 bp, Klebsiella oxytoca
atggttaattactttattgcccgaccgattttcgcctgggtgctggcgattatgctgatgctgtgcggcctgctgtcgcttgtccgcttaccggtggcgcagtatccggccatcgcgccgccgacgattagcattcaggttacctatccgggcgcctcggccaaaacggtccaggacacggtggttcaggtgattgagcagcagatgaacgggctggacaggctgcaatatatctcctccgaaagcaattcggacggcagtatgagtattgcgctgacctttgagcagggcaccgatgccgatacggcccaggtccaggtgcagaacaagctggcgcttgcccagccaatgctgccgctggaggtccagcagcaggggattcgggtcaccaaagcgacgaccaactttttgatggtgctcgcctttatatcgaccgacggcagcatgcagcggcaggatctcgcggattacgtggcctcttatattcaggatccgctcagccgcaccagcggcgtcggcgacttccagctttttggcgccccgtatgccatgcgcatctggctgaatcccgcggccctggtgaactacagcctgacggctaccgacgtcagcgatgcgatccaggagcagaacgtggaggtctcatccggccagctggggggcctgcctgcgctgcccggacaggagctgacggcgacggtggtggggccttcacgcctgcagacgccggagcagttcggccagatcctgctcaaaaccaacccggacggctcgcgcgttctcctctccgacgtggcgcgcattgagctcggagcgcaaaactactccaccgatagcgagtacaacggcgcgcccgcagtcggtctgggcatccgcctggccactaacgccaacgccctggaaaccgcgcgggccgtgcgcgcgacgcttgatgaactcaggccgttcttccctccgggaatggaggtcgtggacgcctatgacacgattcccttcgtcagcctgtcaatcagcaacgtgatccatacgctcatagaggccgtggtgctggtctttgtggtcatgtatgtgtttctgcagaacttccgcgcgacgctgatcccgacgctggcggtgccggtggtcctgctgggcaccttcggcgtgctggcggcatttggctattcaattaacaccctgacgatgttcggcatggtgctggcgataggcctcctcgtcgacgatgcgatcgtggtcgtcgaaaacgttgaacgtatcatgcatgaggaggggctcaacgcccggcaggcaacgcaaaaatcgatggggcagatcgccggcgcgctggtcggcattgcgatggtgctttccgccgtattcctgccaatggctttcttcggcggcgccaccggcgtgatctaccgtcagttctccatcaccattgtttcgtcgatggtgctgtccgtattggtggcgctgatatttacgcctgcgctgtgcgcaaccctgctgaaaccgccgcgcaaaggcaaggcggtggcgcaaggcagagtctggcgcgggtttaatcgcgggatggacaatgcgacccagcgctacgccagtacggtcacgcgagggctcaatcgcccataccgcctgatgttaatttatctggcgatcgccattgccaccggctggctgtttacccgcatccccacttcattcatgccgcaggaggatcaggggatgctgttcgcgcagattattgcgcccgaaggggccaccgctgaaagaacccggacgaccctgcagggcgccagcgattatttgctgcaggtggagaaagagaatgtccgctcggtgttcgcgatctccggctttaacttcggcggccgcgggcaaaacgcggggatgctgtttatccgcctccatgactgggagcaccggcagaataaggagcagaaggccgaggcgctggccgcccgtttaaacggggtctttgcgcgggagttccgcgatacccggattgtcgtggtctcgcctccggcggttcgcgagctggggaacgtctcgggctttaactttcagctgatggatcgcggcgggattggccacgaacggctcctgcaggcgcgcaaccagtttctggccgccgcgcagcaaagcccgctgttgagccaggtgcggccaaacggtatcgaggatgcgccgcaggtcgcgctgctgatcgatcgcgagaaggtcagggcgctgagcgtgtcgatcggcgaggttaaccgtacgatctccattgcgctgggttccggctacgtcaatgattttgtcgaccgcggacgcgtgaaaagggtctatgtgcagggcgaggccgcctcccggatgctgccgcaggatctgcagcagtggttcgtgcgcaacgataggggcgacatggtgccattttctgccttcagcagcgtgcaatggcaatacgggccgcaaaagcttaatcgctataacggcgcaccgtcattcaacctgcaggggcaggcggcgccaggctttagttccggcgaggccatggctgaaatggaacgcattgcccgcacgatgcccgccggcgtcggcttcgagtggacgggactgtcgtttgaggagcggctctccggagcgcagacgccggcgctttacgcgatttcgctgattatcgtctttttgtgtcttgccgccttgtacgagagctggagcgtcccggcggcggtcatgctggtcgtcccgctcggcttaattggcgccatcgccgcgacgctgctgcgcgggctggataatgacgtctatttccaggtcgggctgcttaccaccgtcggcctggccgcgaaaaatgccattctgattgtcgagttcgccaaaagcaattttgacgccggagcgacgccgatggcggcggcggtgcaggccgcgaaacagcgcctgcggccgatcctgatgacctccctggcatttatgctgggcgtaacgcccctggttgttgccagcggagcgggctcgggaagccagaacgcgattggcaccgggatcgtcggcgggatgctgaccagtacgttcctggccatctttttcatcccggcgttcttcgtcattatgctgaagctttttcgggtgaagcgtcccggcgaacgcggggaggaagagcgactcgctgaagccggtgagaccaccccgggagggccggccttatga

SEQ ID NO: 197982 - DNA, 1410 bp, Klebsiella oxytoca
atgatgcgtttcagcctgatattgagcgttgccgctctcgccggcggctgttcgctggcccccgagtaccagaggccggcggtgccggttgcggcgcagtatcctgattacggtcaggcttccgggagctggacaatcgcggatatcgcgtggcgccatttttatcgcgacccgctattgcaggagctcatcggccaggcgctggcaaataaccgtgatttgcggattgcggcgctgaacgtggaggccgcgcgcgccacctatcgcatccagcgcggggaggcgttcccgtcgctgacggccgacggaagcggcacggtccagcgtaccccggcagatctcgccgccggcggcgagtccgtcgttagccggagctatgcggcgggggcaaccctgtcgtgggagctcgacctgttcggcaggatgcgtagcctcaatcaacaggcgctggaactctatctggcgcaggatgaaacgcgcgtggccgctcgcctggcgctgattggcgaaacggccagcgcctggctgaccctgcaggctgatgctgaactgctgcagctggcggaaagcacgctggatgcgcagcgctcggctttccagctggtcgacaagagctatcagcagggggtggcgacggcgttagatcgtagtcaggcggaagttggggtaagcacggcccagcgcgacgtcgcccgctatcagcgccagcggcggcagtccatcaatgcccttattttgctcctcggacagccgccgtcgccggcgatggatcttcgtctcaggcagctggcggcgctaccggacgatatcctgccagcggagatcccggcgggattgcccgccgacctgctgcggcggcggcccgatattcgcgcggcggaacaccagctgcaggcggcgaatgccaatataggcgccgcgcgggcggcatttttcccggggatcgtgttgacgggctctggcggcagcgccagcgccgggttagacaatctcttcagcagcggctcaggcacgtggagcttcaccccgcagatacgcttgccgatcttttccggcggggcgctgcgcgcggggctcgatcttgctcaggtgcaaaagaggattgaagtggcccgctatgagcaggccatccagcaggcttttcgcgaaacggccgacgccctggccgggcgggatacgctggatgcgcagatcctgatgcaaaataggctggttgcggcaacgcagcgctcctatgacctgtcgttgcagcgttttcagcaggggattgacaactatctgagcgtgctggattcccaaagggccctctatgcggcgcagcaagatctggtgaatatccgactggcgcggttgctcaacctggttgatttgtatcgcgcgctgggcggcggctggcaggaggaggcgtga

SEQ ID NO: 197983 - DNA, 528 bp, Klebsiella oxytoca
atgtgctgcaggcgctcaaaaaaacagcccgatatcgccggagataatgggctgggtcgctctcgcggtggttttggcaccaaaatccacatggctacggacggaagcggtctcccgttaaacatcgttctgagccccggacaggtttacgaaagccagtgcgcgcaacgccttctggacggcattggtgttcatcggcagaacggcagcatgaagcgttgtggccatgtggtgcaggccgatagagcgtactcaggacatacattacgtaacgaactgataaacaaaggcatcaaaacaatcactccccgaaaattcaatcagaaaatggagtcggatggtcgttcacgactcgatcgggatgcttgccgcaaccgcaaccggaaccgcaacgttgttgagcggtgctttggccgcctgaaagaataccgccgcatcgcgactcgttacgacaaaacggcgagaaactatctggcgatggtaaatctgggctgcatccggcttatttaccaacggttatgcaactaa

SEQ ID NO: 197984 - DNA, 672 bp, Klebsiella oxytoca
gtgtttgccagctacacctcaatttttcagcctcagacatatcgtaaccagcaggggaattacctgaagccggtgactggcaaggattacgaggcgggaatcaaaggagactggggtaatagccgtattactgcgagcctgtcggtattccgtattgagcaggacaatttggggcaaatccagagtgatacatacgtaaataacagcagtgaaaatgcctataaagcatcaaaaggcgtggtcagtcgcggtgttgattttgaaatcaacggtgcggtgacagataacctgaaggtgacgtttggtgccacccgctacgtggccaaagatgctgatggcgaccgcaccaacccttatatgccgcagaccagcctgaagctgttcaccagttacaacctgcctatgctacccgagctgaccgtaggtgggggcgttaactggcagaaccgcacctacaaagaagcgactaatccatctggggtacccgagcgagtttatcagggaagctatccgctggtgaatctgtttgcgcgctatcaggtcacgaaagaactgtccgtgcaggggaacattaaaaatctgtttgatcgtgagtacaacaccaacccttcgggcggcgtggccttcaacgaaccacgaaactattcagtaagcgttaattacagcttctga

SEQ ID NO: 197985 - DNA, 1356 bp, Klebsiella oxytoca
ttgctggtagtcaacgctgataccggcggtgacagcacttccaatcccgcgcagtcttataccgttccggctacgcgtgcagggaccaggcttaatctgacgcagcgtgatattccccagtcggtcagcgtgctgacgcaacagcgaatccaggatcaaaacctgcaaaacgtgggtgatgcgctggcgaacgtcacgggtatttcagcgtcccagaatgactccgagcgagttgacttctattcacgcggcttctacatcaataactatacctatgatgatatcccatcaactcagactggtgcgtggaacttcggggaaactgacggcggctcggcaatttatgagcgtatagatgtcgtgcgcggctcgacaggattaatgaccggtacgggtaacccgggggctgctattaacatgatccgaaagaaggcagacagcaaaaactttgccggggatctttcagcgagctacggcagctgggacaatcagcgctatgttgccgacctgtccggaccgctgaacgactccggcacgctgcgcggccgcgtggtgaccggatatcaggaccaggatagctgggttgaccgttatcacaaacgtaagaagttcctgtatgccattcttgcggcagacatcaccgataacaccacactggatctgggttacgactatcagtcacgtaataccgacggtccgacctggggtggcctgcccacctggtacagcaacggcagcaaaattcagtatgatcgcagcgataacccctcagctgactggacgcattacaacattctgtcgcgtaaggtattcgccaacctgacgacgaacttcgacaatggctggcagttgagggttaatggcacgcatgccgaatcagactttgatagtaagttgttgtatgtagagggctatcctgatcagaataccggcattctgaacagtagcggctatggctttgcgggctggtataaaggacttcgcacgcagacagcggttgacgcttatgcttccggaccgtttgagctgtttggtcgtcagcatcagttagtagcgggtgtggattacagccgtcagcgtaaccgctacctgtactcgtcttcaatcctttcacctgctgacattggggactggaacagctggaatggtgatattccagagccgaactggcctgaatgggcgctgtcctcggaagacacgacccgccaaaaagcgggttatgctgcagcgcgattctcgctggccgatcctctctccctgattgtcggtgcacgttatacccagtacagctcaaacggcacgtctgcagacatggaaaaaaacaatctgacccccttacggcgggctggtttatga

SEQ ID NO: 197986 - DNA, 591 bp, Klebsiella oxytoca
atggcatataaaaatcccagccttcgcgaaaggcacaaagagatcacccggagggaattgtccaacctcgggcttgaattatttataaaacagggctttaaccaaactacaatcgaacacatcgtcgagccgcttggtgtggctcggcggacgttctttcgttactttaagaccaaagaggatctgatcttcttatggcacgacgataaaacggttgagttggtcaatgaattgaggaggcgccccgatcacgagggcccattggaggcggtcagagagacgctggccacgacgctcctgcgatatgacgccaatcccgacatggctttcgcattggtgcgcctgctgaaggaaacgccagctctgctcgcaaaggaatgcgaaaagaggatggagcgggaggtggcgcttgctaccgctctaatgggacgtgcaagtgaaactggtctgagcatgctcaaagcgcgcatcatcgtgggcgctgttacgtcggcatggacggcggcccttgacgagtggtatgcggatggcggtaatcagcaactgcggcccatcatggccagggcgttctcgatggtgggtgaactgtaa

SEQ ID NO: 197987 - DNA, 1131 bp, Klebsiella oxytoca
atgagcctggaacaagaacaccttcaccagccctccatggggcacctccgaaagcactggatcgtttatctcgtagggacggtagccctgctcatggcggcgctggcgatcgtcgtcgccaagcgcggcccggcgcaggccgaagagactgccgtggcgacgccggcgctgaccgtgaccagcgccactcctcgggaagtttcctggcccacggagagcagggcttcaggcgcgatcgctgcgtgggaagaagccagcatcggtgcgcagataggtggctatcagctcattgatgtgcgcgtgaatgttggcgatgtcgtcaagaagggacaggtcatcgcacgcttcgatccggcgctgctgcaagcggattacgcgcaactgaaggcgaatgcagatcaggccgccgccaaccgacagcgagcgctcgcactgcaaggcagcggcgcgatgagcgaccaggacgtgctccagctcgtgacgcaatccaagaccgcagatgcgctgctcgcggccagtcagttgcggctgcgttacaccgacgtcagggcgccggacgatggtgtcatcagcgccagaacagcaacgctcggcaccgttgttccggtggggcaggaactgttccgcctgattcgacaggggcgcctggaatggcgcggagaactgaccgctgagcaactctcggaggcgaaagttgggcaggaggtcgcgcttgacctgcccgacggcaagaacgcggaggcgaaagttcgccagatctcgcccattttggatagtgcctcacgtctggccaccgtttacgccgatattccgtcgggaagtacggcgcgagccgggatgtacgccaacggcagactcggactcgggacgcgcgaggcgctggtggtgcctgccgagagcgtggtcatccgcgatggacacagccatgttctggtactggctgacacgagccccacaccgcgcgtttcactgcgaggcgtaaccgttggccgtcgcattggtcgagaggtagagatcaccggcgggcttgcccaggacgagcatgtcgtcgtccagggagctgggttcctcaaggatcgtgatctggtgcgtatctctcagggccaacctgcaggagcgaccatgccatga

SEQ ID NO: 197988 - DNA, 3084 bp, Klebsiella oxytoca
atgaacttcgctacctggtctattcgcaatcccatcccctcgatcctgctgttcgcgctgttggcgcttgccgggttgtgggggtttcagaagctgcctacgcaggacttgcccgacctcgatctgcccatggtgaccgtggcgttgtctcagccgggcgccgcccctgcacagcttgaaacggaggtcgcacgaaaagtagaggacgagctcgcgaccctgaacggcatgaagcatctgaccacatcggtcaccgatggtctggtgtcgatccaggtgcaattcgtactggaaaagaacctgtcggatgcgctgatcgagaccaagaacgcagtggacggcattcgctcctacctgccgcccgacatgctgcaaccaacggtcagcgcgtccaacagcgtcggtgctcccgtgctgacctatgccattgcgtcgtcccgcctcaacgaggaacagctttcctggttcgtggacgataccatctccaggaccgtgctcggcgtgcccggcgtcggccgcttcgagcggcttggcggcattgagcgcgaggttcggatcgaagtagatcctctgcgaatgtctgccctgggcatcacggcggcggacgtttcccgcgcgttgcgccaggtgcagcagcagtcttccggcggccgtggacagcttggcggcgaagagcagtcggttcgcacgatcgctacggttcgccaggcatcggaacttgcgggcttgcgaattgctctgtccaacggcaagagcttcaggttggaccaaatcgcgaccatcgtcgatggtcaggccgacccgacgcacgcggcgctgctcgatggggagcatgtagtcggttttagcgtgtacagggccagaggctttgacgaggtgcggctggcagacggcgttcgcgaggccctggctggccttaaggaggccgacccttcgctcagtttgacggagatttcagggtcgatcggccagacgctggagcagtacgagggctccatggcgatgctgtacgagggtgccatcctcgctatgattgtcgtctggctgttccttcgcgactggcgggcgacgctgatcgcctcgaccgctctgccgctgtccatccttcccgcgttcgcggccatggcctggctgggatttacgctcaacaccgtgacgctgctggcgctggcggtggtcgtcggcatcctggtcgatgacgctatcgtggagatcgagaacatcgagcgccaccggcacatgggcaaatcgatccgggaggccgctgaggacgccgtgaccgagattgccctggcagtcatggcgaccaccatgagtctggtggtcgtcttcctgccgacggccatgatgagcggcatcggcggcctggtgttcaagcagttcggctggaccgcggtgattgccgtgctcgcctcgctgctggtggcgcgcctgctcacgcccatgatggcggcctacttgctcaagcccgagccgatccccgagaaagaagatggccgggtcatgcgctggtacatggcaacggtgcgctggtgcctgaagcatcgcaagaccaatctggggggggcggtcgtctttctggcggcttcgctcgccctagtacccttcatcgagacgggcttcatcccggcctccgacagtggtaccacgaccgtgagcatcgagttgcctccggccagttccctggaggacacgttggcggtcaccgagtcggcccgcaaggccattgacgaagtcgatggcatcgctcatatcttcgccacggtaggcaattcgcaaagttccggtcccggtggaatgcaggcgggcgaggttcggcgcgcgtcgctcacactcacgctggaaccgcgcggtgacaggccatcacagcaggtcattgagaaggccgtgcgggagcgcttgatcgacgttccaggtgcccgttttgccgtcggtggtggtggaccaggccaaaagctctcgatcatactagccagcgacaatgccgcggcactcaaggcgagcgcggacgcggtggaagccgaactgcgcgacgtcaagggccttactggcattgcctcgacggccagcctggagcgcccggagatcatcatccgtcccgaccttgatcgtgccgccgagcgcggcgtgacgaccgaggagatcggggacgtagtgcgggtggcaaccagcggcgatttcgacgctcaggtggcgcgcctgaacctcgacaaccgccaggtctatatccgcgcgcgcattccagatgccgcgcggcaggacatcgacacgctcggcaacatgcgcgtgccggggcgcgacggggcggtgccgctggcaagtgtcgccagcctgacagtggaaagtggccccgcgcagatcgaccgccatgaccgtcttcgcaacgtcaccatttcggccgatttgggaggtaccgcgctcgggacggcgcaggcggcagtggccaacctgacttcgatcaagtcccttccgtccagtgtgaaggtgattgaggccggcgacgcggagatcgttgccgaactcggcgggggctttgccatggcgctcgtggtcggtgttttgtgcatctactgcgttctggtgctgctgttcagggatttccttcagcccatcaccatcctctctgccattcccctgtccatcggtggcgcgttcctcgcgcttctggtcacgcgcagccagttgagtgtgccttcgatgatcggtctggtgatgcttatgggtatcgttaccaagaactccatcctgctcgtcgagtatgcggttatcggtatacgcgagcgcggattgcctgttcacgaggcgttgctggatgcgtgccacaagcgtgcccgtcccatcgtgatgaccaccatcgcgatgatcgccggaatgttgcctatcgcgttggggctaggcgcggattctagcttccgccggccgatggccatggcggtaatcggcggcctcatcacatcgactgccttgagcctgctggtcgtgccagctgtgtttctgtacgtggacagggtcgagaaatggctggcatcgctggggttctttcgacacaccgagcgcgttaccgctggcgaggttgagcgatga

SEQ ID NO: 197989 - DNA, 351 bp, Klebsiella oxytoca
atgacgcaactgacctcgtcacaacgcagcagtcctgaaattcggtcgtcacatcgacacttgatgcgcagcgcctacattgacccgtgcgagacgacccggggtcgtcaggacggtatggaaatcaggcagacggtgcagtgcggtcgtctgctgatgatgttccgcgaactcatcgacatggcccgatggcgtggtccgcaagctgccattccccagtacagggggaggcattttcacgttttccttaaaagggatcaatcatgtcatctcgccttcactacgcagcccgcctgcgccggcagccgtcttacgctgcactaccgatcctggtcgctggcatttttttaa

SEQ ID NO: 197990 - DNA, 693 bp, Klebsiella oxytoca
atggccgaagccggacccagtgaacctacgtgggggattggcgttgccggtggcatacagtaccgcgtctaccgggacttcgacgatcgcgttcgcggcttgccgatgatcacctatgagaacaagtggattcaggtggccgggcctggcctggacgtcaagctgccgtcggtcgggccggtgtcattcaggctgcgtggccgctatatcatggaggatttcgattcgggcgattcgccgtacttcgcgggtatgcgcgatcgggatgccagcttctggatcggcggcgccgctatctggcgtgccggcattgccaatctctctgccgaagtgctcaaggatgccatgagcaacagcgaggggacgcgggcgacgttgcagatcgacaggcgctttaccgcaggccctatcgggctgaccccacggttggcagccgaatgggtggatagcaagtacgtggactactactacggcgtaaggtcggacgaggcgcagagctggcgcccggcctacggcggaagctccacggtcaataccgagatcggcctacgcgtggactggcagcccgtgtccaggcacaacgtgtttctcgatatgggcgccaaacgcatgggcagctcaatccgcgacagtccactggtggaaaagagcacgcagttcggcgtgggccttggctacctctatcggttctga

SEQ ID NO: 197991 - DNA, 963 bp, Klebsiella oxytoca
atggcaattttcggcaaatccagacgtttcagaaatcccgacggcagcgcagcgcccggcactgtggtgccggcatttcggatgcttgtcctggatagtcttgcaggccggggccgtggtgtacctggaaaggcatcggtgccatgtgtggcgcccgatcttgccgcgatcgctactccgccaggcgtgggtgaaggcgcacgcctgacctggattgggcatgcgagttggctgttgcagctcgaaggaaagtcgttcctcatcgatccggtcttcggtgagctcgccctgggaccaggggggcggaatgttccggctggcctgcaacccgagaacgtgccgcccatcgacgcagtgctgatcagtcacaaccactacgaccatctggatcttccgtccgtgaggagcgtcggtgcgccggtgattgccggcctgggcatgacctcgttccttgcaaaaaaaggagtttcggcaagcgagttggattggtggcattccgtagacttgggccccgtgagggtgacttttgtaccggcccaacactacagccgccgcgggctgaccgatgccaacgagacgctgtggggcggattcattgtcgagggagcttccgcctgcatctaccactcgggcgacacgggatatttcgacggcttcctggagatcggccgacgcttcccgatgatcgacgccgcgcttttgcccatcggcgcctacgagccgtcctggttcatgcgccgccagcacatgaaccccgaggaggctgttcaggcgtacagggatctcggtgccggccacttcttcgccatgcactggggcaccttcaagctgacgtacgaaccgctcgatgaaccaccggttcgcctggccgccgagtggaagcgcctgggacttcctggagcggaaatgcgcgttcttgccgttggcgaaaccgcgagcgtgtggcggttcccgaatgattaa

SEQ ID NO: 197992 - DNA, 1023 bp, Klebsiella oxytoca
atggccttgggagcaatgctctgcagcggtccggcgctgaccgacgagggctgtgaccgcaaagggattgcggcggaatccaccgtcaatctgcgtgtcgacaacgacatgttcggcggtctcggtcaggaccagggttattccaatgggtttctgctgaccctggtctcgcccaatctgattcatcgggctgatgacccgtgcctgcccgatatcgcaagacggctgaatcacgcgttttccggtttgcaacctggcggattcgatgagctgaacatgaccatgggggtagggcagacgatgtacacgcccacggaccgtgtgccacacgaactaataaccgacgatcggccttatgccggcgcgctgatgttcagtgtgggctacaacgcccgcaagggtgaccacttgcgcacctcgcagttgcggctgggcatcgtcggccctgctgccaaggcaggtgaagttcaggactggtggcacggtgtcatcggcgtggaccgcttcaacggctgggacaaccaacttcacaacgaaccggtggtgcagttcatacacgagcggcgcaatcgttttgcgccgatgcagtcctccgggccgtggcgctgggacgcgattgcacactggggcggcagcctgggcaatttcgccacctacgccaataccgggatggagttgcgtttcggctacctgttgccggatgacttcgggacggccccgctgcggcctgccggtgagaacacgtccccgattcgaacgagcgcgacacagggttggcgtggccacctctttgtcgccgcagatacccgctgggtcctgcacgacattacgctcgacggcaacaccttccgctccagccacagcgtggacaagcgcccattcgtggccgacatcggctatggcatcgcgttcacccacggtcactggcgttttgcctttgcacgctaccaccgcacgcgcgagtttgaagggcagcacgagaggcccacctttggcagcttcaccatcggcaggcgtttctga

SEQ ID NO: 197993 - DNA, 615 bp, Klebsiella oxytoca
atgaaacgttaccgttattatgggtttctcgcacctgttttgtttctgaatgcctgcgcttcaccgccggtacattactactcactagtcgcgccaccccggggaacaatcacgacagagcctccggcccccttcttggttgatgtattgccggtcggtatcccgtcacagaacgaccagtcacaactggtcgtacgacagggcaccaccggtgccttcgtcctcgataacgagcgctggactggcccgctggatgatgaaatacgtactgccttatcgtcagtactgacgcagcagttggcaacccaggatgtggccgggctgccacagacttccggcaggcctgtactcagaatcaaacttcagttgcgtcggtttgacgcctggcccggacaacgggttcagcttgatgccgactggagtttaggattcgcgcatgaggcgggaagtccacgaatgatctgccggggctatctggacgagcccgctccaggaggctatccggaaatggttcaggcccaacaacgactggtcgctgcgttagccagcaggattgcgacagatgcacgagcctgggcacgttcccgtcaggcagcttgcgtggacctgcggtag

SEQ ID NO: 197994 - DNA, 1662 bp, Klebsiella oxytoca
atgaataacgaacccgaacgtatccaccagcccggcaatcctgcagtgtcccgccgtcgctggcgtatttccctggtatggctggtaccagccatcgctgcactggtcgggctgtcaatgctggcgcatacctggctgtcagcaggtcctgaaatcaccatagccttccgtacagcggcaggactggaggcaggcaaaacaccggtcaagtacaaggatgtgaccgtgggcacagtaacggcaatcgcactgagtgacgacggctcgcacgtcgtcgccacggtctcattgaccaggagcgcggaaagtctgacccgcagcgacacgcggttctgggtcgtgcggccgcgtatcggcaccggcggtatatcaggcatcgacacacttctctccggcgcctacattgcggcggatgcaggctcggaacaagcctccagcaaagtcttcacaggccttgaaacgccgccaacggtcattggaggtatgcccggcaagtcatttgtcctgcataccgaagatctggggtcgctggacgttggctcgccggtctactaccggcgcatccaggtgggccgggtagcctcctacaagcttgatgatgatggcaatcacgtcagcttgcaggtcttcatcgacaaaccctacgacagctttgtcactaccgatacccgattctggaatgccagtggtgtggatgtttcgttgggcgctgacggactcaagctcaaaacgcaatccgtggccacaattgttgcgggagggatcgctttcgccgcctccgcacgcggcaaagttcacattgagcaggcacctgaaaatacccagttcattctggcaccggatcaagccagcgccatggcggaacccgatgggccggagcagttcgtccagttacgcttcgaccagtcactacgcggtttatctcttggtgctccggtccaattctccggggtggatctgggtaaggtggtgtcaataaacctcgactacgatccgagtacgttccgatttcccacaaccgttggcatcgtggtgtatccacaacggcttgggcgcctgttggataaactgccaggtacaaatacagaccaacaagccgcgcagttcctccgtgaactggtcgaacatggccttcgcgcccaggccagatcgggaaacctgctgaccggtcagctttacgtctcgctggaatttgttccgaatgcaccgaaaagaacgatagacgtatcggcacgcccactaagcgttcccacaatcagtggcagtttcgatcagttgcaggggcaggtggccagcatcgtcggcaagatagagaagatgccgctcgactcaatcgggcggaacctcgacagcacattagcagaactggacaagacccttaagcaagtcaacagtcagacgttaccgcaaaccacgcggaccttgctgcaggcccagcaggccttcggagccgcacaaggtgtactggccgaggatgccccattgcaacaaaatctgggccagacgctacaggaagttcagcgggtctctcgctcgctacgggtgctgacagacatgcttggccggcaccctgaatctctgttgcgcgggcgcccggactctccgtcgcctcctgccacagtaaaagacaagaccgccagtcaacaggaatcacgtcaatga

SEQ ID NO: 197995 - DNA, 624 bp, Klebsiella oxytoca
atgaatttgcatccccacgcacgccacctggatgtcatcggctgccatgtctgcgggctcgtttgccaggatacgcttgacgaaacggagcacgtacactgccctcgctgcggcgcatcactgcatcgacggcgccccgacagcattgtgcgggcctgggccttgttgatcgctggcttgattttctacattccggccaacgtgctgccggttatgtataccagcctgctcggcagtggcagcggtagcaccatcatgaacggcgctatcgagttctggaaatccgggtcttatggcatcgctctggtgattttcatcgccagcgtggcagttccctgcaccaagtttcttgtcctcgcactgctgctgataacttcacaacgacgcagtaactgggcgagacgcgagcgagccagactctaccggctcgttgaggtgatcggctactggtcaatgctcgacgtactggtggtggctgtagttgccgctctggtcaagttccagggcctgagtgatatcgagccacgcattggcatcttcttctttggcgtggtggtgatccttaccatgctctcagccatgaccttcgacccccgtctgatctgggatggtgaaacagaatga

SEQ ID NO: 197996 - DNA, 654 bp, Klebsiella oxytoca
atggcaaagaaactgagtctttccggaaaacacatggtctttccggacctcgttgtctgcgagcattgcgacagggtctaccggcgcattgcactggccccggatgaggttgctcgctgcgagcaatgcgctgccatcctctatcgcgctaaccgtctggatgtcgagcgttggctcgcgcttaccgtcgccgcagcgatcgtgttcgtgattgccaatgtctgcccggtcgttcgcatcagtatgcaggggttgcacaacgaggccacgctctggcagtcggctgcggcgctcgcttatggaccatccgcacccattgcagtggcgaccgcaatatcaattatcgtggcacctcttctccaaatcactctgctggcctgggtactggtttttgcccgtgttggccgtcgtgcgccaggcttcgcgcaggcaatgcgcatgctggtcgcgctgcgcccctggagcatgattgaggtcggtctgctcggcattctggtcgcagtcatcaagctgtcaagttaccttcaggtggcgcccggacctggcatatgggctacggccgtattaatgctgctgattacgctgatcgccagccgcgatatccactggctgtgggaactgaccggccagcaaccgcaggcggtccgcgtatga

SEQ ID NO: 197997 - DNA, 1548 bp, Klebsiella oxytoca
atggttgatgccacctctcagcacgaaagcccagccgcgcgaccattaacgggggggaaactcatcctcgccgccattctgatcgggctgggcaattttttggtggtgcttgacaccactatcgccaacgtctcgattccccacatcgccggcgggctaggggtttcgtccagccaggcaagctgggttatcacctcctacgcagtggccgaagcgatcactgtgccgcttaccgggtggctcatgcgccgcttcggtggttttcgcgtgtttgtaacctcttatctggccttcggcgcgctctcgctactgtgcggcctgtcgggcacgcttggaatgcttatcgccgggcgcatattcctcggattggccgggggtaccatcattcccctgtcgcagacacttctgctgcgtatattcccaccggagaaggccaccatcgcgacaatcatatgggcgatgacaaccacagtcgcaccgatcgctggccccattcttggtggcacgatctccgataatatcgggtgggagtggatattcttcatcaatgtgccgattgctgccgccggtggccttgggcttctgtatctgatgcgaggccagcaggaaacgctcaccaggtctccgattgatgtagtgggtcttggtttgctcattgtatgggtcggcgcgctccagatcatgcttgatgaaggtcgcaaccatgactggttcgcggcaacagaaatccgcgtgcttgccgtgattgccgccatcggctttgtcgccttcctgatgtgggaactgaccgagaagaaccccatcgttaatctgcacgtgtttcgccatcgcggcttcgtagcggcttccgttacctactcggctgcgttcggcgcgttcttcgccagcattgtcctgatcccgctttggctgcagcagaacatgggctacaccgccacgtgggcgggatacgccaccgggatcatggggatcctcgcagtaatcagttcccccatcatcggtcaggtagcggcaaagctcgatccccggttgatcgtatcggtaggattgctggggcttggcggcatatccgcgtggcgggtgggatttacgccggacatgaccttcctccagatggcctggccgatgctgctgacgggtccattcctgatgatgtttttcatccccgtaaccggcctgtgtatggcgagcgtcacgtcaggggagcaggccgacgcagccgggatctcgaacttcatgcgaacgctggccggcgcgtttgcgacctcaatagttcagaccgggtgggccaacgcagcacgtgagaaccagaccgagctggcaagcgcgatgacacagggacaggccaccctcgacaacatgatagcaagtggaatgtcgaaagaggtcgccacaaccacgcttaccagcatcgttgaaggccagagcgtcatgctcgcaacactcaatatgtttgctgcgatcgcgctctgcttcgtcttcgccgccgcattgatctggttctctccaaaaccaaggggaccaatcgacatgagcggcggccactaa

SEQ ID NO: 197998 - DNA, 1161 bp, Klebsiella oxytoca
atgtctgaatccagcgttactactgaacaagacgttcctgctgccaacaacaaaactgcggacagaggaacgcaaaacgccaggcgaacgcgactatttctgggcctgctggcgagcgttgctacgctcggtggcgcctattacgcatacgaccttttgatagcatcccgccatgttgaaaccgacaatgcctatgtcggggcgaatatcgcccaggtgacacctctgattggtggtcccgtgcgcgaggttctggtggatgatgcgctgcacgtgaaggcaggggacgttctcgttcgactggacgatacggatgccaggattgcgttaatgcgtgccgaggctgagctggcgctgactgaacgccgcgtgcgcggccttatcgccactgatagcggccttgacgcgcaaatagcggcaagggccgccgacgaagtgcgtgcccaggcacaggtttcttctgcgcaggcagatcttgccagagcgaagatcgatcttgaccgccgcaacgccctggctgagtcaggctccgtctccggtgaggagttaaccacggcgcgcaatgcctacagcactgcgctcgccaatctgaaggttgccgaagcagcccgcacacaggccgcggccaatcgtgccgcagccatcgggagccgcgacgccaaccgggcactgatcgacaagagtacgcctgacaccaatcccgaggtactggctgcccgtgctgcacgggaccaggcacaggtcgacctcgaacgcactatcctccgcgcccccgttgatggggtcatctcccgtcgccaagtacaggttggccagcgtgtgcagcctggcgcaatgctgatggtcgtggttccgatccacgccagctatgtggacgccaactttaaggagggtcaactcagcaaggttaagcccggccagtcggtcaagctcacctcggacctctacgggaacagggttgagtacgacggcaaagtcgtcggtttctccggcggtaccggctcggccttttcggtcgtgccggcacaaaacgccaccggcaactggatcaaagtagtgcagcgcctgccagtgaggattgcactcgatcctcaacagcttgctgaacacccgcttcgggtcggcctgtccatgaccgccgatatcgacgtgtccaactga

SEQ ID NO: 197999 - DNA, 1437 bp, Klebsiella oxytoca
atgtggtcgtcacatattctatggcaaagcaacatttcgggggtaggcactgcccttacggctgcgcttctgctaagcagttgcgccaccccaccacaaaacactgaagtggcgccggcaggaacggaaaacttcgcgagtgcgataagcctgtccgcacctgagacgaactggccatcggaccgctggtgggaaggattaggcgacacccagctggattcactgattgctgaggggttgaaaggagcgaccgacttgcgggtggcttcagcacgttatgcccgtgcagaagcactggttcaggaaacccggagtcagttgctccctgcattcacagcgaatgctgagggaggatcgacgaagcaaagctacaactatctctccccggaaagtggccttcccaaaggctggcaaggttatggccagacgacgctcaatctcacctgggaactcgacttctggggccgcaaccgggcggcattggcagcagcgcgttccgaagccgaggcagcaaacgccgaagctgcatccgctcgtctggttgtttcagcaggcatcgccagtgcctatgcggatctggccggaggttacgccgaacatgacgccgccgaacatgcaatcgaagtgcgtaagcgcacactggaactgattgagggtcgtaataagcaagggctggaaaataacggtgcggttgagcgcgcccgttccgcactcgccacagcacagggcgatctggctgagcagaacgaatccctttcccttacccgtaaccggatttcagcgctgattggggcaggccccgatcgcggactgactattaaacgtccgggcgcgactatcactgacagcttcggccttccagccaacctaccggccgaattaatcggacgacgacctgacatcattgccgcgcggctccgggctgaagccgctgccagccagatcaaggaagccagggcggccttttatccaaacgtcaatctggcaggtctgattggcctgcaggctctcggcattggcaatgtttttaagtcagggtccgagtttggaacagtcggtcctgccatcagtttgccgatctttgacggcggacgtctgcggggaaggtaccgtgccgccgaagccgattatcaggtagccgtcgcccagtatgacggcgtattaacgcaggcgctgcgagatgtggctgatgcggccacgagcacgcgcgcgctggatttgcggctcggccatgcactcgaagctgaacgcgctgccagtgccgcgtggatcgttgccagcaatcgttatcgcggtggtcttgcgacatatctcgatgtgttggctgccgaagactccctcatcagcactcgccgcacggtcgcttctctgaaaagccgcgcccttgttctcaagattgccctcatccgtgcgctcggtggcggctatcgttcatga

SEQ ID NO: 198000 - DNA, 609 bp, Klebsiella oxytoca
atgagagtgaagacggatgagcgccgaagggcgatccttaacgtcgcaattgagatatttcgcgatgtcggttatgcgcgcgccagtatggcgatgatctcggaccggctcggaggctcaaaaggcaccctgtatggttatttcaggtccaaggatgagttgttcgctgctgctatgatggcagtgatggaagaacaagcagatgagattatgggactgcttgacctgtccgagccggatgtctcaatggcacttcggcgttttggtgaggctctgcttgctttgctgacttctgcagacacgcttgcgttcatgcgagccgcaattgccgaaggcgcaaattcaaagttgggagccacgctctatgagatgggggccgggcgggcgtgggatcaaatatcaaactatatccttcgacagcaggagaagggtagtatccgtgcggtggatgctcgcgtagccgcggcgcatttaaagggtttgctcgaaatcggatttattgaaccgttgttatttggcgctcaaccctggtttacaccaaaggaagctgtagcagccgcagttgatgcgttcctgcgggcttacggtagtaaccccggtggtgagtaa

SEQ ID NO: 198001 - DNA, 1617 bp, Klebsiella oxytoca
atgtcctcgctttatggctctgatgcaatgggtggcgttatcaatatcatcacccgcaaggtggcccaaacctggggtggttcgatcagtcaggactatacgctccaggaacatggcgattcaggcgactcgtatcagcaacagttctatcttggcggaccgctaaaaaacgacttgctgggactgcaactgtgggggcgaaattaccatcgcagcgaagatgatattctcaacggcttcaatgctgcccgtgaccgtgatctgactgccaggttggcgatcactccgacgcccgatcatgacatttttctggaggccggcacttcggagttgcgtcgcagaagtaacccggaaaagacactggcggcaaccagtcttccgtcgcagaccgagcatagccgtgagcactattcgctgtcgcacaccggacgctgggggccactcgtgtcggaagtgtcgttgcagagagaagttgcgcagcgtgaaagctattctggcaacacgtctggcggctatacacgcagcagccgcgctcccgagatcgagaacaccgtcttagacgccaaagcgacgatgccgttggccaaccactttctcgtgttcggcgggcagtggaacgagggcaagctgaccgatcagaatcctggccgccgaacaggcctggacgagcagttcagcataaggcaaaccgcgctgttcatcgaggacgaatggtccctcactgatcagcttgcgctgacgggcggcctgcgtatggacgatcatgagatatatggcatgcactggagtccgcgcttatatgcagtttggcacggcacggaaaccctgaccttcaagggcggcgtgtcgcgcggatttcgtgctcccgacatccgtgtggtcgctccgggctatgcgtacaccgctggcggctttggctgcacctatggccccgaaggtacgtgcagcgtgatcatcggtgaccccgacatcaagccagagacaagtaccagctatgagctggccgcgctttggaacaatcatgccggtctgtcggccagcgccaccgtgttctataccgatttcaaggacaaggtcgacaatgcattagtctataacgccgatggaacgattgcccgctggtccgaagatccgaactaccggcttatgtaccactacaacattggcaaggccactatcaccggcatagaactgaatggacgctggcaagccacttcaacattggccttcaaatcgggctacacgttcaccgactctgagcagaaaggcggcaactatgatggctatgcattggcacgaaccccacgccatatgttcaacgcgcgtgctgactggacagtgctccccaaactgtcgctatggtccgcatttagccatcatggcaaggaagtcaatgccagcctgcgctcgggtagcaacggtacactggtcgccagcggtgtaagggaatacggctcttacaacatcgtggatatcggcgcatcctattccgtaacaaagagtaccaccctcaatatggcgatctacaacattgctgataagcgcctggacgaggcaacttacaatacggtcggcgatggccgcagactgtggacgagtttgagcgtcgccttctag

SEQ ID NO: 198002 - DNA, 405 bp, Klebsiella oxytoca
atgaaacaaggtctttcagtgcgacttggcagcttttgtgccctttacgcacttatcagcttaccagcacatgccgaatctacggatacggcgccacccttagagtcagaggaaatcgtcgtcaccgccacaggtttcgaacagttggttgagaatgcacctgcctcgataagtgtcatcacgcgtgaagagctggaaaagggcgcatttcgcgacctgacagatgcactgcgtgatgtagaaggtgtagctgttaccggcacctcgaatgagaaagacattttcatccggggtctaccgggcgaatacacattgaccctggtcgacgggaaacgtcaatcgacgcgggacgcacgtcccaacggcagtgcaggtttcgagcaaagcttcattcccccctcttga

SEQ ID NO: 198003 - DNA, 930 bp, Klebsiella oxytoca
atgaagagagtgcagttcggccgctacggtggccctgaagaaatgtcttttggccagtacgagctgccaccgcttgaggcgcagagggtccgcgttcgcgtcaaagctgcagcgatcaacccgctggactggaagctgcggcgcggcgtcatgaagttcgtcactggacggaaatttccgcaaggcatgggttcggatttcgctggcgtggtggaagccgtaggcgccctagtcaagggaattaaagtgggagatgaagtattgggcactgccgagatcaaaaggcaaggtgcattcgccgagatcattgatgccagcgcggacctggtggtgcaaaagcccgcaactctctcattcagcgaggcggcctgccttcccattccggccgcgacagcatgggcagctatcgtcggtgttgcccgggccagcagtggttcgaggatcttcatccatggttgcagcggtgcggtgggcagcagcgcggtccagctcgcacttgctcgtggcgcgcatgtctctggcgcctgcggtgccaactcgctggccaacgtgaaatctgctggcgtcaatccagtatttgcctactcggacaaggcttcattcgcatccgatagcctttacgatgctgtattcgacaccctcggtaccctgcctgttgccgatgggctcgcgctgctgaagccccgaggccgcttcatcgacatcaatccgacgccgggcaggatggtgcgagggctggtgtccgggcgctacaagatgacgttctcgacaggcggcttcaagaacctggaggagatcgccaggttggccggcgatggcaagttgcactcctcaatcggcctggaagtacccttctccgacgcattgtccgtgattgcggacgcagaactcggcaaccggccagccgggaggatcgtgttggtcatgtag

SEQ ID NO: 198004 - DNA, 1347 bp, Klebsiella oxytoca
atgtcgccgccggcggcatccggctcactgacgaagatcatgccgaactcgcttgagtcagttcgccggacgatcctgggccgcgcgatgcgctcttgtgcgctgatcgcagcagtcgtggttgcagcaggcctagcggccggctgcaccacggtgcgattcagcgacccgccctctgcatcagtgagcttcgatgactatcgacgcgacacgatccaacatatcaaggctggccgcagcttccagcttgccgatcacgatgccgaactggcctggaatacgccgcaggagtggcgacccgcgtcgtcggagaacggcagccgtccccgaaaggggattctgctcgtgcatggactgggtgactcaccatggtcgttccaggacctgggccagccgctggcaaatcaaggatttctcgtacgaacggtgcttcttcccgggcacggaacacgccccgaggatctgctgaaaacgacagcggaacaatggcggcaggttgtgtgggagcaggccaaagcactgcagcaggatgtcgagggcccggtgtacctgggaggcttttcgaccggcgccaatctggttcttgactacgcctattcgcatcccgaggtcgcagggctggtgctgttctcgccgggatttaagagcatgcccttcgattggctggctcccctggcggcccgtatccggccctggctcatcaccccggatggaacgaggtcgatgcagaacgccgtcaagtatttcaacgtgcccgccaacggattcgcgcagttctatcgaaccagcgcgaacgcacgtcgactcttgcgagagcagacctatgacaagccggtcttcatggtcgtcgccgagcacgactccgtcttggacaccgactatctactccacgttttccagcagcgcttcacgcatcccaacagccgcatgatctggtatggagctgaaccgaaggaactggtggatcggcggcgcgtcctggttcggtcagaccggttgcccgaacggcgcatcagccagttctctcacatgggcctgacgttttcgatggacaaccctgtgtatggcgagagcggaagcatgcgcatctgtctgaacggctttagtacagaagacacccaggcctgcgagaaaggtgtgccggtctggtattcggactggggttaccgcgaggaaggcaaagtccacgcgcggttgactttcaatccgtatctggattggcagacctcagtaatgacagtggtgctggagggggcatcatctggcggaacagcggctgcaggcagatcaacgatcgatggcggtgagaacgcattgtcccatcaatacagcctaacgcggcattga

SEQ ID NO: 198005 - DNA, 870 bp, Klebsiella oxytoca
atgaacacatccgtaaccaatccccttgagttccgtcttggtggagacctctccatcaaccggcttggctttggcgccatgcgcctgccttgcaacggtttccgcggtccggctcgcgatccggagaccggccgcgcggtgctgcgccgcgcggtggagcttggcgtaaacctgatcgacacagccgagttctaccagagcaccgatggcgcagtaaaagccaatgcgctcattcgcgaagcgctgcatccctatccttccaacctggtgatcgcgaccaaggtcggagtcgtattcaactcggatggcagccaccggcccgccacgggtgcggacatgcgcaagctcgtcgaggagaacctggcaagcctgggcgtaaactgcctcgacctggtgtatctgcgcatcggtgagatgacggtgccacacggcgagtcgctggccgagcgcttcgaggcgctggccgcattgcgcgaagagggactgattcgccatctcggcatcagcaatgtcgatatcggccacttcgacgaggcccgagccatcgcccccatcgtggccgtgcagaacaacttccacatcgccagacgcgaggatcggagcctgctgcaggcgtgcgaagaagccggcatcgccttctgcccgttcttcccgcttggcggtggcatgggcgagatcgacgatgggcggcttacccgtgtggcgaagcggcagggcgctacacctacccaggtcgcgcttgcctggttactggcgtcttcgccggtcatgctggcaatccctggcactgggtcggtccagcatcttgaagagaatgtcgccgccggcggcatccggctcactgacgaagatcatgccgaactcgcttga

SEQ ID NO: 198006 - DNA, 1245 bp, Klebsiella oxytoca
atgaacaatcaaattagacagacaggaaaagaacatgtgactaagcctacagccaacacaacaggtgcaaactctgagactaaacattgggcacaaccgagtttcttcaacgacaacgttctgctcgatgcgctgatcaagcacatcctgggcctgatgccgtatggcatgaccgacttcggcgaggtcatggacgtggtgcatcagctcaagggcagcgatgaagagacctgggtcagttcctgggcggcacttgccagccggttgcaggagagagcgcaagaggcggacagcaaaggcaagcgcgtcactgcggccagcgcctacctgcgcgcttcgacgtactggcgttgcgcgttgctgtacttcagcgacttcgaggacaagcgtatgaaggagtacgcagtcgccagcgcatcgtgctacgagcgccacatcactctgtccggctaccccgctgaacgtatcgaaattccctacgagggcggcttcctcccgggctacttctacaggtcaccccatgctggcgaaaaagccccgctgctcatcgtcacaccgggccgggatacctgggccgaggacactcgctgggtttgcgagggcgcgcttcagcgaggcattcattgcctgacctacgacggccccggccagggcttcgcactgcgtctgaacaacctgactttccgccctgactgggagaaggttgtcagcccgctgatcgacttcgcgttggaaaggttctccgagatcgatgcgtccaagatcgcgttgatgggcttgagcttcggtgggtatctgggaccccgtgccgccgcgttcgacaaacgcatcaagctctgcatcaccgaccccggcaacatcagttggggacgcgagatcatcaagcaactggagcccctcgctgaccggccgctggcagagcttcctgagaacttgcgcaatctggtgagtgattacgcatggaagcacggcgtgcccaactcgatcaaagatgtagtgcaggccctgcagccctatgacaactcggccatcctggatcaggtgacctgcgaaacgctcgtactggatggcaccggcgaggtcttccacggtgccaggccgttcttcgacgccttgcagtgcccgaaagaatacctgctgttcgatgaaacctcgacagcacagtcgcactgccagattgggggctacgccacggccaccgagaccatcttcgaccgggttgccgaaaggcttgggtgcgcgtga

SEQ ID NO: 198007 - DNA, 675 bp, Klebsiella oxytoca
atggtatccgacgaaagaatctttccacttaagcataggactaccagaggtgctcaacgtgttcgtgatttgatcgaagccgcctccgaattgttccttgaacgtggctttgatgcagtcgctgttgatgacgtaattgcgcgtgtcggcgggtcgcgaagtaccatttacagccactttggaggcaaagaaggccttttcaaacatgccatgatagacctctgcaccgaggttacgaaaccacttgatcaaatgattatcgcggatggagaacctaaagaggcactgatggtcctcggccggcaacttctaatatccgcattatcaccgcgtaccctggcgctgcatcggcttctcgtcaacgaaggaaggcgttttccggacgttgcaaaggctatgtgggacgtcagctatggcaaagccatccaaattctttcaacctggattgccgagcaacagcagcctggaaaaggattttgccgcgatgttccttctaaagcgctggcggagcatttcgtgagtttggtggccgccaacacaaagcttcaggctgcatcgggacttcgatcaccatttttgtccgatgccgaaattgatgaaatcgttggtcacgccgtacaaatctttctctatggcgcagcaaacggttctacgggacatgacattgagaaatga

SEQ ID NO: 198008 - DNA, 1815 bp, Klebsiella oxytoca
atggaactaatctattcatatattcattcatgttggggcgagaattttgaattaggtctaaactttacgcgtaagttttctgttaattattctttgaatacgagaaaaataaatatagaacgaacgcaggaaatagggttaagcaacttttttggtagcaacatttcgaatgttactgcaattgtcggccgcaatggagtcgggaaatcaaccctccttaatatacttggtttacagcgcttggatcacaatgatctttacaggaatgaggaggccgtatggttttgcctgtatcatataaaagatgatgattttgctatcgaaggagtatcaccaaaaaacttcttttcagacgtgatacatcaagttaacgagggatactttgcctatgcttttaaattatccgatgaattaaatatttataataatttacaagattattctgtagattttcataactccgtttcggtgttgtacaatccgaaggttaatgttagaaatagatttgatcgagagtatggtaactacggttttaagcgcgcttacattaatcagaaaaatagctatgtttatctatttctatgtgatgataataatatctttgaatttaataaaaataatattaatttctcacttaaagtgcctgcaaatttcaaaaatactgataccaattcaggggtaagactaagtatttttaatgaaagaaatttctataccgcagatttcattcctatcccgggccgaaaaaaaacacctagacttgaaagtgctaaacagaattatattttacatttgattgaaagtgtcattaatgattattttttgaatacaattaaaccaactaatctcggtgttttagatgaggcggttgatcagcaattggttgataagtttttatatgagctggatgagaaatatactggcgatatgctggattatacatcgattaaaaattatctaattgaagtcatgcggcgctttaaagacatttcacaagaagcaattgggatcgacgagataatcgaatggggtgatgtaatcaattatttggaggcattgccaactgaatggttttccagaagcgggcgttattatatggtatccataccatgtacaaaactggaattcaagccagagatggttgatttaatggatgaatttgataaacctagttttgttacgtcggtacgccttgaacaaccaacaatgagttcaggacagcaggcattggtgtctaagattgcgagtgtccatgcggaaataaaatttcagattgccaatatgggtgtaaaaaacattatccttttacttgatgagtatgaggaacatcttcaccctgaatggattaggctattcttttcttacttggttaatttgcttgaggaattcaatgattctgccacaacgcaaattatattggctacgcattccccttatattataagtgacttgccgaaagaaaatgttattaaacttacgtatgacggtgaatccagaacggttgatgagtgtcactttgctttcggcagcaatatatacgatataatatgtgatagtttcttccttaataatacaatgggagagttcgcacgcttaaaaatagataagatgattaagctgctaatgtctgatgaggcgctgtctgatacgatgcatgagcaatatcaatgtttaattgatatgattgatgacagttatttgcgtacacatttacaaaatatgctcgatacgaaaatcccattcgcagcattacgttctcaaattacaactctggaatatagacttgcagagttaaataagaggttaaggaaatga

SEQ ID NO: 198009 - DNA, 1086 bp, Klebsiella oxytoca
atgatagaactcaatattgaggaggttttcacatcaaaatttgtgaatgaatataccaagatgatgctcaagaagctttcgccttttagcttggaattcgctgaggatgatattgaaatcagctatgacgatatacagtttatcctcttcaatccatttgatgtcagacaatccaaaaataattttattactgattattatcacttaacgcaatttttgttacatagtcagcagtattttgattttttaaaggttagatggaaaaaagagaggataaaggacatgaaactctcaaagaaattatcctttgaaagagagagaattataaatgatgtagggtatttgctattaaatagatgtgtgccttttaatttggctgatgtcattcgtactaataaaaattatttcgaattttataaaaaagttgacctgtttttctctgaattcaatgatagactaaaggaatatataaattataattttattgatggtgatattcgtagttttatcataaagaatatagatatgaaagtgtgcccgtactgtaacaggcaatatgttggttattataattttgaaaaaaaacaaaagaatatcgcctcgctggatcacttttacccacagtcgaaatttcccctttattcagtttcgttgataaatttagttccttcctgtgcatattgcaatgggatgattaaaaaatctcgattgtacccgatgaagcagatctacactgacaatgttgaagataaaatatattttagattgaaatataaaagtatagaaggattattgggttgttttgatgatttcgaaatattgacttcagatcatgagcatgatctattaaaaaaccattttttcaggcatcaagaaatatattcgacgcattcgctggatatctgcctgtggcttagaaagaaaaatttacataatgaaggttatcgaagacatctgagtagtgtattaaagaaaaacattacagaggatgagcttaaaatgctgttattcgagacgacgggaagcgcatctgatgtaaaaaataaaccgctcgggaaactaaaaaaagatattttaaaactttaa

SEQ ID NO: 198010 - DNA, 276 bp, Klebsiella oxytoca
gtgctcagatccttattcaccttaagcacactctcaggcgtgatattactgtccggctgcaaggaaaccaaatccgaagcctggtataagcagcatcctgacgaaacttatgcggtttatacgcaatgcctgaaggatggcgaggcaagcgataactgcgagtttgctcaacgggctgccattatgttcgctcaaattggcaagccaagaataaaagaaaaatttgagataatctttcagcaggaagccgaaaagagaaaatccgtcacacagtaa

SEQ ID NO: 198011 - DNA, 588 bp, Klebsiella oxytoca; identical to SEQ ID NO: 130797

SEQ ID NO: 198012 - DNA, 918 bp, Klebsiella oxytoca
atgcaaaatgatgttagtaaagtcaatacctttttccctaagccagcctgggttaccatccgtgaagcagtaaaaataaccaataaacttagggatataaaaatagcagaatatgatatttatcgacatgccttatatggtaacatttcactttcgatatactttcagtcacctgttatactgagaaaaattcgttcctcagtaaacaaaataaaactacgcccagtaggcgattctctaccatatcggctttgcatgcttgaacgaaatgtatttttaaatggtaaaggtttaattctcagtacagagggggaatatatctcacctgctcaattagtcatgaacataggtatgctgggacatgaattcgttctcattcagcggctacttgcacattctctaaatatgccgttacctattacaggtgcaaataatgccaattatggtattacaattactttggcaggccaatcatatcagatttttgaaaaaaagacatggcaggacagaattaatcagcaaatcacgcgattacctgcgcatatcattgcagatatttacgaggatgaatcagtaaacagattcatgaatttttccggtaaaggatattttcctgtttatgaactcccggaagatgcctgctttgtaatacgacaagaggaacttgataaattactcggtacacatgcagatcgctttacccacacttcatccagtaggctttccacacctctctcacgcttattctggttagcatgcaaacataatgattcgatcagtccactgctcaggcatccctataaacttcttcccatttttgaagaatgggcatcagtcgatggtattaccgatcatctgagcgcggacacgctgaaaagagcgcttgaacgcggatccccgaatcagagttcaaaataa

SEQ ID NO: 198013 - DNA, 1185 bp, Klebsiella oxytoca
atgatatacattattcgctttttctcagctgcggcctggagctttttttatcccttcatggctgtctggcttaatagcgttgtgggactcagcagtagcgctgccggtatcgtcgtcgggtttgctattgtggcgaaccgtacaggcgcgctcgctttccatcgcctgctggacaaaacagaacgaaaagcagagatcgcactgacgctgttgggtgttgccatatcagcattcctgatgctcgttgcagcagcaatgggcgtttctgatatctttgtctggattgttcttgcaacgttatttggcctgactaactctgtatcagtcatatcgcaaatttcatacatcgtgcatgttttccatgacggcgagcatgagcgtgtgctttcatatgaaaacgttgcagccaatgctggcgctggtattgcaccatttctggcgtccttcatgctttcaggtacaggttactggtttgttgcctttcccttgttacttgggacactgggcgcaatagccacccgtcctctaccctctgcaacccatcctgaggtggctgacacaaaaagtgaaacagcgaattcatcagaggatactggtaatcaccaaattatcgcttttatggtgattaatttcctgacgatggttggctatgcccagttttattatgtattgccgacctatgcggtggaaaagttttccagtgaactggtaggcactctatttcttctatcaagtattatcatcattatcggacaggtttatatcacttcattctcacagaggataagccgactatggcgggttgttatttcaaacttatgtatcggttcaggatgtgcattattaatattctcatctgagcagcaagccgttctgtatatcgttgtcgtcctgatcgtaaccggagaaatgatttgtggtccgttgtatcaggcgcaggcagttagaatctggcgaggacgtcgatctgttgtaatggcaatacagacctgtgtctggggcgctgctgaagccactgctacagtagcagggctgttacttattgcaggaaagctgagtgttatttccttcctgttgggagttttgacctgttttattgcagcagctggagcatggttatcaatactccagaaacgacctttaatcggtattgatacggataaaaatttcgcagactcttcataa

SEQ ID NO: 198014 - DNA, 1236 bp, Klebsiella oxytoca
atgcaatacatattaatcgtaggaataaacaagatatcggtgaaatatattagtgacgctattcgcaatgcaggtcacgaccttattctttctattgataaatctgcactttgtggcgatgccctacaagcaattagtgatgttcaatgtattcctcttttttctgaccataatgctctgtctgactatttgaatgccaatccggatgtcactcagaatatccacagcattacgactttttttgatgaattattcccgatggtcaacaaaatcgcggaggagtttaactttagaggaccaccctccgtctttgctgagctggcgtcaaaatatgcggtcggtaagatcgtccctgagcatgttccggaagaggtacaaatctcattttccgaagataaattcgttctaccttggcttaaggtacgtgaaaacaatacgatcatattgaaaccagcgatcggttcaggcgcgcttgctacatccacactgcatattgaagcagaccgggacccgacgcatacgatcaagtcagcgataatagcaagcggtgctaaatcctgtgaaacccttccctggattatccaagaatattgttcaggaacgctagtgagcatggaaggatttgtgcagggaggtaaaactatttacctagggttgtccagacgtgaaagagttcggtttactgaggtggcaaaccattttccaaacgactgcggtattgagcccatcgtacatgcaaaaattcaggcggctattcacgatcttgtcttacgttcaggatttgataacggattcttccactgtgaatttatcgccacagatacgacagcatatcttattgatgccaatatgggacgtttaggtggggcaactatcgtagaacaggttgctctggcctatggatattctccttcaactgttttgcagcatgcagcattactcccattaggtctggcagaatccgtccccgcatatgaccaagcagcgcagatcaataataccttgagctactggtatggtctggcagaagaatcggttatccgtggatgggacgttccggcgatttcatccattcataccccgatagccagtccaggcagccgcatccagcctgtgggggtatcggattattcatgggtcgggatgcttaccgggtacaccgacattgttcagcaggaaatcaacctgatacgcgtaaaaactgaccatggggacaggatacctgtattcaaatga

SEQ ID NO: 198015 - DNA, 1356 bp, Klebsiella oxytoca
atgaacatatcagttatcgaaaaattacaggaaaaatttggcgatcattttcatacggagccgacattcagagaacagtactgccaagctccgacgggaattactcttagtcctcccgatggggttgtgatcgtccgaaatgagcaggatatcgtggatatcgtgacgttctgttctgatgaaggactgcccatgataccaagtggtgcccggacctcgatcgagggacagatcaatgccccgcaaggaggtatatgcattgattgctctgaaatgaatgccattacggacatcagcattgaagatatgaccgcgacaatccagcccggtgtcacgcgcgaacaattgaatgaagctctccggggaacagggttgtttttttcagttgacccaggtgcaaatgcctcaattggcggtatggccgcaacccgtgcctcaggaacaaactcagtgcgttatggcacgatggcaacgaatgtccgggctgcccgtcttgtcatggttgacgggtctatagcaaacataggatccagagcggtgaaatcagctatggggcttgacctgctttcacttgccgttggttcggaaggcacactaggcattttcagtgagttaaccgttaagcttcatccactccctgaagttattctttccggtgtttgtgcgtttgactcagtagagaatgccgtcagggctgtgacagacaccttgaaatctgcactacctattgcacgtattgaactccttaatgtttccgcagttcgggcatgtaatgcttattcaaaactgggattatcagaaaaaccgcatttgtttgtggagttacacgttaatagcctgtcaatgccaggtaatattgcgttatttgaagaacatgtgcacaggtacgggggggaagtacagctttcttctcatccagaagaaagagaagcactgtgggtagcacgtcatgatgcatggtgggcattccatgccttttatgaaggttgccaggggatccctacggatatctgtgtccctctgtcatgcctgagtgcttgtatttctgcaacagaaacggatatcgcgaatacagggctcaaggctcccttaatagggcatgttggagacggtaatttccatcttttacttatgctccgtaaaggagaggaagaaactcctgttatacagggatttctgagtcgtctggctgaacgagctttgtcatatggtggaaccatcagtggcgagcacggtgtcggacagggaaaaataaaatggatgccagtgcagcatggtgcagccctgcatttgatgaaagccattaagtctgctttggatccacataatatcatgaatccagcaaaaatgtattga

SEQ ID NO: 198016 - DNA, 1053 bp, Klebsiella oxytoca
atgtctatagagtcaatatctaatcaacaaataacgatggtagcctctggtatgagaacagataaaaacaaaacaaaacatgtagatagtctccctggtaaaacgtctaacaagacagatgaaaaacatgctcttggttcattcctgacacaacttcgtgttgaaaggggacatcttaaagtttcgacatttctggaagggatagatattcctttttctgctaattattatcgtgatatcgaagcaggcaggaaatatctcagtatagactcagcagtagaactccacaactctcttggtatagaaacatcaagcaaatcaagctttgattatttctggcattattttaaggatttattaccttctgatatgcatgaaatgctatttgggaaaggaatagaaacaagagatctgtcttcaagactagaactgagagaccatgattccaaaatattacgccgcgcactcagcctaagtcgatatgaacgcgaatttattatttctgatgaaataattagaggatttaagaacaactttgatttatggccgcttatgacatatctatatatggttgacactgcatccgtggctgaaattaaacaagtttgccatcaacttgacattgcattcgattctcgtgtggtcgaatttttgagtcttgtagcaaaagaacgaaaccatgaggaagccccttttgttcgccttgcaccgacactcagaatgccaaggaccccagaatctattaatcttaaagacaaatttatgtgttatgaaactgagaaatccctgtccaaacccgaaaaaagtgaatattttgacatagatgggacatttaaatttagtgcgatggttacgcttaaatcgccggaaattgaacaaatacaggacagacttgttgatctcttttccgctattgaggtacacactaaatccggacgacagcttgaggatgagaatgcacatccttattttttggaattgatcatttcaggcagaccagaatatgacggtcgaactgccagaaaaccatcagggtttaaaaagccagaatag

SEQ ID NO: 198017 - DNA, 723 bp, Klebsiella oxytoca
atgaataaagtacctgggctataccatacagccccctatctaagtcaaacccaaacgcgactccttcatgttaaccttgatgagtcaaattctccctattgtgtcctcagtccgaccattttttacccacagggtggtgggcaattgggtgacagaggttatcttgttttaccggatatgctgacatcacaacaaaaaatcggtgttctcacaacaaaacgaaaagatgaagagatcagacactatcttgatattaatgagatcggttttgacttgctgaaaaagcaggcaggtcagcaagtgactgctattcttgattgggatctgcgatatcaccagatgcgtatacactcggctgtacatctgatccattgtatactcgagcaggtaacaggccattcaatcccttaccctgttcgttcaccactcaatgatgaaagcggagagaatcattatcaacttcttgactatattgataaagatattcttgaaaaggcaacaacagaactaaatgaattttgttcatcgggacatgagatacaaactgtaaatgttcccgaacaaggaaataactttcggatatggaagtgtggacgatggtcaattccttgtggaggtacacatgtaaaagatacaaaagagatcgggatgatattttccacgttgaaaatcaaaaaaaacatgacgcgtatagcactcaggctctctgataattcaggttaa

SEQ ID NO: 198018 - DNA, 1053 bp, Klebsiella oxytoca
atgatgttctctaaaaaaatccgggaatgtgttgagggagcaaataataatgcttccatccgcctgcacgccaatgaaaatccgttgggttcaccagacataatacaaacgggacaatatgatctgtctttgctgagcctgtatcccgatcccacctacaatgcactgagagcagcaattggagaacgctggaatattaatccggaacagatcatcacgggtaatggctctgacgaactgattgatatcacactgcgtagtctgctgaaaccgggtgcacggcttaccgctcctcgtcacagttttatgatgtacaaaaagagaactgatattctcggagccttatacagtgagatcccagtgaaaagtgggcgcatcctccctgaggatttaaaagaggcggtcagtcataaacctgacattctggtcctagttaatccttctaatcctttgggtcactatattgcaccttcagaaatgatatctttagttgaaaccataccgccagaaacgaccattatcattgatgaggcctacgcagaatttacacctgatatcgaaaatacggcaggtattcaaatagttcataaacgcgttaactcaatatgcttacgaacattttcaaaagcgtatggacttgccggattgcgtcttggctgggcttacgtcagcacagatctgtatccacaactggaagctcgccgggcaccttacaatgtcagtgctttatctgctcttgctggtgaacatgcactacaggatcgtgagcatcttttcaaaacaacagaatattgtcttagctggggaagaaaactggtagatttatttgaagattacggagtcaaagccagtgcccaatatgtcaatttcgtctttgttgaatttgacagtgaagaacgcagccgggagatccagaacagtcttaacagtgaaggtttccttatagccaggctgaccgattattctttggatcattgcctgagaatttcattcggaccccgggaacaaatggaaaagttactctttgttttagagaaagaactaaaagcatag

SEQ ID NO: 198019 - DNA, 1584 bp, Klebsiella oxytoca
atgaatattacacagcataatagcacatccacaggcgataccttcattctcagcccaggccgtaacgtcagtctgaaagactttattgaattctctcagttcagtaaaaaaatagttgcttcagaagaaaccagagaaagaattgccgcatcaagacgagcccttgaaaaattagtgaaagaaggctcggttatatatggtgtcaacactgggatgggtgggtttgtcgatcatctcgttccgctcgaaagggctgaagaattacaaaaaaaccttatccgtggtgttgcgacaaatgttggtgaaagattttcagatataatttgccgggcaactatgttcgcccgaattatctcactttctcgcggcaactcagcattatctctggaaaatttcgatcgatttatcgcaatctacaacgctggtctgattcctgagataccacgtaaagggtcattgggcaccagcggagatctggggccactggcagccatggcccgtatgctcactggtgagggcaatgcctggttcaatggtgaatgcttggctgcagaagatattctgcaccagctggggctcgcaccgcttgagctaagttataaggaagggctggcactcatcaacggcacctcctgcatggttgcgcttgccgccctgaacgtcatcgaaaccaggtcacttcttgaacaatatgcgtcaatctccgcctttgcctcagaaacgcttcttgccaggattcggccatttcatcccgacgttcatcaactaaaaccgcatacaggccagcaaaaaattgcagagatgatatggaataacctccagggaacaaggctggcggttgatgatatacagctttcatcagaactcggaagcaggcttacgaatagcatcaaacaagaagatatgccgattgaagatgcctattcaattcgctgcacaccacagatacttggcccggttttggagacaatagaatttgtggaacgaatagtgagtaatgaattaaattcgtcaaatgataacccccttatcacccccgaaaacggtcaggttttccataacggtcattttcacggacagtatatatccgccgcgatggactatttgacgatagcaatcattaccatgtgtaacttatctgaccggcgaatagacagattgctgaccagtgcgaacagcaacgggctcccctcttttctatgtgcagaaaatggtgggctgcggtttggtttaatggggggacagtttatgtcatcttctgtcacagcggaaaatcgttctctggctacacctgtatcaatacaaacactaacaacaacaggtgattttcaggacgtagtctctttcggtctggttgctgctcgcaggacggcggaggtgctccagaatacccgctatgttattgcttttgagttgatctgcgccgctcaggcagctgatatcagggatgctacaaaattaggaaattcaggtcgcctgtggtacgcaaaagtgagggagtcagtcccttatctggaccatgacgagtcaataacaccttatctggaagaactcgtatcccggatacttggaggccactcatga

SEQ ID NO: 198020 - DNA, 1008 bp, Klebsiella oxytoca
atggtgatgttgaaagaatgtaatgagagtggactgtctggattcaccgttgatgggttatcggtcactgatacgcaaaacttctttactcaagctgcaccagatattcgggaagcagtgctcaataacggagcgttgctactacgcggcgttgtgcaaagtgcagaacccgctgtgtttgaagtgataatgaatgcgctaggttttcgcaccagagattacattggtggttcatctccccgttcaaccataaaaggtaaagtgatggaggcaacccgaacgcctccggcatggtcaatcatcctccatcaggaaatggcctatgtaaaacacccaccggaaatcattgccttctcttgcgtcaaacccgccacagagggcggagaatctaccattggcgatatgcgccgaataacaaaactggtcgagccttcaacattacaacttctgacagaacgcggcctcagactgcgtagaacactgccggatgaaaaccgagttcatctgaaacccggaataaaaaaaagctggcaggaagcgctttctgcaaaaacaaaagaagaggcagagtttgcctgccgctccaggggttgggaatttgaatggtggaatgatgatttaatcctttggcaggactgtatttcaccggtgcgtcagcatcctcgtaaaaatgagttgatctggtgcaatcaggcacatttctggggtgctgctgcgatgattgaatgggcacgggtggattccagaaacgaagacgaagaagagttaaaagaagctgctcagaattgtcctgaacttctcgaatccatgtgtttcggcgatggagaaccgctaccggaagaactgacacttaacttatttcatctggtcaaggggttagaacaggacgtgaatctcaacaccggcgatattttgctgctcgataacctgcagtttgctcatggcaggcatgcattttcaggaaacagagagattaacgtcattattgccgactggactgaacattaa

SEQ ID NO: 198021 - DNA, 243 bp, Klebsiella oxytoca; identical to SEQ ID NO: 100778

SEQ ID NO: 198022 - DNA, 957 bp, Klebsiella oxytoca
atggcagtgagtatcgcggaatatttaggccaaagaacagatgtagaccaacaaattgtgcccgtcgaaagaggttcgcaagtacaatgccctttcatggaccgaacttgcgacaaagcaagtaaggtaagaaatcctacacctccagtatgcagcgtccgcaaaccagatggaaccgtttggatagtttgcgaacatcggctatgctccactcgtcagaaaaagacggtcatagtaggtggtcgtacaagacaaattgaaaataatttagttgagcatcaaagagatatattaagaaaagtagcaaaactaatttatcaggaccctgaattacaggattcagatattggtgtaaaaagagaagtcaatatccctttaccagattccgataacagctaccatgccgactatgtaatgagaaatttttcgggtaggggaagagttgatgaagtcctgcttgaaatgcaaggtggtggagaaacaagcagcactggagaaattactcgacatattgccgcatgggccgatcttgagttccctactaatgaaatactaaggcaacctgtagcagcgaatactatcgaaaccaacgcatggagacgacagcaagaacaattcctggtgaagggaaatgttgttgatcaaaccggtgggaaaatcgtttttgctgttggtagcttactctatgactatttgcacagacgtttcaggaatgcaaatctaagggatcttaaagcgcataactggacgctatgtattctagctttcaaagaagacacgtcggaagaaccacaaccgggtccgattccgttgatcattgatgactcaaaaacattattcactaactattcaacgtttgtaagatttttaacagatcagggcgcaccacgccctgagctattcgaaggatcattcttacgtttagacaatagtactattacgatcatgcctcgttga

SEQ ID NO: 198023 - DNA, 375 bp, Klebsiella oxytoca
atgtccgatactgaaagtaccgatgtcggggcgatacctcagcacacaatcgcttccccttggtgggggctgaagtgcgacaccacaccctgttttggtacccgcctggtccaggagggcaatcagctacacttcctgtctgaccggagcaatttcaccggaacatttcacgaaagcgaagcattgcagcttaatcaggcttttcccctgatgctcaaacagcttgagttgatgttggtatccggtgagctcaacccacgccaccagcactgcgtcacgttgtatcacaatggtctcatctgcgaagcggacacactgggcagttgtggttatatctacctcgcgatttatccgggggaaccgccagcagcgtaa

SEQ ID NO: 198024 - DNA, 465 bp, Klebsiella oxytoca
atgaataacgctacaaatctgcaaaccctttcagacgccgaaaataccaacatcctcaccgccacgttgctgacggatgaacggcgtattggcttctggccacattactttggtgccatcccgaagtggataatccttgaaccgacagccttcgcctgggtggaccgcttctgcgccagctacagtggcggcatctggcagttttacacgctgagcaacggcggtgcttttatggccccggaagcgaatgaggatatcgatgaaaaatggacgctgttcaatccgatgaacggcaacggtggtgaactcagcgccgaagccgccggaatagccgtctgtctgatgacttacagccaccacgccatgcgcaccgaatgcgacgccatgacggagcactattaccgtctgcgggactacgcgctcaaccacgcagaatgcagcgccatcatgcatatcatcgactga

SEQ ID NO: 198025 - DNA, 819 bp, Klebsiella oxytoca
atgcgcttagcttcccgctttggcagggttaatcttatccgtcgcgaccgtccattaacgcacgatgaaatgatgaaccacgttcccagtgtattcagcgctgaaaagcatgaatcccgtagtgaacgatatacctgcattccaactattactctacttgaaagcctgcaacgggaaggttttcagccgttcttcgcctgtcaggcccgtgttcgcgatcccggtaaacgtgagcacactaaacacatgcttcgtctgcgtcgggaaggccaaatcacgggtaagcaagtgccagaaatcatcctgctaaacagccacgatggttcaagttcttaccagatgctgccgggattatttcgtgcggtttgccagaacgggctgatatgcggtgagagttttggcgaggtgcgcgtaccgcataaaggaaacgtggtagagaaagtgattgaaggagcttatgaagtgcttcgggtttttgaccgaattgaagaaaagcgtgactcaatgcaaagtctcatgattcccctaccggctcaacaggcgtttgcgaaagcggcgttgacttaccgttttggagaggagcatcagccggtaaccgaagaacaaatccttgcaccacgtcgctggcaagacgaatccagcgatctgtggactgtgttcaatcggctacaagaaaacctaataaaaggtggtttaagcgctcttactgcccaaggcaagcgtagccgtacccgcgccgtaaacggtatcgacggtgatctgaaactcaatcgcgcgttatgggtgatggcggaagaactgcagcaggtactgagctga

SEQ ID NO: 198026 - DNA, 678 bp, Klebsiella oxytoca
atgaaaattcagacagtgatggcaattgtgttatctgccgcttcggtatcggcccaggctggtaattgggcagtgaaaaacggctggtgtcagaccatgaccgagaacggccaggcgctggtgatgttgaaaaatgacaccattagcatatttggtcagcttcagggatgccccaatggaccacaggagcttatgggtagtcgtattggcgtgaatggcaaccttgttcctacgtcgcaggtctgtagccagcaaacaggatttaaagccctcgaagttgaaggtggccaggccactgcagcagcgaaaaaagcgattgcttcaattgccggtcaggaagtttcaaccctgcaggtgtttggcggtcagatgacttttacccgtggcgacatgatgagcgtttgccctaagtatgtgtcagctttacgcgccaacgccgggagcagttcaccagagataaataaaggttcagtaatgaaagctgccaaacaggcatatacaaaagagtatgacagcgaaaccgctgaggccgcagattttggcagctatgaagtgaagggaaataccgtggtatttgaaatctacaatgctggataccgcacatacgacaaggtagtggtcactgtaggcaatgatggcaaggccaccagtgcaaaagtggaatatatgggtcgttaa

SEQ ID NO: 198027 - DNA, 894 bp, Klebsiella oxytoca
atgtctgattcccccgacacgcagcccggtcttgatgccctgcgagcctctctttcatttttgccccagtatgtctgcgatcgtatttttgccagacttcaacacgctattcattacgagccggtaattggaattatgggaaaaaccggtgctggtaaatcttcgctctgtaatgctctgttccaacaaccggtatgtctgaccagtgatttgatggcctgcaccagcgaaccacagcggctggtgctgaccgtcggtgaacgcagcatgacgctggttgatttgccgggagtgggagagaccccagaaaaggatgaaacctatctctcactgtaccagcaactgttttctgagctggatttgattatctgggtcatcagggccgacgatcgcgcacgggcaacggatatcaccacacaccgagctctgctgaatgctggtgccgacccatcgagatttctgtttgtactgtcccaggctgaccgcatcccgcccgtacctgatggccaggaacaccagtcactcccggatgctgcacagcgtctgtccctggctgctgtcagctcgctgattgccgggcagcttccatcctctttccctgtaatggctgtatccgcacataccggctacaacctgtcagctctggtggagctgatggtgcatgccctgcctacacaggccagtagcgcggtctatcgacagctgaaatctgaccataaaagcgctgaaagcgactccgccgtgcggcagcgatttggtgaattagctggtagcgcttttgattccgttattgacccaaactcgctgccgtcaggctggcaggctttgctatgccggttacgtgaaaaattggtgcaattagctactagcctctgggacaagctgttcagctga

SEQ ID NO: 198028 - DNA, 2652 bp, Klebsiella oxytoca
ttggtaaacaatacgccccctttacccttcaattcgctatcagaaatcattttctcaaagtctggcctgaataagagcaaccaaccagaaagcgtggctgacgggtatttaaaccaggctcagcatgaacaggctttatctggttatcttcaattaaacacagcggaaccaagaattacagccaaaacagcctactgcgaatggatggtgggtcgttatgacgatgcaaggaaactcctcattgagtacagcgaaaaacttgatgctgatggtatcggattgttaagcaaactcatcagcatagaccgagactatgaacgacgcgaagaagatgagaagttaatttggccacgattacaggcagtcatttcagccagcacggtcccgcttgttgccgtttttgcacgtttccagaggatgtggcccggagatgcatgtaacccaacacaacgacttcaggacactgaatatatgctctcgctttaccctggttgccagcctctccgtctttcggttcttgtagacatggaaaatgctggcgtttcggctgatgagcaatacgcatttttgcaaacatttcagtacccatcgttgatgccccgttacctctgggtagccgctggtattgctgcaaaggcagggaaattcgatgaagcattggactacctgagccagcttgaagtgtacgaacagcgtagcgatccaccttcccaacaggttttgtgggaaattgagcttgcccgatgcgacattcattctaaaacaaataaacttgatcccttatctggctttatacagttaagcagtgacgcttcatattcagtagaaaatcggacaattgcctgccgggcagctttagccatagcctgtgaggtggcgataaatgaaatccctgcgttggctgacaattttatcgagctactcgcaacaaacaaatatggcgtggtatttagctcccttgagttactgaatgagcctgaaccttttacgggagaacattgggataattatgtactttcatggtctgattttgatttaaggccctataaagcgcttcttatcagaacgtcacaagggcgtgcacagagatttttccgggcaatatctgttactgaactactggataatgaattcggatttacggatagcccagaactcagtgctgaattctgggataatctagcagagagtcttggtgatgtgacgctttacccggaagaatttgatggaaaactcctctctctgtataccattattcactcacatcgtgaccgcccaaactgggcaaaactgggacagtattgggtcacttcagagtggattgcttatcaaaataactgtgatttaacttacagttggttaattcctgagatcgtgggtaaccatgctgactcaacccgcaagtttgcctcgggtgtgattaaatttcttaaaagtcatccaattccttcaccgacagcttacaatttagtccaggaactggttggctctctcgtcgagtaccgacaatgcaaagaactttatcagcttatggctgttatttcagatggcgatgaacgagtcagtgttcagttttatcttggctggtcatctcaggaaatgaattataaggccaaagctatttcggcatacaacaatgttctcctcactgagcctgaacattattccgcaatcttcaatatgctcttactttgtacaactcaggctgatcgtccgttacttaatcaactggaacaccatgtcattcagttcagcggtaatgaggataaaaaacaaaaactcactgatggtctggcaagtgccaggaaacgatgtgaggataaaaatgcggctaaaaaacaaattattgccgggtacctttctgaattccctccactggtagaacacagcattaagcctgaagatatatccttgcgtgtcgcggttgctttgctggcactttaccgatgtgccaacgcagaaccagatgatattgaactcatttccctggatgaaagtagtctttccttttcaccggtcatcagtaacagagcaatattgttcaatctactgaattcaggacttgcctcaatacatcccgacacaaatcctgacgcattccctgtcgctgatggcgaaattgctggtgtacgctttggtgccgtcaggtggcttatgtcccggtcatgtgaagcgctgatcggggaacttcgcactctaaatggtaatattccaaagcactggcataaagaacttcttccctttgcacgagagattgctcagggcgaaattgtggaatacttaggctcacttgcagaagaacgtaaatggcctgaaccacgcaatacggaaaacctggcagatctgacccgggagcttgtaaatgagttatcggtttcccaggctttctatcttgcttatcttggcgctatgtcagcaagcgactataagcaaagatacccggtatccgcacagcaggctgcggacgctatggtgaaacgtaccggagacagactggagtctgttcgtagcggaaggttcccggcgcaacattatgacaggccatggaaagccccccgttctgcggtcagtcttgtactgtggggaacgattttaaatcgtggggatgatggatttaaccaaagagtggctgatttagtgtcaaatatttag

SEQ ID NO: 198029 - DNA, 1254 bp, Klebsiella oxytoca
atgacacaatgtgatcggagtaattgtagaagaaaagtatccagacgttcagcaacaggtaaagcagatctttgtgaataccattaccagagatttcagactaaccaacaaaacaaagagaggcgattattaagtacctgtcagtattgtggacattctctggcacagacaaggaataaacagtattgcagtgcagcatgccgtcaaaaagattcccgtaaaattaataccaacaataccgtaagtattctggattcatcatacttgaaacacattaatagtacctatacacgcaatccactggtattaggatctattactggaccagaggatgtggtggattttcaccagctatatcagataaaagcccgtcatcagagaagctacaccattcttacttacgagggggggcaggaaaaactgaagcttgtggcattgctgtgtattgaaatatgtcacatgtatccaaatgggaaaggaggtgcaaacatagtaggtaatttgattatagctcctgaattaataaaccgcagaaacagagatgtaataccttatcagggccatggttttgatgggattaaatcagtgggcgagtacactccatttaaaggaagtctgtatgatgggctggtagagaggtatggcgtcttaacggttaacgatgaattgcgcagaatcacaccagtcagacgttttcatggcaatgttcccagagagattgagtttggtggcattgagcaacagctccccttgttcactttacttcatggggaattgtggcgtcttgggcatcacagggtttcagaatgtttgatggaaataaaaaaactgttccctgaatatcctttgtatcttgagttgctggcgattgtaggtttccatgcagtgttatctggcgatcctgatcgcatcatggcgcttttatgccgtatttttaataaatgctttaatatcaactcgtcattacgcgagccacacaagcaatatctctctctgatgtattgcttcttgcgtaaatatcttctgcgttattttaatgtggaagttgaaaacagggatgctgtcgtggcgttctacaatgggttctattcacaggaggtaatctcgcctggcgatgctgaagatgaagttctgtgctatcgctatttcacggggatcaaacgttttgccaccacttttttctatgtaccaccagagaagaaggaacccgtggatttatggcgtcttatgggagacgatctcacttttgaataa

SEQ ID NO: 198030 - DNA, 1608 bp, Klebsiella oxytoca
atgaatctgcccctgcagaattatcagggggaaactcctgaacaacgaaatatgtctgttaaagcctctgaatcactatcatttccaataaggtctcttcccaaaaaaatcagtaatgcaatcatcgctacgagtctaaataaaagagtctctgtagagattgctgccagttcatttctggctgctgcttctcttgcctgcctcccgctggttgaagtgatacctgtacatacaaagatccctgagcccgctgtgctcaattttctggttattgccgggtccggtagcggaaagtctacggtgttgagagctgttatgcaggtctttcatgatttttcatcagaggcaaatgaagaatataaaaatctattgaaccaatttcaggacaatacaagcctgtgggaggaaaataaaaaggccctggcccgaaacctacgacaggcgacgtccagcaattatggtcgtgaagatgcagaaggggctatggaggagcacctgaagaataaaccgcagaaacctgtcaggtttaagttcttatatcaggatatctctaacggtgagcttatcaaaagtctcggagataatcctgatgcgggtattttctctgaagaagctgttacattttttaaatctagggctaaaaacgatccgggtatatttaacctcgggtgggatggtgctccatactcatatcaacgtgacggcgtggattgtgaaatcaatcttcggctgatgttttgcctgatggttcagcccgatatttttgatgaatatatcaccaggaaccagacaacagggagagggagcggtttccttgcccgctttctgtcagttaaagtcgagggggaatgtcaataccaggatggcgattctagtcatatgaaccgtgctcttgacgaatttgataacagagtcctggagctactggaacgggctaagcaacgtttttatgatggcatcactgataagcagcaattaatcctgtcacctcaggccattgaatttatgggcgagaaacgcgccgaaatgaagcaaaaaataagcgaaggaggaccatgggaacatattaaggatattgctcttaaatcgggctctaacgcgatacgactggctgcaatacttcaccactttgatgagcagtcagaaaatgaaatatcgctttcagtaatggaatgtgcacatagggtcatagactggtatatgcaacaggctggaagggtgttttataaaaatacacgtcttttcctttttgagaaagatgtgctggaagtataccactggatccacaacaaaatgacgatagagggaagagcgataatcgcaaagtcagaaattatgcgtttgggacccacgcataaggataataatctccgattagccagcaaactggaacctatcctggcacaactggcatggcaaaagagaatttatttgattcagaattacacaggaggccctgttcatatcattctggctaattcactcggcgtttttcagaatccaggcgtacggccagatttgttccctcatgggatcagatgtcttgagcccaattatgtacctgaaaggatatctctgaacttacctaatctgactttctcttggtga

SEQ ID NO: 198031 - DNA, 294 bp, Klebsiella oxytoca
atgaccaactcgccacaaacagaatatccggtatatgcaaaccagcatgagaacatacaaattggaaccccacttccaacagaagttgaaaaacggatccactttgcaatgggcgatgacatcctgctcagcatgaaagacatcaccgctcacagtggccttagtgacaagcattactattcccttatttccagaggtatgtttccccgaccgctgaaaattggtcgctcaagtcgctggagaaaaagtgactatgaagtatggctaaatgagcgggacacaaatcgcaagtaa

SEQ ID NO: 198032 - DNA, 936 bp, Klebsiella oxytoca
atggcacgaaacagaaacaatacgtttgaaggtaattttggtaaaacacccactgattactatctcgaacacttcaataagcccacacagcctgttccaggtggtttcctgaatgatcactggatcaatttttcctcgtccgaacagcgcctggtaagttatctgaatgactcgtatcccgactggatacatcacataacactgagaaaaaactcagaaaaggaacgacgcccgacaactattcttcaaaactatgttgtcagcactcagtgcaattttgattcttttatgcgtttcctacttgaagacttaagtgaggaggatgaaatagaagccggacttggctacctcaaaaaacttaacgaccaggatccggtggaaggcccggatttaacttccctgcatgtcaaaggcctgcgcaaggggcttgttacggtaaatcagctactgaatacgaatggaatggacaggtttgaagcggcctcttacttttttacactggcctttcattacttgagcgaaatgggccgcgaagccgagaagtccaatgtaatgtttgaagccttcgaacaactgggggagtttcggggatggtgcagcaacgtacaggcccttgaatcagcgttaaaaaaacgcgaagatgcaaaaaatgccgcaaatgtaaaagccgcgaagaattttggcgctcacaaaaaagaagttatacgtatcttagaagaggaaatcctgctagatccaaactcttataaactgaaaacagcgactgcattacacaatgtactgggggggcgactcgatgaattcatcactgcgaacagtctgaatgaatcagctgactcagcaaatatgatcaaggggtgggcacgtggtgatggggagtttaaagaacttttcgataaagcactatctgcatgtaaagagcaacataataattaa

SEQ ID NO: 198033 - DNA, 156 bp, Klebsiella oxytoca; identical to SEQ ID NO: 158366

SEQ ID NO: 198034 - DNA, 498 bp, Klebsiella oxytoca
atgaatatatggctgtatctagctttgatatatctctttgcagcagatgattcattaattatttttaatgctaaggctgagaatgaccccatccacaatattccctcatcgtatagttttttatatccagggtcctcattgatattagtaattgatggagtgccagagaaatttttttctataaagtggttaaaaggagattccaatttctttaatactttgcattctcttggtgtgccaccccatattcttgaaagaaatgggataattatatcatttaagcaaaagctatcaatcgtaccaaagaagctattttttacatcgtgtccatcagccttgcatctacgttccagttctgaacttgcttttcttgtaaaagtaattgcaatgacccctttatgctctggaagaccgtcggtaatatttcttattttttcttttataaccgtagtctttccacttcctggacatgctgttattaccatgcttcctgtgtag

SEQ ID NO: 198035 - DNA, 342 bp, Klebsiella oxytoca
gtggcggtagccgaggaggttctggccgcggagcagcatctgcagcggggtcttcggcatggcctttttgagctcgcgcaggcggacccacgggtcctcgccgaggaagcggatgcaggcgtcaaaggtggcgccgccccagcattcgagggagccgtagcccacgtcgtcgagctgagcggcgacggggagcatatcgtcaaggcgcaggcgggtggcgaaaagggactggtgggcgtcgcgcaggacgacatcggtaatggcaacggtcatggattcctccgtgaattaagggttaagtcggcgatggtggtggagagcggcggcaatcaccggctttaa

SEQ ID NO: 198036 - DNA, 207 bp, Klebsiella oxytoca
atgaaaaaactaattttgttgggtctattgattctcagtggtcaggctatggcaactaaaatcacaatgacggatccactggaggaacagacggagaacggtaagactctttgcatctatgagaacagtatctacacattcacctacctaactaaggggaaatgcccctatacgaaaacattcgatacggaggactcagaggagtga

SEQ ID NO: 198037 - DNA, 333 bp, Klebsiella oxytoca
atgaatactttacctgcaataaaccagcgggctgttcagacatgcttatcacccgtggttgtctggcaaatgctgcttgctcgactacttgagcagcactatggcctgaccttaaatgacacgccgttcagcgatgaggctgttcttaaaagacatatcgaagctggtatcacgcttgtcgatgccgttaattttctggtggagaagtacgaattgatccgtatcgatcgcagaggatttagctcacagggacaagtgccatatttgaccgtgacagatatccttcatgccaggagagaatgtggattaacgaacagttgtccttatcggtaa

SEQ ID NO: 198038 - DNA, 2709 bp, Klebsiella oxytoca
atgtacactaatgtaggaagctattggtataaatttgattttcatacacacactcctgcctcatcagattacaaagcgccagcagaaacagcaaaagagtggctcattgccctgatggaaagagaggttgactgcgttgcagtaactgaccatgttagtggggcatggattgatatcttgaagcaagagctaaaagcgcttgaaacatcctatcaagaatatcgcccattaattttattcccaggatgtgaaataaccgtaagcaccgggcaatctagggttcatatattatcaatttttgacccctcttgtggcacagctaaaattaatggtgtgcttggcatgtgtgggattacggaaggacatggagatgcagagtcaacatgcgctaccgaatctgttgataaagtaattgagctgataagcaaggaaaatggaattgctattcctgcgcatattgatggtcctaaagggctattaaagggaataaaaaacaacaactcagaaataagtacatgggcaaaaaaaattgttgcagcagaatttgtcgatttaaacttccttgatagcgtagatgtagaactacaaaagacatttcaagatataggtagagttaaaggttctgatgctcacgaaaagtctagactaggagctaatacctcttggatcaagatgggaaaaccaacaattgatggtttaaggcttgccttatacgataataaattctgcgtaagtaacgaaattgacgatcctaattctctaccaaacctgtcaattaacaacctaacaattaaaaaaatgacccactgtggaattatcccaggaaaacctgttgagataaaactgcaccctctcttcaatgctataattggtggacgtggcgctggtaaatcaacatttgttgaatcactacgaattgcgatgggtagatctgaagagttagtcggcttacaatctataaaaagagatctagattcttttattgatggagttactagagatgataccgaaatcagtgtaggaataaagaggcgtgatgatttatttaatgttatatggacaaaaaataatgacattgaaataaagaaatttgaaaatgaagagtggcaagatgctccgggcaaaccagaggaaagattcaatataagcatttatagccaaaagcaaatcaatgccttagcatctaatcctgaaagtttactaaacatagttgatcgaacaccacaagtagatatttccagctggaaacagaaattagcttcccaacaagttacatcaattaatttagcaaaaagcattaggaaaattgagctgagcgctcttgaaaaaacctctattcaagctcaaattgatgacttaaactctgatatatccagctttgaaaagggtgggcataaagatgtttttaataactatcaaacgctatcaaaaaaacaaacaaaaatagaagatagtttccaaatagaaagtttgagcaatgcattacaatcaattattgattttaacacagtccctcttgatttatctaatttaggacatgagttagaaaatgaaaatgaagtaagtgaaattcataaaaatttcactgctgaaattgataaagtcatatctgatatcaaatcatcaaaagaaaagattgacaacattgtacagcaaaccgtacaagcactcgataactctgaatggaaaaaaaatagtaaaaaaatcattgatcggtataaggacgttgttcaaacttacgaaagcaaagggcatgaactgaaccctcaagaatatgaacaatggatcgaaaaaagaaataacacacaaaaacagttagatgaaatcgtagaagaagaaaataaacttgagtcttacaaaacagattttaatcgttcgatttccttgagttacatcttacgtagacgcctacaaaaaaaacgagagaaattcatccgttcagtaattgggaataataaatatgttaaaatgtcaatcattccatttggagataaaaacaatattgaaaatgatttccgttctattctaggttatagcaatgggttcaattcatccatttatcaagatgatcgtgaagatagtttactttataaagtgataaatgatggtggagatttaagaaaaacgataaaatatatctcagaaataaaggatactatattcaaaattgcagcaagtgaagatgtaactatacatagagtcgatggcagatttaaaacatcgttatgtgaaaaaataaagtcgcagccagaaatattagaaagaataattaattggcttccacaagaccgtttactggtagaatatgcaagagatgttgaaaaagggaagttcgcctcaattgacagaggttctgcgggacagaaagccgctgcaattctcgcattcctgttaagtcatggagataatccaatagtagtcgatcaaccagaagatgatttagataatgctctaatcaataagttaatagtatctcaaatacatagcaataaaagaagaagacaaattataatcattacccacaacccaaacatagttgtaaatggagatgctgagtacataaatgttatgcattttaacggcggtcaggttcaattactatctgcaggtggtttatgtgacactgatgtcagacttaatgtttgtgagataatggaaggtggaaaagaggccttcaacttaagatataatcgcttacttaaaatgtaa

SEQ ID NO: 198039 - DNA, 3141 bp, Klebsiella oxytoca
atgaaggctggattcaatagcaaacgcctctttggcataacacgctcgaaaggtaagatgtacgagtttggtctggatgagtctctgcatctcagaatgcctgaaggttcagatcctctgcagctgtttattatgaccgtagcaaccttgggcgacgttaccggggtgctggctgagctgtcactgccattagtttctcttccccctgagccgcaagcggagctgaatttctgcgccagcttttttgacgcagttctggattcaggatttgcacaaggcctcgaaagcacaacattactattagcctctgccgcctattatgtggctcgacgcccgggaagtagcttagtccttgcccgtcgaattgaacctaaagaagaagacaacaatgttgagcatttgcttcaatggttgctcaaagcggactggaggacttactggcttttagacgacaaacgttatggaccgctgctaacatcgttttcgcgtgctgttgctaaccattttgccgaaggtacccagctacaagagattgatgtactgatgaaactcctcaggaatgaggcttataaaatgggcactcccgaggaagtgctttatgcagatgtcgccatatcgatttgtcgtatgaggcttgcagcatctgcttgggtaaccctctcccaatattcaggtttatcagtggatcattggcggccggtcattcagagggaacgctttcctaaagaactctggccttctcagattcttttaggggaaagagggatattcagaggtgactcgggcttgattcagatgcctacaagtgccgggaaaactaggtcgattgagttagttctgcgcagtgcattcatgtctgggcgcacgaagcttgcggttgtggttgcaccctttcgggcactctgccatgaaattgccttatcacttcggcaagatttggccggcgatgacattaaagtcaatgaactgacggatgccttgcagattgacttcgttgaacaaattgctgaccttctgggaagtgccccgccctcaacatcgaacgtattagtcctcacacccgaaaagtttctctatgtgctgcgtcagtcctctcaggctttgaaacacattggtcttgtcgtttacgacgaggggcaccagtttgatactggcgtgagaggtataacctatgaattgttgctcaccgaaatcaagggattgctgcctgatacagcgcagactctacttatttcagctgtgatgcaaaatccacaggccattgctagctggctgatgggtgaggataaggcacaggttattgacggcgcaacgctattacctacgagccggtctgttgcctttgcaagctggacagagtcgcttggacagttaatgttttatgaaaatggatatgacaaagaggactactttgttccgagaataatcgaagcggcacagctatcgggaattaaagcagacagctcgatatttccgacccggacgaaatcgagcgacgtatcgctctatttgggtctacgcgttattagtaagggatccgtagctattttctgtgggacaaagttgattgcaaatggtatagcaaaaagggctgtccagattgcggatgcaggatataacacgttatggccttcaacctacgctaatcctgaagaagtcatggcactgaaaactattattgagggtaatttcggtagcaattcctttcttttaaaagctgcaaagctgggtatatacacgcatcacagtaatacacctcagggtatacgcttagcactagaacatggtatgcagaaaggactgattaactttattgcatgcacatctacgcttgctcaaggtgtaaacttgcctattcgctatcttatcgtgcagggagtatatcagggggtaggacgtgtcaaagttcgcgacttccagaatcttattgggcgtgccggtcgtgcagggatgcatactgagggggttgtaatcttcgctgattcaacagtttgggacagaaggaaaaattggcaggaaggatggaaatttcaaagcgctgtggagcttctctctcctgaccgcgctgaaggcgttaccagttcactccttttattgttaaaaccttttgcactcccccgtaaccaagaattgccctttgctgggggcgatttgctggattttatggataaggaggttgagtgggaaggctgggctaatctggtggcggattcagaccctcgcctcagtaagtcgcaaaaagatgctctagtaaaagcgctgttgagctccttggcagaacggaaaaagatgacgcatacacttgaaagctatctaatggcaaactgtgctgcgatggatgcaaccgcctttgaacagagggccggggaacttgcacgcgagacattggcgtactcgcttgcctctgccgaagaggctgagaaacttgaagaatacttcagattggttgccagacgtattgagtcggttgagagctcacccttaaagcaggcattcttcggcaagacattgctgggcgcaaagcagactaaatttattgaagtatggtcaggcgaacatagagcaatgctgctagcgctggattcctctaatggatggctcaatgccgtctggccactactgaccgagctctgcgacaatcgttttttccgtagcgtcgagcctgcaggtgcagggttcgagatcgcactttcgtggatgtgcggaatgagttacggagaaatcttcaagaaagcatctcagatgcaggttaaaaagaaagccggtaagcgtaaacaaaaagtgagtgacgacgatattcttaagttcttggagagcacactggcatttgattgttcgctcattctggcagctcttgcacaattcctttttagtccagaggaaataatcggagagcaaggggcatcgctcgctcattttcagaagagcctaaaaaatggcctccctgacgtgctatccatgagtatatttgaggcgggatttgctgaccgttttatttctcaagctattcgcgacgctctcctccaggatggatatggaggcagctcatttgatgaggctaggcaaaatcatttaagcgttattgagcaagttgtcaaaggaacccctgcttatttcaattacgttttaagctcatactga

SEQ ID NO: 198040 - DNA, 810 bp, Klebsiella oxytoca
atgctacccgaccatttaaaaggtttacatttaaggtcagcaggtttgataaccgttgaaggccggaccataaatgtttgggagttctcgcccccaactgatccggcgattcttgacagttgggcactgcattttcgtcggcaatactgtacagaccaggagcttcctgagctcttgtgcgggacaggaatgacgatagaacagtatctaaatgcacatattttccccgacaaagtcaaggctcccgggccatcaattcgttctggtgatttcgctgaatttctcatttccgactacttggagttcacgctcaatctgtgggtgccccgaggaaaatacgctgacaaagccagcaacaatgagtccgtcaaaggcgttgatatactaggcttccatcagttggatattgctactcccaatcgaggggatgccctttatgcctttgaagttaaagcgtctctttcaggtggtatatatggtggccagctccaaaatgctgttgacgatggttctaacgatcaacacataaggcaagctttcacgttaaacgccactaaacgtaggtaccttcgtgaaggaaagacactggaagtgagccgaattgcacggtttcagaatcctgcagataacccttatacatattactcaggtgcggttgctgttctttgcaacacagctttcaatgaagaagagcttgccaagacactggccaacacgcactcaaatgaggcagcactttatctgatggttgtgagatccgatcttcagatgaaactggttcatgaactttacgagagggcctgcaaatga

SEQ ID NO: 198041 - DNA, 558 bp, Klebsiella oxytoca
atggctcgtatcgcttgtcttggatggggttccttaatttgggagccaagaggtttacctgttcaggggaaatggtctgaggatggcccacttatatccgttgaattcgccagacagtcgctagatggacggattacgcttgtgctagtcgaaactgatcgattagtgccttccctgtgggcgataatggaatcagtggatcttacctctagtattgaggctttacgttgccgtgaaggtatcccaataaaaaatattgaaaagcatgtttgcaggtggtctgctggtcagccttctccaaaactgatcccaggattgtctgaatgggctgacaccaataacgtggaccatgtggtatggaccggtctccctccaaaattcaacggtaaagaaatccttccaacagccgaaaaaattgtgaagtatttagaacaactatctggagaacaaagagatagggcggagcaatacattcgtcgtgcaccgcgtcagatcgacaccatgtatcggcgtattattgaatcatcgctccagtggcattcaacgggcggtgaatag

SEQ ID NO: 198042 - DNA, 207 bp, Klebsiella oxytoca
atggttagtcatcattacggaacacagaccgttaaccgcggcgccgttctgccagggatgctcgttaagcatcgggaaagcacctggacagcatcagcaaataaacgcggccgcctgtacctgcatcgtgggattgagcggacttacacaaccgacttactggttgaagtttatctgaacgggttggggcaaggtctcagccggtaa

SEQ ID NO: 198043 - DNA, 516 bp, Klebsiella oxytoca
atgaacatctcaacagtaaacgagctcattcagtcgctggagtctgctggcgagctgtcgatcagagagcggaagtatctggagctggcgaaagcttaccagcagctggctgcggagaacgtggggctgaatgagaagctagataaattagctatctggcccggcatcgaattctactcctcatcgtgggagtttaataacaatgatggcaatgaagccattgagttcatgtgcgatatcgaaacccccgccaccgatcgcatcgtagccgggattaaggctgatggtcgcgcagagggtatcaactttgccgcaagccgccttgcagccgctttcaatcacggatttgttgataagccaatggctgaggtaggtggcgtggtacgtatgattctgaccgcaaaagaggatttagcaaacgacccggtcttagccgccgatggactgtcaggtgagtacgcagaaaaatcactggctgagtgggaagcagcactgcgcgagggggcagacaaatga

SEQ ID NO: 198044 - DNA, 1245 bp, Klebsiella oxytoca
atgagcaacgccgcaatgattattatgccaacggatatcagcgaaaaggtacgcgaaattgaggttgcatacgctcgctatctcgaagagttccgtatccctgacgaccacaaaatcgtcgttaactactcggctggcaaggacagcaccgccacgctcgcagtggcacacgcgctgttcggcgacagggtcaaagctgttatggccgataccgacaatgagcacgagctcaccgtacagtttgcgaaaaccattcacgagcaaatcggctgtgctccagttcaggttgttaagcggatttataccgaagcagattttgagcgtcgtcgcggctacatccagaagaactgggttaagcgccaggcaatccgaatgggcgcttaccgcggggttgtgatgccgtcccttggacgctcagatactgcgtttggccaggcgtggctacgcactgcagagcgttggggtattgagtttgaaacagcactggaggcggcgctatctgttatgcatccgagcggtaacagcttcctcgactgcgcgctgctgcacggcaagttcccgatgctacgtgaccgattctgtactgacgagctgaagattcagatcgctttcgataaagcgatgcagcccatgcttgacgatggcgatgttgtggttcagtggtccggcgttcgggctgatgagtcatcaaagcgcgccggttacgagcgattttctacagaccagcgtgacccacagtttctgtataacttcctgcctattcacaactggacggcctccgatgtgttcgcgctgcacaagtatttcggcatcaagccgaatccgctctacacccaaggggcgtcacgcgttggctgcatgaactgcgtgctatgcactaaggaagaaatagcagaaacggcggcgcgctggcctgagcatattgagaaacatcgccagtgggagcaaaaggttcgtcttacttcgcgctgggttcactggatgagcgttggcactgaaagccaggcatggatgcgaaaatatgaccttccacttggccgcgctgttcaactctatggcctggagccagacgttcagcacatcgaatggtctggcttctacggacctcgcgggaatatgggcgctccgtcagtacctgatgtcatcgaatgggctaaaaccggtcgcggtggaaaggtctatgacctcgttaaggccagtctagatacttctgtgtgttcatcccgttacgggctgtgtgaatag

SEQ ID NO: 198045 - DNA, 390 bp, Klebsiella oxytoca
atgacaactgatatcaccgaactggcgcagagcctgaaagcggcagcagtgcgcgttattaaaaattacgacagtgaatggtttgaggcaggcaatcagatttgtaccgttcataagtcaaagataaatcttattagtcttgctaaccctgtcaacgttctcgcgctggtagaggcgctggagaaggcgcagcagcggatttctcagttggagtcccgcaccgtcaccgtgaatctggcatcccgccgattgccatctgattacgttgatggtgaattcggcaatgatgatttggcagcaatacataatgcgtgtcggctggaatgcaaggtcagtgttgaaaagtatttgtcagcacatgggattgtagtcaagtgggaggctgagtga

SEQ ID NO: 198046 - DNA, 486 bp, Klebsiella oxytoca
atgatatccttaaagccattggtggctgatggatttaggggtcaccagatggcatttaaagggacactttctggatactttcgcgatggcgaaaatgatactgaattctgcactgactggaaattcttaactaaagaagaaaaaactgaaatcattaatttcataaaagaaattgctgagaaagagtttatcactggtaaaaataaggaatcttgggtggatgataatcaccaggatatccccggagccgatggttatagagatgagaactattggcattaccattgcggtccggattgggccggcgggcgactgaaaagtatgacaaagtgccttttcttcaaccctggcggaatggcttcacaacagtgtatacactactatccattagaaaatgaagagaatgagatagttataattgggtattcaagaaaccatatcccttttttgttgcctgatgacccaaataacaagtttttttcctga

SEQ ID NO: 198047 - DNA, 636 bp, Klebsiella oxytoca
atgcgtaaaccagcacgccgtaaatgcgcccactgccgcgaatggttccatcctacccgggaggggcaggtagtttgctgctttgaatgcgccagcgcgatcggcaaaaaacagacagcaaaagcccgggaagatgctaggcagaaggaagcgcagcgtcagcgtaccgaagagaaggcggggcgccagcgccgtaaagcaagattggctgagctcagacctaacggttactacaaagcccaggctcagaaggcattcaacgcctacatccgcgctcgtgatgctgctttgccatgcatcagttgcggcgagaccaacccgcctgatctgcatggcggccagtgggactgcggccacttcaaaacggtcggcgcttaccctgagttgcgttttgaagagcgcaacgctcataagcagtgcaaatcgtgcaatgccggggccggtaagtacaccgccaaagagtcgacggttgctcagcaatacgaagctggcctggtcgctcgttacggacaggagtatgtcgactggcttaacggaccccacgaaatgaccaactaccgccgggaagactttattcgtatccgcgatgagtaccgcgccaagctcaaagcactgaaacagcgggaggccgcatga

SEQ ID NO: 198048 - DNA, 369 bp, Klebsiella oxytoca
atgggcgctaaagttcgcggtatccgccaggcgaaggccaacctcgaccgaatcattaaagacgtgcaggggcgaaaggttgtgcgcgcgttgcagtcggcgatgcttatcggtagcgcgcaggcggcgctatataccccgatcgacacgtcgacgctcatcaatagccagtaccgggaaatcactgctaacggcgtgcgggtgactgggcgcgttggctactctgcgtcttatgctacctacgtgcatgacccaaacattcctcaaaactttaggcgagcaacagcaaggaaagaatttctttccaaagggtttgaggatacgaaaggcgccatagatatggtgataaaaaaagaattgtcgctttga

SEQ ID NO: 198049 - DNA, 540 bp, Klebsiella oxytoca
atgaaatgcaacgataacattcctattgatttctggagagagtgcttatcctatgatgctgagaatggtgttctttattggaaagctcgcccattagatcacttcatgacaagccaatcctgtgcaacatggaataagcgatttgctggaaaaccagcgggctctcccaataatcaacaatacattcacatagggatgcgaaataaattatataaagctcaccggattgtttgggctttatattatggtgaatatcctcactcccttatagatcatgtcaatgggaataggcaggataacagaatcgaaaacctcagggtcgtcagctcatccgaaaactgccaaaaccagaagctacgaatcactagtaccagcgggtgcgttggcgtggctaaatgtaatagtggtttcaggagttacattcaggtgaacgggaaacgggttcatttgggggtatacccaagcgtagaagaggctttcgctgtaagaaaagaagctgaagccaggtatggataccatgagaaccatggaagaaaataa

SEQ ID NO: 198050 - DNA, 414 bp, Klebsiella oxytoca
atgagctttgccagtcaatctacgcagcaaatttttccatttccggctgacgttgcctttgaaaaacttttagaggctattccagaagtcgggatgacgattaaacagaaggatgacacacttcgccgagtttccgtaagtgctggaatttcacttttctcatggggtgaaaatgtgtctattgtggtgaattccgacggcgaaaactcatgcgtcgtcggtatagactccgccctgaagttaggcgttaacgtgacaggtgcacacaggcatcagaaaaacttcgacaaaatcatttatgcacttagcggtaaattaaaagagtggcaaaggcagcagcctttagacctaggtcccgaaaaaacagatgatgagtatctcgaagaggcccgaagaaaagctgggctaatataa

SEQ ID NO: 198051 - DNA, 942 bp, Klebsiella oxytoca
ttggttatatcaactcaaaaaaacacatttcgccacattagcggcaatctaaaatcatccatcatacaaaactgtgggggacagcaaatcatagaacgcatacttgccgcctacgatttcacttcgcgaaaagcactatgtaatcatctgggtattccgcagagcacaatggccaacaggtatgcacgggatacatttcctgctgattgggttgttatttgtggaattgagactggcgtttcaattgaatggttatcgtcaggtgttgacataaatgcacccgtgtatctccccgcagactcaactccaacacaaggtatatctccgagcaatcgatgttctaacaacacaaagtacccaattgagaacataactaatctcaatcaaggaggaaaggcggctattgaacgtttagttgaggcatatggctttacaactcggcaggccttggcagaccacttgggcgtatctaaaagcacgctagcgaatagatatatgcgtaatacatttcctgcagattggatcatccaatgtgctttggaaacaggtgtgcctctagattggttagtatccggtattggcgaatctgttcataaatcaacaaatgaagttttcaagcttcaaaaattttgtcttactcaaggaaatcttaaggaggatggtgagtgcgtctgggataaaaattatatttctatcaaggaagactcactatatatcgtagtagatgagaaacgatcatatatctgcgattcgaatttcaatcatgttgaagatggaaaatggcttatagatattgatgggcaaaaaacattgcgagacattgttcttttatcaaattcaaaaatacaagtgcggtatcaagatagtacctttgtgtataacaagaatgatattacattcattagcttcgtgagagttattattactgaggtcaaaaaatga

SEQ ID NO: 198052 - DNA, 414 bp, Klebsiella oxytoca
atgagtgaaacaaagcttcgctggtttttctatacctttgtcattgcaatcgtaccattcatggtaagattccttttaggttttaccactaacatcagcccgcacatattaacaatctctgatttagtagcattttcattagtaatgcaagtctcgactgtaggggcagcagaaatattgaatgatgagcacaaaaaatttaagactgtttgttttagcattactaccgtcttgattcttttttctggactatactatgccttatccattatttctgaagaaaatccagaaataatgaatctcaacagtagcatacttgtattgtttattatttgtttatcatcaacacttttgagttttaccgcacatcataaacttcaaagcaatgaacaattgtcaatggaggagatgtag

SEQ ID NO: 198053 - DNA, 168 bp, Klebsiella oxytoca
atggagaaatttttcacatatctcaattgggtatcagtactagtctctttgatagctattatttatagcgtttacaatatcaggaaaactaaaaaagagcttgatgattaccaaaaacgattagaaataaagaagaatcaatacaaagataaaacaaaggagatttag

SEQ ID NO: 198054 - DNA, 921 bp, Klebsiella oxytoca
atgagttctgaaaataataacaattctattaaaaatataatttatctcgattatgagaaaatgtattcactcagtgcacagttatttaaaggtgttgtttttgaatcattaattgaaaaaggatacagtttctccgagaaggatagcataaaaaactttgaaaacaacaacacggagaatgatagtcgtaagaattatgtaaaaccttatgactatcattattctatgttcgaaaataagctacatgagcttgacaaaataaccaccctatcaaaaggcgcatttaatgaaaagatatctttcaacaaaataaaaaatcatccatttattaaatccactggtgtaatattaataacagacccggttgcacttactaatttaaccaaagattttaacaaattcaatgaccaccttgcatatataactaatgctggagagatcaatgaattatactcaaaactaaaagaactcacaaaaaataacaaacaacaaatagctgatatacgctcaaaaataaaatcacttgaagatgagctagcgtatattcgtacatgttcaaatcagaagtatcatgatagccttgcagaaattttagaattcagttatggaacggaaatagaaatcaatcaaaacatgggtgaatatattatttctggattctttgagagggaattcctcaaacaaccagtgtcaactattttaaaaaggtactccagaaaaactgttacagaattcactatacttggtattactactcagtttaaaactgacgaatggactatacctgatgttggattcaatgacttcagaggtgcgatcaaaggacttaacgaagcaaactataatgtcgaaaaatcttttttagatgtagctgacaaagagttaattttagaacctatagcgatgtacacagaattatag

SEQ ID NO: 198055 - DNA, 996 bp, Klebsiella oxytoca
atgcatacttttgcacaagcactcgcttccttgcaggaaggggaaaaaccctccctgcttatgggaaatggtttttcacaagcttggtctccacaaatattcaattaccggaatattctcgacaatgccaactttggtgctcatggagatttaataagaaaattatttcaagagctaaatacattcgattttgagtcagtaatggataaactttcatcagcaaataggataattaaacactatgaccctcattgcgaaatgataaatctaatcaacgaacatcaggaagctctgaaaacggcacttatcaatgccatttctaattctcacccaacatacccacatcaaatatcaggcaggcaattttcttccgcgaggtttttcttatcttgttttgaaggattgttcacgcttaactatgatttattaatgtattgggctagaaataaaaacagccttgagcctttaaactttgagacagatgatggctttagggctggacgaacatggcaacgctatgacactgatcaagaagtatttttcttgcatggtgcgctacatttgtatgagcaaggttctttaataaagaaacatgcaagtagtgataatggtaacactattatcgaacaagttcagataaatttagatgaagatgctttccctctttttgtttccgaaccaacaagtgaaaagaaaaaagagagaattctacacaatccctatttaaacttttgctacgcagcgttacgtaggttgaaagggacattgttcatatacggacattcaatggataagaacgacaggcatatatttgaccaaatccgagagagtcaaatcactaaagtatatgtcagtatttatggcaatgagaatgatgaaaacaacaaaaaagctatagcaaatgcttatcgatttttatcaaaagatggatataatgttgtttttttcatcgcagaaactgctcctatttggggagaaatacaaattcccgcatga

SEQ ID NO: 198056 - DNA, 378 bp, Klebsiella oxytoca
atgaaaaatctaattttagctttaatacttggcgcatccgctttaacaattactggatgcgccccaacagtccagaaaatcgactacaaccagaaatctatgcttctatcccttgggatgagcaaaaatgatgttatgcaaattatggggtcgcctagaaggactgacgttaacccagagcgcgaacggtggatatattggaataagtctctatatggctacactattatcgataacgaacaattagctaatgatcggctagttgttacatttgtaagcgggaaagtggccaagtgggggcaacaaacactggctgatgatgtcatggagtcatcacaaaaaaccgcccaagcttatgccgaggcacttaaaaaatag

SEQ ID NO: 198057 - DNA, 312 bp, Klebsiella oxytoca
atgaaatatcaactcgcaaaattgtaccaggatgaccgcttctttgggtatggtatcgctgctgctggattgcttcttgaagatcaagtgtcaacaacggtagaaaccacgacagaaggaagacctgtcgttattgcgacattcaacctgaagagtgaacatttagaaaaccagccgcatattgatttaaaagacccccgtgtttcaaacgaatttcagattgtcattcatcccaaaagaacactaacagctacgcatctggaagagcttaataatgttctgcatgacttccttgcccgacatcaattgtaa

SEQ ID NO: 198058 - DNA, 198 bp, Klebsiella oxytoca
atggcacacgtgaaagtgaaagaattggttaccgcagcgtatgctgcagcaccagaactaccggcagcagcagcccaattgatgcaagacctagcgtcaaggctggatgtaacctttgtcgcccttacagaggcaatggaccagaacacagcgctgtcggctatgttagctgcaacccagaaacaggagaaaaattaa

SEQ ID NO: 198059 - DNA, 630 bp, Klebsiella oxytoca
ttgaatttttcttatctaaaagacaccttatctcaggtgtcttcttatgcatggatgttcagtgttgttagtatcatcctggtatttattggatggttcattacgtataataactccctgaaagtcgctacaagatcagagtcaaagtctatagtcgatgctatttctaaaattcttaatgaaatatcagatctttccctagattattgggttaatcagtcatttccaccaaaatcaaatccatatgttaggaaaacacccaagatgatcggtggtggtgtaactcctggtgcaaggctttatttaacggcgattcatggaaaatcaattcaaatcaacaaatatgttatttttctaaaatcccgtggaatattcatttctgatgattttttttctcaggtgtatttaaaagctacatttgaatgcgaggtttcatacaggtataataagggatatagagttcaacgtgcgcaggacgtttctagcgcatgtgttgaatttatcatgcatttatacgattcatttcaagaaaatcatcctccacgtaagcctgttttcattttaaaaaaacttaaatacttagatgaaaaaattgatgcgtggtatcagggattatatgagcggcactaa

SEQ ID NO: 198060 - DNA, 342 bp, Klebsiella oxytoca
atggttaacatcgtcatagcaagggatttctcaaagatgccatttggacggtatatgtccgacagcccgaacagtgctgagcgcttccgtagagattttttagttcctgcgctacgctcaagcgatcgagaggttgttgtcgacttcacaggtatcattcatggtattggctcttcgtttctagaagaggcttttggtggtctcgtaaggaaagagggtgtatcgaaatctgatataaaagaaagattagtcattaaaagtgacttgcctttttataaagaacagattttcaaattcatcgataaggctaatcctgaagcgaaatccttccaaaggagttga

SEQ ID NO: 198061 - DNA, 924 bp, Klebsiella oxytoca
atgacaactataaaatcacctaaacggttgtgtttatacaacgatactgatcgcaaacctagttcgagttttctaaacctcattaacagcatgcttctggcgcagcgtgggcagatatgcatagacttttctgatattgagtatgccggagccgctgcatgcgtaagactttttgcagttatcaatagagcttacttagtaacaaggcgaagcgacataatccggtttgtttggccgaagaaagaagaaaaccctactggccatcgatacattgtcggcactggactgtctattgctctcatggcaaactcattgacaaaactacagcaattaatcgttgaaaaaaggtacttccaatcagcagttgaaccatttaaccactgggtagagacactggatgttcttgatagtaaagctttactcaattttgaccagtatctcttagtttcctctgcccttagtgaggcgatgttgaatgtttcctatcatgcttatgaacatccttcatttgccgatgtcatacaaagcatggaagggaagcgttggtggcaaagttgctggtacaatccagacaccgacaagatagtttttatcatttatgatctgggcttaggcatacatcagtcttttacatcagcctcacccatctttagcgggtatgataatgttatgtctgtgttaacagctttaacagcaggccaatcaagatacgttaatgctggacggggcaacggttcagaggatataaagagacctataggctctggttgtgctgactcagagtcactattggtcttcacgggcaatgttatgtacagctataattctaagaatgaggtgcccaagtgcgagttgatacccgagtacatgccagggactctgattgaatggtcattggttccgaggaggggagaagatggttaa

SEQ ID NO: 198062 - DNA, 1515 bp, Klebsiella oxytoca
atgtctaaaaaaaacagttcaacgcaaaataaagaattattactaaacttccagacgcttcccacttttgcacagcgattgataagttacatacattacaaaacaggagctcccgctgagcttattttaatagtattaattggagtaatggcattttcctgccaggataaatttgatgttcagcttaaaaatgggagaacatttacatcactttacctccttttattagcacggtcaggtagcaggaagtcaacggtattcaaagcattgatggaaacaatccatcaaatagaaaaagaactgaagaatatctttctagaaaaggaaaaactttatgaactgaaaaaaatatcttgggatacggaattaaaagaacttaaaaagcaatttagcaaagctgttcgccagaaggttgatgtagctgaaacacgcgaagcactggaggaatgtcagaaaagtggaccgatagcaccggttagaaagtatcttactaaaaatgattcaacaagcgagggacttaaaaagacattagctctgggatctccgtcattgatgctctgttctgatgaagccggaggggtgtttgacagtagcctttttcgcgatatatcagttctcaactctctttggggagaagggagaatttcagacagcagagcatctcgtgacagctacgatgttgatgatgtccgactgaccatattgctgttactgcaacctgcaatatttaacgattttctaggcaagcaaggaaaaaaattaagaaactcagggttcttagcccgttcattactaattgatctggagcaaatacctgaactatgcgatatccctgatatatgttcatggtctgatgagccaggacttgatggctttttctctattattgttaagcatttgcaagacggcatacaacgtagagaaaacaatgaagaacgtatctatattactttatctgaagaggcgaaagcgttatgggaaacacaaaataagcgaatcagggaacttatgcaaccaggaggtgagttgcatcactatgatgattttggttccagaataatggagcaagccacgagaatcgcagcagtaatgcaaatgtttattacacccgactcaccaataattactaaggatacttttctgtcagcagccaaaataagtgaatggtgtattacccacttaattttaaaaatagattctaccagaaaacctagcgagaaagaaaaattgttattttggcttgaggaacatgttatcagtaataaatcttacgattttaggaggcacaccattcgtagagatggtccaaactctcttagaagcatagagcgcctgatacccgttttaaaagaacttgaaaaagatggcaaggtacagttatttaaagaggatggcgttgactatgtgaaatttactggttcagaagtaaaatatggtgatttggctaaagcattaaacataccgttaatttcatctggatctattggctttaataaactaccaagaaatgaataa

SEQ ID NO: 198063 - DNA, 699 bp, Klebsiella oxytoca
atggaatcacattattcacttaccaatgaagaaatcgtcatacttacgacggaatcttccagactgtatgattcccccattgatagctatatactcaacgaattactgaacatggtctacgatgcgctggaaaagcataagcgaataatggctgttcgtactgacctgagattcgcacagtctcatgtaactggagagcctgacttaccgctgtgcttccagcgagatgatatgcaggcaatcacccgcttcactgagtcactgaaaagccaactaagggcggatcacaaccggtccagaagaccgggagatccgacattaccatcttatggatggtgcagggaacgcgatacaagcgaacatccccattatcacctgatgttgttgttcaacggagatgtctacaggtatcttggcaattacaaagaccgcaacggtgataacatggctacccggatacagaaagcctggtgcagtgctctagggcttgctcacgaagattacgcaacattagctgagtttccaccaaatgctgtttacaggtttagcagatttgatgcactggatcgtaacccagtctactggaatttcctggttcgactggcgtatttggccaaaaccagaactaaggatgtccacagcggttaccgcaattttggcgcaagccagtgtccacgcttaggcggattagcctgttaa

SEQ ID NO: 198064 - DNA, 216 bp, Klebsiella oxytoca
atgagtggctattcccagacggcccgacaccgggttgggtgggcgattacggcgattgagtcagtagtgcaaatagaccaccatcatttggcttcaaactcttctgtcagggttgcgacagcagtcctgtgccaaaagcggttaacttgtgttcacgactatggggtgattaaattgaaatattgtttttaccttggactattgagagctgcataa

SEQ ID NO: 198065 - DNA, 672 bp, Klebsiella oxytoca
atggctatgtcacctcctcctatttttgaaggcgacgattactacagcgtccctgaagaggtttttaacaaattgcccgctgatctgagagcgccttttgaacaaataatgaagaagggggcggagattatcagcggttgcgataaagagattgaaagtctgattaaacttataaaggcaataccgacttcatcaagccttagttacatctatcatcggcttcgtacaaccaagtttgaaatcactacagaatcgatgatggaacaggagatgttaactaccgcttttgtggtcagctacgcacgtttgttcgccaaaagcaatggcacttgcgttctccagcggaatcacctccccacacaccttcgggctgttcatgatgagctttataaaattcgcaacgaacgttacgcccataacggggggcatgaatcgattgatacttcagtagggtttgcgttcagcggcacacaatttcatatacaggtgcaaatgagcttagggcttcatataggtggaagaaacgagtgggaagacctaatcaagtttatcgacgctttaatgcacgaacgccttaataaaatacttgcccgtttgaaggagcagacgggctatgagtggctattcccagacggcccgacaccgggttgggtgggcgattacggcgattga

SEQ ID NO: 198066 - DNA, 1272 bp, Klebsiella oxytoca
atgaagctcagaaatatttcgctgacaaattttcgtggcattcagcaggctgatgttgccatcgctgataccccgacggtgattgtcggggtaaacggtgcaggtaaaacaactctccttgatgctttagcaattacgctttcgcaggtcacgagccgtatttatgacagtgctcaaagagcgcgcagcttttcccaggatgacatttttatcgccagtgactacactcgcgcagtggtggatctggaactcgaaaatcagatcgtaacgtttgcgctagcgttaaataagcgtgcggcgaaacatccggcagaacgatcaagttatttcgatgctctcaacgcggttgtacagcccctgacagagagaaataaaaatttccttgaaagtgagccgacagccatcagtttgcctttggctatctattacgatgttcaccgcactgtgatggagatccctcttcgcgtcagagaaaaactgaaaaatacgccagttgaaggctatgaagatgccttagcgaatgggggggcagattttaaacgtttctttaactggtaccgtaacgaagaagatctcgaaaatcaggctaaacgacgcgaccatttttttacggaccccaaactcgatgccgttcgtcgtgccatcgagacctttacccactttagcgatcttcatattgaccgtaaaacgccattacgcatgatagtgacaaaaaaagggatggagctgagcgtgaatcagctgtccaatggcgaaaaatgcctgcttgcacttgtgggtgatttggcacgtcgtctggcactggttaatccgttatcatccaatccgctactcggtgaagcgattgttctcattgatgaaattgatctccaccttcatcctaaatggcaacgtgatgtactgaagaaactgacggaaacctttcccaattgccagtttattgtttccacacattcaccacagattattggcgaaattccgcctgaaaatgtgcttctggtgcgtgatggttgcgttttaggccatccctcttctgcacgcggtctgagcagcgatgaggttctggaattgatcatggaaggcgactcaagaaatcctgcgattaaacagcaaattgaaagcattgaggcgtgtctcaacgaagatgatgttgaggaagcccatcaacaattagcgcgactggaaaagcaaataggcagtacgcccgatgtaatgcgtttacagagtagtattgagacactggagctgttactcaacggtgatcgtcaatga

SEQ ID NO: 198067 - DNA, 783 bp, Klebsiella oxytoca
atgaagtcacttgtccgaggggctgaaccccgtgagttgcttacctggaaatcggataaccggttaacacctgaaaatctcaaatatggcagagccggttttccctcagaggcccttcgttgtgcgctgttgcaacagcaacattatttgtgcgcatatacgctcatcaggctcaaaaaaccgcaagagtgcagtgccgattaccaaacacgcgaaagttgccatattgaacatatcctaccgcaaacgcgcggagaattagtcgaaaaaaggcgttctggagatgaggtaaaagaggtcgtcaatttcacacccggtgaagacattgattttcaaaatatggtggcatgctaccccccaagccagcataaaacacattgtgattttggtgcacagcataaagaccattacgatccttatgataatcccttgtttctctcaccgctgacgccctctgtcgagttgcatttttcatttttttccgacggacgtattgaagccaagacagaaagggggcaggaaaccattagtgcgttacgcctcgatcatgacgaactctgttatcgacgaaaatcggtgataacgggcgcaatatatcccaaaggcagtaatcgtgaccccatttcagcttcagaagcgcgtcgccttgccgcggaagtattacaccctgcgccggacggccggttacgcgaattttgcattgcgattcatcaggtggctctgtggcacgcgaataaacttgaacaacgtgcaaggcgaatggccgcccggcgtcgaggctga

SEQ ID NO: 198068 - DNA, 558 bp, Klebsiella oxytoca
atgacaaccgtatttatagcaggctcaattaaaataaaaaatctggacagactcgtgattgagcggatcaggaaaatcgttgattcgggctatcaggtggtcgtgggtgacgcaaacggagctgatagttcaattcaacaattgatcctagatttgggttgcgaaaatgctactgttttcagcagcagcaatcacccacgtaacaatcttggcggctggcatgttcatgtagttgattcagagtatgcgcctggtactcgcgccttctttacggcaaaagacctgaaaatggctgaaatagcagattatgggctgatggtctgggattcacagagtaccggaacactgagcaacataattgagctgctgcgccagaataaatatagcgcagttttcgtcaacaaagtgaaggcattcgagttagtgaaaactccatctgatttgaaaaaactgattaattacatgtcgccagcggctctggaaaaagcagagcaaaagatcaaacttagccaaaaactggataagcttgataacagccaaatgcaaatggtgttatga

SEQ ID NO: 198069 - DNA, 585 bp, Klebsiella oxytoca
gtgaacgttaatctgaggaaaatagaaggtaactggacgctaggatatgcgctggataaacacacgcttagcagcacatttcttggttacaacgaatatggcagaggccagtgggacacaacaagaagtgaggcaggccaagctctttttcgattgaagtacagagatgactatagccagatagaggcgatagctcaggcaatcgtgaatgagatcgtggcaccatattttccaaaaattggctttgttgtccccatgccagcatcaaaaaaaagggacgttcagccggttacgaagcttgctaaacgtgtagcggaattactgggagtcgtttgtattgaaagctcgctgttaaaagcagctacagatgtatcacttaaggatttgacaacgaaagaggaaaaagtagctgtaatcaacggcgcgttttcagtagtagacaggatcaaaaatgaggggcagtgggatgcccttctaattgatgacttattcgatacaggagccaccatggaggctgcatgtcatgctcttggcagctacaataaggtcaaaggcatctatgtcgctacaatttcgtggaagtaa

SEQ ID NO: 198070 - DNA, 168 bp, Klebsiella oxytoca
atgcttagagtcgctcagggcagtctctggcggcttattattgatgggcagaggacttgcctttgtcacctgaatacccccctcatattcaatgttcgccacattcctacccatatattagatatcaatccatgtaaccgaaataccatgagggactcgaaaatgtag

SEQ ID NO: 198071 - DNA, 864 bp, Klebsiella oxytoca
atgaaaaaatctgaaggttttcagtcgctgcagcaatcactttctggcctgccgcagtgggcatcagagcgtattttgcagcagataaaccagcttactcactatgagccggtgattggcatcatgggtaaaactggttcgggcaagagcagcttatgtaatgctctgtttgccggtgagatttcacccgtcagcgatgtgatcgcctgcacacgtgaccccttacgctttcgcctgcaggtgggaaagcgctttatgacactggtagatttacccggcgtcggggagtctgagcgccgggatacagagtacgccgcactgtaccgcgaacaactcccccggctcgatctggtgttatggctcattaaggccgatgatcgggcgctggcagtggatgagcattattatcggcaggtgattggtgaagcataccggcacaagatgctgtttgttatcagtcagtccgacaaggtcgagccaatcagcggcggtgatatgttatccacggaacagaaacaaaacatcagccgtaaaatctgccagttgcatgaactctttcagccggtcaatccggtctgtgcggtatcggttcgtttgcaatgggggcttaggatgacggctgaacgcatgattcgttgtctgccacgtgaggccagctgtccggtggtatctcagctcagtgcgccgcttcgtaccgatgccgttaataaaaaagcctgtgacgattttggggaaacggtaggctcggtactggatacagtcagttccatgcccctgataccggccccggttcgggcaatcattcaggctgtacgcgacaccgtggtgtcggttgcccgtgccgtctggaatttcttcttctga

SEQ ID NO: 198072 - DNA, 321 bp, Klebsiella oxytoca
atgagaagtaacatcacatggggcctgcagcgggatatcacgccacgcctgggagcacgtctggtgcaggagggcaaccggctgcactatctggctgaccgggccagtatcaccggtaagtttagtgacgacgaatgtcttaagctggatgtggcatttccacattttatcacccagatagagtcgaggctgaacactggtgaactgaatccccgtcatgcccactgcgtcaccctgtaccacaacggttttacctgcgaagccgatacccttggcagttgcggctacgtatacatcaccgtttatcccactcaacgctaa

SEQ ID NO: 198073 - DNA, 321 bp, Klebsiella oxytoca
atgaaaactctacctgcaacgactttgcgggcggctaaaccatgcccgtcaccagtgatcgtatggcaaatgcttctttcacgcctgctggatcagcactatggcctgacactaaacgatacgccattcagtgatgaaactgtgattaaggaacatatcgatgccggtatctctttagccgatgccgttaattttctggtggaaaaatacgaactggttcgcatcgatcgtatggggtttagctggcaagaacagtcgccttttattactgctgtagacattctaaaagccagacgggctatgagggaaatgagaacttaa

SEQ ID NO: 198074 - DNA, 252 bp, Klebsiella oxytoca
atgccggaagatattgccgaaaaattaacctggcagcgtaacggtaatactctgatcgttagcaatcctacagcgtactacatgaacttcagtaccatcaaaatgggcaatacttcggtaaaaaatgccgcctgggttgcaccgaagagctcggttagctttgccattcctgccggcgcgagcggcgatgtggtatggacgctgattactgattatggctccgtcggaaaagagcatcgagcacgtttataa

SEQ ID NO: 198075 - DNA, 396 bp, Klebsiella oxytoca
atgaaaagagaatacgcagacaaaattaattcactactgcaatgcttccatttcaataaagagtttctggaatggaactatgattattcacatcaacttttacgccacggcgtttcccacctttatcacttcgccatgctccagggtgagaacgatgaagccacactggaagagctgcgcaatatcattatttcgatcaccaatggtgacatcccgaagccatacgacctgtcgtctatggatgctgaacagagcgaagccaaaggcaagacactgatgtttgcgaaccctgtcgcggtatcagttgaggtaacacctgaaatgatacagaacctgaaacagcaaatggcgaaaatccccgacaggatgaaaaaaccatctctgtacggttattag

SEQ ID NO: 198076 - DNA, 1776 bp, Klebsiella oxytoca
atgaaatattctcaacttacggatagttccttctggctagctctacaacaaaggaaggatttggaaaagtatggcaatctaaattgcgctttatatgcaatagaattacataacaatatagatagtattgatttgatagcgcctgatatcataactgaaggtggagatgacgaaaatattgatatattaatgacggatagggaaagtaagcaaatttatctaatacaatcttatcagtctgccatatttcgacctcaaggagccaagccctcaaaagctcaagaaacatcttatgctgagacagcattactttcggctgatattgataatatcccactaagaatcagggaacaggttagtgatgcaagagaagctttgagaaataaggaagttgataaaataaatgtatggtttattcataattgtccagaaaccgaagaatgtgagagacctttacattcgatcggtcgtgctattatggataaaataaaagcgatttatcagattgaaaatttgagagttagttctaagcaaatgggattgaattctcttgatgagctttataattcccagcatagcccaattttgatatctgataaaatatcgttaacagatattcatgggttttatcagagttcagatacacactgggcatccttttccacatttgtaactggtaagtttatcaaagatctttatagtagttatggtgaggatcgtttatttagtgcaaatgttagatcttatttgggtagcaataaaaaagacttgtcaattaataaggaaattcagaacacggctaagtctcaccctcaaaacttttttgtttttaataatggcattacggcattagtacacgactttgaactggatttatatgctgactcaccaatcttagggcaattaaaaagtgtgacaggtatatctattgttaatggcgctcaaacaactggaagtatttctaatattgatacagaacctgatgatgatttaaaaattgctattagattcattaaggtggaaaatcctgaattaattaacgaaatcaccctagctaataactcacaaaataaagtgttgcgttcagattttcgctctagtgatccaattcaaaaaagattaaggcgagattttagtcagaacaaagaatctttatatactggtgggcttcgccaagttttaacgccagcgcagaaaagaattcttcttcccacggatacagtagctcaaatattgatagcgtttcacgaacatcctactagtgcatatcataggaaaaaagatatttgggatgatgaagaactgtatcaaaaagcttttgacgataccataaccatgggccatataatttttgtttattcgctaaatgaagcaatcagtcaaacaaaatcggagtttaatgagcagtacaggcataatcaactccctgaagtagatgctattaaacataagttattaactcagccaggtgtgtcattattaatgatacacgccatcgccagtataatggaaattatacttggttcagcaattcccaataaatatattttatccttcaaggaaggcgtaaaaagagaccaagcaaaagaactctggttgccggtaataaaaagagtgttaacgagatctgcattgcttgagccagcaacagcaggtagactttctaagcgaaaagacatatcggagataataactcgcttccaaagtgatatggatatgtatcgagatgattttaaaagtcttctgccggaatttatttcaaatatttattattaa

SEQ ID NO: 198077 - DNA, 525 bp, Klebsiella oxytoca
gtgacggatgaagtattcatttcttttttagctttactagtgtcagtaatggcactaattgcatcaatatttagttactttgtttcaaaaaaatccttaaaaataactcaacaacagcatgatgagagagaacttgatataacactgtatttcatagaagcatataaatggcgaaaagaaaatgatatgtacatatcttttgcgttacgagttacaaatcaagcaactctaaccaactctatccctaagttagatttaactattgaacatcatgacgagaacaatattatcagaaaagcgaaattatcccccaccacatcagtcacacctcttaaccttaaagatcacactgatatatttcatcttccattaaatatttcaccaaaatccgctcaaacaggatgggtgacttttttgatacctaaatcgatggatgaatatatgatagatctttacaaaatcacagcggaaacaataaataaaaaaacatcctccatagacacacacattataaatgagatctaa

SEQ ID NO: 198078 - DNA, 558 bp, Klebsiella oxytoca
atgcaaaacaaggtaaaaattgagccaagcgactatttaaatctgattaatgatggtgcaatagcaaacgcaaaaacagcagatggaaaattgattccattattaattgtggatacttcggtaaataaagacctcactcacttagtcaatatgcatgaatgtaataacattggtgatgttacttccctctgggcatataaacgattcgatcacagatacgtgagtttggttttattttttgaaagacctgttgaaatgaaattagcaatatcatttgaagtattgagacatgcaccattaattgagggaattctaatttcaaaagctttatatttgcagccgggaaaacccggagataaaatcggaaataatttttctgcccctagaatattagttgaaataccagaaagaacgacctttgatatttgggagggtattttaaataaagctatcaagaaaaaattcaaaaaagaaggaattcaaaggaaaaacttaaaaaaagccgctaatgaatatattgcattaataaaaggaatttgggggaaaagattaaaataa

SEQ ID NO: 198079 - DNA, 897 bp, Klebsiella oxytoca
atgagattggttctgcgtaagcctgagaaaagaatagaaacggtgcatgattttgtaaaatatatcactacgttggaaagaaagggctcattaccaacggcctttaggggccagaggttttatggttggcccacaaagcctaaaatattcagggatgatgttggtttatacaaaagcgaagatcttgcagtaagggatattgtttctatacatcccaatgaattcgaatcagataaaactatgttcgatagacttgttagaatgcaacattttggtttaccaactcgcttagttgatgttacaacaaatccgttagtcgctttgtggtttgctacagaaaaaagtaatgattctgatctgtggcatggaggcgtgcaggcactttttataccaaaaagtagacagcgttattatgatagtgaccgtgtaagctgcatgtccaatattgctaatttaaagcacacacaaaaagaaaaactatttcaacatgttgaaaatataaaggatgtacaagagtttaatgctcaggatgaggtcaaaatgcttgtgtttcatattggaatggaaaagtataattttattaataatataaatccaagtgatttagtgttgccagtctatgttaagcccaaaatgtctaataaacgaattatagctcaatctggtgcttttatgttgtatggggcaaaggggcgcaaaggtcgaggaaatgaaagccatgtaattacgtcacacatgtggattcatgaagatgataaacctgaaatacgaagagaacttcaattactaggaatacacgagagcatacttttcccagaaatagataaaacagcgaagtttatcgcagaacaatatggtaacgatgtcaggggacgtaatatggatagcctgatttaa

SEQ ID NO: 198080 - DNA, 933 bp, Klebsiella oxytoca
atgaatggattagaaaaaataaaattgttagacaaaatagccatcgaacttcagtctagtatgacattttctgatatcgataattattttagaggacacggagttccaactcaggatagttatcctcataatagtaaaagatcatacgcaaaagatatgcttgctatggtagatgaaaataaaatatttacaatcgctggtgagttagggcttgttgatgcatctaatctaactgatatcctacagcaagttgatgttggattttggaaacctggacactttaggctttttttgagtcatttagcctcttttaaaattcagacatcccatcttcaaaccgcgttaagaaaatttgctatatcaagctttgttgcacatgaagatatcgaacctacaaaggaatggcaaaacgaaatagaggctggtttaaaaactatggatgcactggccgccattctcatgccaggctttcaagagagtaaatggtgcgatcaagagataggtgttgctattggtcgggatgttttgattattcctatacgtaagggcctagatccttatggttttattggaaagtatcaaggtatccaagcaaatggtaaaactattggggaggtagcagaggcaatcttcgggacattagtaaaatcaccaaaatcaaaaaataaaatacttctttcacttgcgggagctgtatcaaacgcaaactccgttgaagaggcaattgaaaaaatttctatatttaagactttagaaggaatcccgatgtcaattttagataaccttaaacaacaggttatggaaaatcagcatttaattgagtcaaaagattttttgagagattttaattcaatgctttataaattcaatgtacagaagctcgtagtagggaaaattaaaccagaaacagagtgggatgatatcccattctaa

SEQ ID NO: 198081 - DNA, 288 bp, Klebsiella oxytoca
atgcttcaggcgggcaacgccgccgatccggtggcttttttacgcaagctagcgcaaaagacgtcactcaagccgcataaggagacgctgatgaatattgctcattttcccgaagagcgaggtcgcaaagaggggatgcttcagggaatgaaggcggggatagaaaaaggtttgcgcaagggccgacaggaaggtcgtaatgaaggcagaaatgaagggcaactagcggcgacaaaacgcatcgcccgggcgatgctggaagaggggcttgagcctgcgcaaagctaa

SEQ ID NO: 198082 - DNA, 372 bp, Klebsiella oxytoca
atgaaatggtttcactgcgcgttctttcaacattatttggatcttaatgagcgggccagccggcgtgagttctggtggtatcaatttgttgtgatggttattttgatcggaagtggacttctgtcattcatattatccgatactccgcaggatgtgatgccagtaatatacgcgaccatcactttagtcctgctgtgtccctcttattccgtgctggttcgccgtctacatgatatcggtcgttgcggatggtggggaatactgataatcctgccggtggtgggttggctgatcctgctgtttttcctgctgaggaaaggtcaggagtgcgagaaccgatatggcccaccgccaatttatttttttgaataa

SEQ ID NO: 198083 - DNA, 972 bp, Klebsiella oxytoca
atgaaaggaaagcttaagcgaagtgcactgatggtgatgctggcttccctgtcagcgtcagggatggcggcggcagaaagcccggcagcagcaacgaccaccacggttgcggtgatgtctattccggcttacacgctgatcaccgattcactgaacagtctggtgcctaaagtcaacggtaaggtgaacgaacaggtgatgagcctggtctgcgacatggcgcgcggcgatcgcgttcgctccgatatcattcgggcgctggagaacagcaaagtgaatgtggcggcggtaccggtacagggaagcccgttatccgttctggttcacggtgatacccgccagcagcagagcgtgtgcgcttcatacctggcgacgtcgctgttcgatgcgccggataacgtccgctaccgcagcatgaagaaagagcaggtcagcgaagagaagctgctgcctgcgccagcaaaatggaaggtgtgggaagcgcaaaaaaccgaaacggtcaccaccgagcgtgaagttccggtctgggatacggcgaaattcgcccaggacgtaaaggtgcaggtgacgctggcgaaagcgacggcccagttgtatgcactgctggcaacaaatctgggctcccagccgcaaaccgcggcgatggtcgatgcgcgcgtgaagcagtcgctgggggatctggcaggggattatctgaactctgtacagcagatgtaccgagatacgcaggcgcagaccatgacggtgaagcagctcaacgaaaccgggtacgcggtttcggacgggggcggtaatattctgcagcgtagcgatgccgggctgagtctgacctatcgcgggatcgagtggctgggtaacggcaaaatcctcggcaaggatcattttgttaatctgagtctgcgggatatccccgtcgcggtggctgagccggttgttgaagaaaaaccaccggtgaaggggcggaggaaataa

SEQ ID NO: 198084 - DNA, 780 bp, Klebsiella oxytoca
atgaagaaacagatgaagtttggcctgctggcctctgcctgtgcggtattgctgctgacaggatgtacccggagcctgagcaaccctgacgccctgggaaagacagtacagccggtgtttcccgataaaacgtcggcggtcaggagtgaaggcagctacccggacgtgaatgcgctggtaaaaatcaagccggggatgaccaaagcacaggtctacgagctgcttggcgtcccgcactttaaggaaggcgtgatgcgggttaaggagtgggattatatcttccacttcccggtcgccgggggggcagtagtgacatgccagtacaaggtgctatacgacagcagcctgaaggtgggggacacgcacttcctgccggaaaactgcctgtcgcagctggagccggcgaagcccgcggtcatgcaacgggaactgaatgctgaagcgctgtttgcctttgccagcgcgcagttaagtgctcagggggaatcgcagatccgccagctggcggcagacattcgtcagtccggtcaggaggttcgccagataactatcaccggccataccgatcgcttcggctcagcggaaagtaatctgcggttgtcgcaggcaagagcggagtcggtgaagcgggtgctggtcgccagcggtctaccggctaacatcgtcacttctctcggaatgggcgagtccatgccgcgggtgcagtgtgaaggcggtaaatcagcggcaaccatcgcctgcctggcgccaaatcggcgtatcacggtagacgtgcagtaa

SEQ ID NO: 198085 - DNA, 2724 bp, Klebsiella oxytoca
atgggtgcagtggcaaacaatgccggggatattgcgctgggcgcgggctctctgtcggaagcggcagtgggaacggcgggggtcagcatcaacggcaccgactacgcgtttgccggggcggcgccgaccagcacgctgagcgtgggcagtgaaggggcggaacgcaccatcaccaacgtcgcggcgggtcgtctgtctgagaccagcaccgacgcggtgaacggctcgcagctgtacgccaccaacacggcggtggagaacctgaacatcagcgttggcgggctgcagaacgatgccctgctgtgggatgaaaatctgggcgcgttctcggcaagtcatggctccacaacggtgaacaggatcaccaatgtggcggcaggcgagctgagcgataagagcaccgatgcggtgaacggtagccagctgtatgcgaccaatcagcaggtggaggcgaacaccaccagtatcaccaatctgggtgattcggtggagaacatctacaccaccgggacgaagtacttccatgccaactccaccggtgcagactcgcaggcgctggggctggactctgtggctatcggtatgggcgcagtggcgaacaatgccggagatattgcgctgggcgcaggctctctgacggaagcggcagtggggacggcaggagtaacgctgcgcggtatcgactacgcgttcgccggggccaacccgaccagcaccgtcagcgtgggcagtgaaggagcggaacgcactatcactaacgttgcggcgggtcgtttgtctgagaccagcactgatgcggtgaacggctcgcagctgtatgcgaccaatacggcgctggatgaattgcacaccagcgtcggcggactgcagaacgatgccctgctgtgggatgagacgctgggcgcgttctcggcgggccacggcaacacgacggtgaataaaatcaccaacgtggcggcgggcgtcctgtcgaaagacagtaccgatgcggtgaacggttcacagctgtacgccactaatcagaatgtggagactaacaccaccagtatcaacaatcttggcgatacggtggagaacatctacaacaccggcaccaagtacttccacgccaactcaacgggtgcagactcgcaggcgctggggctggactctgtggctatcggtatgggtgcagtggcaaacaatgccggggatattgcgctgggcgcgggctctctgtcggaagcggcagtgggaacggcgggggtcagcatcaacggcaccgactacgcgtttgccggggcggcgccgaccagcacgctgagcgtgggcagtgaaggggcggaacgcaccatcaccaacgtcgcggcgggtcgtctgtctgagaccagcaccgacgcggtgaacggctcgcagctgtacgccaccaacacggcggtggagaacctgaacatcagcgttggcgggctgcagaacgatgccctgctgtgggatgaaaatctgggcgcgttctcggcaagtcatggctccacaacggtgaacaggatcaccaatgtggcggcaggcgagctgagcgataagagcaccgatgcggtgaacggttcgcagctgtacgccactaaccagaaggtagataacctcgattatcgggtaactaatattgaggagtcttacaccaacacggtaatgccaactatgcgttatctgaaggtgaactctaccggaccggacgcggtcgccagcggaacggatgccatcgctcttggtcagggtacggttgccagcggtaataacagcattgcgaccgggaatggcgcgcaggcttccgggaatggcgctatcgccaccggtaacagtgccagcgcatcgggcaccggcagcgtggccatcggtgataacgcctcggtaaccgccagcaactcggtggcgctgggcagtggctccgtcgctgaccgcgataaaacggtctccgtcggctccgccggtaacgaacgtcaggtgactaacgtggcggcgggtacggaagataccgatgcggtgaacgtggcgcagctgaaagatgccaccggcagtatcaccaacaacgtgaccaatatcagtagcggtaaggacgggatgttccaggtgaataacaccagtaactacgccaaaccagccgtgagcggtagcgattcactggcgggtggtgccggatcctcagccagcggcagcaacagtatggcggtgggtacgaaggcatcggcgtcgggagcaaactccgtcgcgctgggtaatggttcgtcggcgacggccaaaaactcggtggcgctgggcgctaactctgtggccagtcgcgagaataccgtctcgatgggtactgcgggtggcgaacgtcagataaccaacgtggccgcgggtacggaaaacaccgatgcggtgaacgtcggtcagctgaaacagggtgtctctgaatcggttaactacgccaacaagcagtttaaccagttgaaaaacatggttaacgaccagaaggacaagctcagcgccggtattgcgggtgcgatggcgatgtccagcctgccgcagccttactctccgggcgcaagcatggtgggtctgggcggtggtacctatcagggccagtcggccgtcgcgtttggcgtgtcgaccatctctgacaacggtaagtgggtaaccaaagtgtccggtacgacgaacagccagggcgacttcggtgcttcaatcggtgtgggttatcagtggtaa

SEQ ID NO: 198086 - DNA, 408 bp, Klebsiella oxytoca
ttgaatactgttattggtttcagtcagttgcgagaagttcaccgcatcactcggcgcgctgccatccgccacgttagtgatggtggttcccccctcattggtgtactggttgtaagtgtcaccgcccaaggtgatatcaccgtagtttacggaaccgtcctcgtggagatcgtactgtaccgcccggtcgcccagggtgttgagcgcggtattggtcgcgtggagctgcgaaccgttaatcgcatcagtactggtttccgacaggcgccccgccgccacgttagtcagggtacgctccgcgccttcactaccgatgctgacggtgctggccggggctacgccggcaaacgcgtaatcggtaccgtcaagggccaccccttcggtcgccacggtttcagccgtgactga

SEQ ID NO: 198087 - DNA, 390 bp, Klebsiella oxytoca
gtggttttgccgcccttgaccgtcagcgtctcgccgagctttttggtcaccgtgccggtattaccggcaaaggtcagcggggtgttagccaggttcgtgatgttggtggtgttggtcgccacgttctggttggtggcgtacagctggctgccgttcaccgcatcagtactggtgctgctcagcgtcccagccgcgacattagtcaccttcttgctgccggcattcacgccggtggtggtcacgcttggcccgccggtaatagtcagtccggaactgttaatagtggtggtgccgccgataatcgccgaggtaaaaaccggattctccgccatctgtacgaccagattaccgttcgcgtctactaccgtgttcaggttagcgtccgagtag

SEQ ID NO: 198088 - DNA, 390 bp, Klebsiella oxytoca
gtggttttgccgcccttgaccgtcagcgtctcgccgagctttttggtcaccgtgccggtattaccgacaaaggtcagcggggtgttagccaggttcgtgatgttggtggtgttggtcgccacgttctggttggtggcgtacagctggctgccgttcaccgcatcagtactggtgctgctcagcgtcccagccgcgacattagtcaccttcttgctgccggcattcacgccggtggtggtgacgcttggcccgccggtaatggtcagtccggaactgttaatcgtggtggtgccgccgataatcgccgaggtgaagaccgggttctccgccatctgcaccaccaagttaccgttcgcatccaccaccgtgttcaggttcgcgtccgaatag

SEQ ID NO: 198089 - DNA, 390 bp, Klebsiella oxytoca
gtggttttgccgcccttgaccgtcagcgtctcgcccagctttttggtcaccgtgccggtattaccggcaaaggtcagcggggtgttagccaggttcgtgatgttggtggtgttggtcgccacgttctggttggtggcgtacagctggctgccgttcaccgcatcagtactggtgctgctcagcgtcccagccgcgacattagtcaccttcttgctgccggcattcacgccggtggtggtgacgcttggcccgccggtaatggtcagtccggaactgttaatcgtggtggtgccgccgataatcgccgaggtgaagaccgggttctccgccatctgcaccaccaagttaccgttcgcatccaccaccgtgttcaggttcgcgtccgaatag

SEQ ID NO: 198090 - DNA, 735 bp, Klebsiella oxytoca
atgtccaggttaacccatatttactcggtaaaaaaaatactgagtcttctgcttctattttttttcagcaacactatttccgcgtctgcggaaaatggttcgctgaatccatctcatgctcttatttctggcgaaaaaacgccgatggcgactttccagcaggcggttaatgacgacctggcgggccgccacagtgaagcccggcagaaatatgatgccctgaataacggtatgctggcggggatcgttcttctaccttcggcagttaacctggcggcgctggatcgctacgacgaagcccagcgggcattcactttattgcgacaaaacggtaatgggcgcgagcgggattatggcctgctctgggatttatggttaaccgccaggacatggcaaggaggggcaacagcactgcaaaaaacactgactgataaagccgctaattataagtggttttcggcatatgagtcggccattgctgatatttacagcgggaaaggtgatgaaaagtccgtgtttcagctaatcgatagtattgctttcagccaggcagaggaaaaggcggatgccgtcactcaggcggtcttttttgtcggcggctattaccagtacgtaataaaccagccgcagaaagcgcagaaattatatcgcgactatgcgtcgcagctgaataaaagctctctggagcgaaatctggttctgaaagagcaggcatctctgcgcatatctcaataa

SEQ ID NO: 198091 - DNA, 555 bp, Klebsiella oxytoca
atgaaaagctactttatttccgatgacacttttttcctttatgggatccccgttgcgacagaggacgaagccgctgcttctgtgtttattaacctcaatgaaaaggaaagtctgagagcgttcgaacctgtggcgggtgatatcgttgtggtggctgtaaaccatcatctgaacagaaagaaaattctgcagaaatcgatcatgccattttgtcgggtggtgatcatgctggatattccgataaaccgtagcggtacgattgagttcccctgcatgatatcaaaaacgatatcctcactggatttccgtcgttttatgaaagtggccagaaatatacccgccaggcgagggacggtatcaaagaagctcctcggcatatttaaccagcttagcgctgattgttcacctcagctgcatactgccaacacgggtttatcaatgaggattatctaccgcattaaacgcaatatttttcaaaaatacgggctactcaactgtaactctcagggcattttagagtgtcatgatatgctgagaatgaaagtcccggtctga

SEQ ID NO: 198092 - DNA, 465 bp, Klebsiella oxytoca
atgaggcgcttggttttcctggctgtggtttttttgcttgtctcaattattacgctggtagcgacagttaagcattatgatagtcttgatgttaagtgtcggggtgaatttgaaagccatgttaataataaccaggttatcgctaatgttggtgttagctttaccggcgggaagggggttgttattattgccgggaattatcaggacgctaataatgaggtggaaaatcttaaggttacgactgtttttaattacgctgtatatggtaagttaatgtatcttacggtaacccagcagcattcctctattgcagatgttgagctcaatgataagttgcagcaccttttgccgatgatttttagtagtcgggacattgaatatgtatatgagttccagcagcaaaaaggcggcgattatctgataaagcagcatggcattccaatcctctactgtaaaaaaacgtag

SEQ ID NO: 198093 - DNA, 786 bp, Klebsiella oxytoca
atgagtaaggtatttttgataaatgagctgattgctttttatccagaaaagaatttgctggtgaacacggggaatgtcgaaaataaacagattctggggcgtccgagttcacgttgtctggaaatgttacttgaagttgctggctcaatcgtgagtcatcagtcactatacgagagtgcctgggaaaacagcgttaatgagacctcgcccaatacgctttatcaaactatcctgttggtcagaaaggccctgaaggctgtttcagagaagaacgatgattttatcatcacggttccacgaaaagggtttgtgtttaatgaaaaaatgcaggtaaaagttgaggatggggtaacggattctataggtgccattcccgcaatcggaagtatggcaccaggacatactaaaaatcataccaggttgttatcgactgtaaatgtaaatccaggcttgatgatcacggtaataatcgttgcaggaatgatctgtttactcattgccgggtataaatattttttgtttaaacaaaatgattttacgcgtgactatacaaaatatcaaaaaataaatgattgtactctctatttgcggcagcctgtcgacatttataaaaaagagatagctatctttctggaaaggcgtaaagagataacaacggattgtgaactgtatccatatcgatatgtcagtattgtttcaaaacctgtggttttttatgtgatcgcatgcaataaaacagcaggcttgggccaaaattgcacgtcattttatataagggccgaataa

SEQ ID NO: 198094 - DNA, 195 bp, Klebsiella oxytoca
atgaaacacataatcaacgatcgccatttgagtagtctttccagctattcctttagtgaatttcgaattttgaagctgaatcatagatgttttatggttttttattttgttaattttgattcgtcctacaaaattatgctgttaatgcttataaaaataatgaagtggaaaaattctatttttgactttttttag

SEQ ID NO: 198095 - DNA, 435 bp, Klebsiella oxytoca
atgaaaatatttggttaccttcttggaaatgagaatgatggtgttctctttctcaaagaaaaacatctgttattaccgcttaacggccgatatagtccgataagactaagaagtactatgtcacgattgcttctgtatctcttggaaaaagcccatataggtctggtgcgcgatgaacatataatgaaatatgtttgggaaatacatggactgaaagcctctggccctcggttatggcaagtcgttaacgatcttaaaaacaagctcagcagaattggcatcgaacacagtttcattatgcgcgttgagggtaggggctatcttatcaacgccatgtattttgaatcaatatacattagagccgcctgggtagtgttagacaattttatgactgaaagccaaaacataacgtccttcaagcttgttaaggaataa

SEQ ID NO: 198096 - DNA, 564 bp, Klebsiella oxytoca
atgcttgtatattcatctgatcagtatttttctcttgcaatgaatgagatactgagtgaatttaaaaatagaaagaccaaggaactcattcttattgattctgggaagaaggatttatacatatttgaagttaaggcgctatccagcatcctacatcaggattcgttttctgcgctcattaatagtcaatatatggtttttcccaggagcgttgccattactcagctgcgtaactatattgcagccggcgtactctcattgaataagcgtgataagaaaatggatatgacgcgtatggaggagtccattttgcgcgcgctttatgcaggattgagcatgcatgatattgcagaacattatggtatgacctcaaaaagagtcagctcattaaaacgaggcgcattaaccaaaatgggcattgacaatatttcattattcttttccttcttacggtgctgggagtttttctggccatttatatcatgcttttatccatcaacggcaaaatatgcaggaaaaatgatgcttccttcttcaagctcttctctaatgaagcatagttaa

SEQ ID NO: 198097 - DNA, 552 bp, Klebsiella oxytoca
atgaaatatcgcatattacttagcgccttagtcgtttgctgtaccctgccgcttaccgcctgtgatagccaaagcgatgcgtcgacagactcggccaacaggacccaaattgctgatggtaaagcgtcaattgtactgccggaaggctatattaaaatgtctgacgagctgctggcacagaaatatccagcggcgaatagaccgaaagaggcctggttcgtcgaaaaggaaaatggcaaggtaactttagcctttaatatgacgcaaaacgcgattaaagaagctcagctccctgagttttcgcaaatcatgaagaataatcttgcgactttctctccggaagttagctccgtgacgattaatggtaataagatggagcggatcaaagtgacgaccccggatgcagcggaccctaacggcgggatttataacgtcatgcagattgcgtccgtagacggcaagttgatgattgcaactttcaacgccaccgccgacctgaaagagcagtatagccctgcgggtctggaagcgctgtcatctataaaatactga

SEQ ID NO: 198098 - DNA, 477 bp, Klebsiella oxytoca
atgaactcagaaaccaaaagcgatgagtacgaaaaacacgatgttgcgattcagtttgtgagctcaagtttccgcaaccaggtggacgggctgaaagttgcccgtgcaaataccgccgtactgaacggcgaagggtgtggtaataacgtcatcaacggctaccgcgctgatggtgtcgccaccccggttatggataacgccggggatatggtcagggggaatacagaggggcggaatgtggtgttcagtcctgcaggcgcggcggaatatgtcattactgtcacaccacgtcagtatctgagtcgtcgccccctgggcgtgtcttacgatgttatccggcccacaacggtaccaatgaatattttttatgaccgtgattcgtcatcgccgtcagccattgtactgaaagtgagacccatcaccacaccggcattgcccactattgagtgtgaaatcagccttattattcatgattaa

SEQ ID NO: 198099 - DNA, 264 bp, Klebsiella oxytoca
atggcgttaattcaggatacggtgattaaaggcctgaaggtcgaaaactgttatatcgccgtggggagcattacgcttgccgcagacagaacggagatatatttcaacctgaatttctcggtaacaaaagagcacccgcctttattcacggattatttcacctgcccctacgacagcaagggcggtgaaattgacgaacaggcttatgcctttctgagaacactggaaagattcagcgcagcttcggtgtctgcagaggggtga

SEQ ID NO: 198100 - DNA, 720 bp, Klebsiella oxytoca
atgtgtgcgaaggatcgtagtcaaattgctgtacgcagtcaaacagattccattcattctatgcgcgagatgcttaatatttcatcttgccctgcctttattcgtgattcccggggcgacgtaattcacaccagccccacctttgataaagttttcttaacatctgggtgcgctggaacatttgatacacccagtgcacctggtaactggtttctggatctctcccttgaagtcaaactggaactgatgcagttagaactgaaatcattttcagaagcttctgctgtactagtcaaaaaaatttggttggtagattctctttggactgtttttattgaaacgttcacaattaatgaggagacctacagtaaatgggtttttatcaaggagggtgatcagattcctcagccttcaagggaatataatgaattttcgaaaaaaatgcagggatatatcgaaagaattcagcggtcagcaaaatctgactgggctatctttaatctatatgcggttgggttttcacatgcttctatttcaaaaattattggtatagaggtacaaacatcaaagaatacagttagcaaaataaaaaaagaattgaactttgatagtcgtgattacattattttgtcatcaatttatacattaagttatggacggtttgtttcgaacgtgctgggtatattgaaagctggtgttaatggtttgttaaatcaatag

SEQ ID NO: 198101 - DNA, 135 bp, Klebsiella oxytoca
gtggcggtggcggtggcggtggcggcggaagtagtggtggccagggcggtggttgtggcggttgcagcaacggttgtagtggtggaaacggtggcagcggtggaagtggctcgcatatctgacgtactggattaa

SEQ ID NO: 198102 - DNA, 135 bp, Klebsiella oxytoca
atgtcaaaaattcgatggactcttgaacaaaagaagcatcacgtcgccgcatggcgggtcagtggcctcactcgtgaacaatatatttttggtcttggcgcaatcggtctggctgccgttcagggggctcgctag

SEQ ID NO: 198103 - DNA, 1437 bp, Klebsiella oxytoca
atgaaaaatctgtctatcattttcaacaatcaaaattcagacatccataccgtatcagctgctttacgtcagctcaggcacgattccagagctaaaccgctgtcacacgagcaacggtattcccttcttaagcgttgtattcgtttgttgcaggaaaataaggataaactgtgtgaggcctacagtcaggattttggtcacagggcacatgctaacacattactatccgatattctgggttcaattgaagccctgaagcattcactgggcggtcttgataaatggtcgcaggatgaaacccgcaaatcccccttcccggatacgtgttcctacattcaatacaaaccgctgggggttgttggtattatgagtccgtggaattttccgctggtgttaactttcggaccgctctccggtatcctcgcagcaggtaatcgggcaattattaaaccttctgaattcactccatcgggaagtcggctgctctgtcatttgatctcagaatatttctcgccggatgaaatattgactgtccagggggatgccggtgtttcagcattcttcgcttccctcccactggatcatctggtatttaccggcagttcagcaacgggtcgacatgtcatgcgtgcagcagccgaaaatctcacgccagtaacgctggagttagggggaaaatctcctgtcatcatttcagaaagcgctaacctagaaatggctgctgaaagaataatgacggccaaagtatttaatgcgggacaaatttgcatagcccccgattatgtcatggttccagcaagatacgcagacgtgttcatctcttacgctgttgcgtacctgagaaaatcttacggttcttaccttaaaaatcctgacttctcatcaataattaatgtaacccacagcagaagattaaatgaactgctggacgatgccactaaaaaatgcgagcgtgtcatttcagccagtgaggaactggatttgccttctgaggggagaatcattccacgcctcattcttaatccctccgacaattcacgcatcatgcaggaagaaattttcggcccgctacttccgatcattacgtatgaaaaaacagatgaatgtattgaacggatccgaaatggtgaaaaaccgctggcgttgtactactttggacagaatgaaggtgaattcagagagttacaatgttcgacagattccggcgccctagtctttaatgatgtgatgagtcatgtgatggtgcacgatctgccgtttggtggtgtgggatactctggtatgggggcctatcatggagaggatggttttcgtcgattctcccatgcccgccccatttttattcagtctgatacaggtttatcgaacctgctcatgcgggcaccatttacggctgaaaaaattaaacaaatcacctccctgataaaccagctctga

SEQ ID NO: 198104 - DNA, 183 bp, Klebsiella oxytoca
atgagcaatgtgttgttgcctatggatacccgtcgccagctgctgcgggtgctgaaaacacgctataaggcagagaaaacccggatcctcgaagagttcattctgatcagcgtgtaccatcgtaaatcagcaatccggttactgaacggagccgtcactaacggtagtcaacagagtcgctaa

SEQ ID NO: 198105 - DNA, 129 bp, Klebsiella oxytoca
atgaagcgaatcgcacctttgctgttgctcgcggctctcacggcctgcggtcaatcggagactcccaagcaggccgacgtgccgaccgtggacgagctggccgcaaaccctacgcagctgaagcagtga

SEQ ID NO: 198106 - DNA, 759 bp, Klebsiella oxytoca
gtgcttaatcaagagaggcaggatcgcattcgtgcacatttagccgcgaaggggcgcgtgattgctgccgaattggcgaaagagttcaacgtgtcagagaacgcggttagacgagacctccgcgagttggcacgccttggcctctgtcgcagggtttatggcggagccttggcgccggcacctgattttggaaacatccagcagcgggcgacagatgcaactgaggacaagcagaaattagctaaacgagtatccgctcacatagaagaagggcaaacgatattcatagatgccagctcgacgaatatcgcagtcgctgcggaattaccgaggtccaaaaggttcacagtcattacaaatgctcccgcaattgcagtcgcgctttccgatcacacactttgcagagttctagtgctgggtggaattttcaatcccatcaaaggcgcatgcctaggcaatcagactatccaggagctaaagaaaatttacgttgacattcttattcttggagcatgtggtgttgataaggacttaggaattactgcattagatccggaggaagccgaactcaagcgctgcctgatcgagcaaagttcgcgaatcattgtgccagtgacaaccaacaaggtgggaacggctgcgccttacaagctgaccgaagcgagcgaaatcgacgtattgatcgttgagcacgaccttgatccttcggttatttcgagtttctccgaaatgggcatccaagtcgatgttgcagattaa

SEQ ID NO: 198107 - DNA, 1200 bp, Klebsiella oxytoca
atgagtggaattttgaatacacagaaaatgcttgctagcgggaagaaatcacgaactgaggctatttccatagccatcctctcattggcagcattcgttatcgtgaccacggaattcatcatcattgggctgatgcctactttggcaagagatttgaatatctctattccagtagctggccagttggtcacagcatttgctattactgtggtctttgccggcccgctgctaactgtattttttgctcgcattgagcgacgctctctgtttacctggatactggttgctttcgcattgagcaatatagcggttgcacttgcgccgaactactggactgtgcttattgcacgaatagttcctgcagcgcttttacccgtgttttggggtgtcggcagtgatgcggcaggtaaactggtcgccaaagaaaaagctggcaaagccatttctcaggtctattttggtgtcaccgcagctttgctattcggactgcctttgggcacggtactaggtgatgctgttgggtggcgtggggctttctgggtcttggctgtgttgtccctcgcaatggcaattcttttacacaaggtcatgccgaagctgtctcccggcccccaagagtccctgaaaagtcagattgccacgttggctaaccgctttttcatcgccaatctcctgctttcgctcggtgtgtttaccgccatgtttggtgcatatacctatctcgccgatatgttggaacgttcaggtggtattgcaccggctcaggtcggctggtggctgatgggcttcggaacggtgggcttgctgggaaattacctcgccggacgcctcgttgatgagcacgccgtcaaggcgaatatacttttttgtctcatgcttggcgcaggtgccgcgagtacagcactgtttgctgggcagccacaattgtttgttgcttccctcgtgatttggggggtcgcgcatacagcgctgttcccgcttggacaaatacgcgtcatcaatgccgcccgcagtggcaaagcgttggctggcacgctgaatatctcagcgtgcaacagcggtattgctgccggcgcaatactcgggggctgggccatagatttcagcggaattacagccgccattcttgccgccagcgtcctcattgtactttgtgccttcgcaactccggcagttgagaggttgcgtcccgatgtatag

SEQ ID NO: 198108 - DNA, 1176 bp, Klebsiella oxytoca
gtgaatactgaaaacgcaagattgctcaaaacgcgccgggcattgttcgggtgtttcctcgtgctcggcttcgtcatggcctcttggatcgtgcgcacgccctctatccgcgatgctctgagcgcatccacagcagagatgggcctgatccttttcgggttctcgctgggctcgatgggcgggattctgctggctagcaacatcgtggctcggatcggagcagaccgcgcagtctgcgcgggaatgacgctcgctttggctgggttggtcgttttgtcgagtggcacacatcttgctctggcttggaagactggcttgggtttggccctggtcggttttggaatggcccaagccgaagtggccgtcaacgtcttgggtgtgcatgtggaacgtggtctgaagcgacccgtgctcacactggtgcacggctgtttcagcctaggtacgacgctcggtgccgtgtgcggtctactactggtttcacaaggtttgtccgtcacctcgcacatgctcggcgtctgtgctctgctgagtccgatgctggtctatgtcacctacggtgtggtcggatcgtacggtgcacgcgtgacagattcagggaacaagcgaggcttcctcgccaccatcaaaggcgatccgaagctcattctcattggttcgatcgtgcttgctgtagcgctggccgagggggccgccaacgactggctaccgctgctgattgtggatgcgtacgaaacctcagaagctattggttcgcttctgttcgtcgctttcgctgcgactatgactttggggcggttcttgggaacaggtgcgctgagtcacttcggtcctgtcaacgtaattcgcgccagcgcgctaataggcgctgctggaatactgattgtcgtcctcacccccaccttgtatgtagcaggtgttggtgtatttctgtgggggatcggtgcatcactggggtttcccgtcgcgatgtcagccggcgcctccgttggctacgatccatccgcgcgcatagccatccttgccacgatcggctacatggcctttctggtcggccctccgctactcggcttcattggcgagcacataggccttcggctcacgatgcttgttgtcctagcgctgttggctctgccgttgctgttggcctccaccttgcaaagacgtaacgcatga

SEQ ID NO: 198109 - DNA, 126 bp, Klebsiella oxytoca
atgaattcgaacagctaccttcaaaaacatcgcccctatgtcaaacacattggcgaaatggtttcccaatggatttttcttttagtggcgcacttttttctctcaaccaacaactggaaagcttaa

SEQ ID NO: 198110 - DNA, 621 bp, Klebsiella oxytoca
atgaaactgcacaacatatctaacacctttattgcctcgcaaggatctaactggaagcttgatgatgtcaacggccgcgtaagtgtgctcgcatctggatatagcgacatttttatcgaccccggccgcgctggttcggtggtcacgactgtcagccgacacaacgctacaacgttgatgactcgcattccagcaggtgattttcagttccgtgcgacggtaaatgtacagtttggtgctacgtttgatgcaggtgttctgttcctgcgagtagatgagcgcacttgggcaaagctgtgcttcgaatactcgccggacggcgaaaatatggtggtttccgtcgtcaacaaaggtggcacctccgacgatgcgaacgccttcattgtggatggggagcaggtcgatctgcgtatctctcgcaaggataacgtttatgcactgcatgcctcgcttgatggctcaaagtggatcttcgtgcgggcattcgctttcgataacaccgagcaggagccagatgttggctttggagcacagtctcccaatgcggacggctgccaggttgagttcagcaattacgcattgaccaatgtgagcatcgcagatttccgcaatggtaaatga

SEQ ID NO: 198111 - DNA, 402 bp, Klebsiella oxytoca
atgtataaacaagtgatgtgcgttttatcaatcctggtgctttcttcttgtattaacggtgatcaacgcgacattgatacaccagagtgtcaatcctacagagcaatgaagacttctccaccgcaacttgaagcagtcaactcgcaacgccattcttgcgcaaaatcgcgaaatgaaaacctagaaagcaaaaggctgttgataagctatcaatcagcgctaaagcctaaaatcatgacagctattgatggtgcggggcttccggtaatttatgacctaaaaaaaatgagcatcgttgttattgccgttcctgatgaaatggctgaaaaatacattaagtattttcggtctctggatggggtttatggggttcaggaagacagcatgatgcacctgaactaa

SEQ ID NO: 198112 - DNA, 381 bp, Klebsiella oxytoca
gtggcacagcgggttgtcagagtgctggacaggatcgtggcaaaccgcggatatccgctgaagatgcggatggataacggtccggagctggtctcgctgacgctggcacaatgggcagaagagcatggtgtgatgctggaatttatcaggcccggcaagccaacacagaatgcctttatcgaacgattcaaccggacgtaccggacagaaatactggatttttatctgttcagaacactgaacgaagcacgtgaaattacagagcgctggctggctgaatataacagcgagcgcccccatgaatccctgaataacctgacgccggaagaataccggctgatgactgaaaccccggaaatctcaaaaagtgcgtggaactaa

SEQ ID NO: 198113 - DNA, 963 bp, Klebsiella oxytoca
atgaatgtttgcatggtgggctatggaatgatgggtacatggcattcagaaagcttaagaaagcaagattgcgtactccatacattggttggtcctgacacgcagaaagcagaggctttcgctttaaagtacggctatcgtcactggcatgttgattacaagaaagcattcaacgaccctcaaatagacgttgtcatcattgctggaccaagccagtcacacgctgaaatggccctcgccgcgctccattatggaaaacatgttctggtagaaattccgctggcattgacgctggaagattgcgaggcaatagacgccacagcagcgcgtctgggactgaccgtgggtgtggttcacccaatgagatttcggaaaaagcatatcgcgctctgtgaaaggcttcgttccggtgaagagaagctgcttcaggtacattccagattgtaccttcatcgtcgcgaaaataccgggtcaacaggattgaaacgcagctggacggataatcttctctggcatcatggtgcgcacctgattgacgttgcactctggctggtaggagctggtgatactgcagaagctgaaaaaaaattggcaggattcaaagctgttttaccagatgctgatgaaacgacggggattcccatggagttttcactacttgctgaaacatgtgaccataaggcgctgatgtgttcgggatcatacaactcacaagagagaatttttgatataagggtgcttaccgacaaggcgaattaccatctcgatatcctttctggcacactctccgtaaatggcgacatccagattattgaatcagaagagcggaataatgctcttgtatctgaggattttataagttcgttgaaagaaggaagagaaccaaaagtcagtgctaaatctgtaatgcccgcaatgcggcttatacatgccataaacagcgagaaaaataggagtatctaa

SEQ ID NO: 198114 - DNA, 1404 bp, Klebsiella oxytoca
atggatatggaattatggaagctggaaggagtcgaaatcgccagactcgtcagggctagagaggtttctgctgtagaagtagcaactgactctcttgagcgtatgtctgaagtgaacccgcgtatcaacgcagttgttgatagcgacactaagcgagttctggactcagcccgtcaggtagataaaaagatcgcggctggagaagacgtgggcccaatggccggtgtcgctgttacggttaaagataatattgatcagattggttatgccacaaccaatggtcttaaatcccggaccgagtggtttgccacagacaacaatcccatcatagataatctggaaaaagctggggcggtaataatcggccgtactaacgttcccgcttattgcttccgttggtttactgacaataatctttacggcaccacctggaatccgcataaccgagagctgacgcctgggggatcatctggcggggcagcagcagccgttgcttcaggcataggggcgattgcgcatggtagcgatatagcaggttcaattcgctatccggcttacgcatgtggtattcatggcctgaaacctggcctaggcagggttccaacgttcaacacaacggtaactgaacgaaatattggcgtacaactgatggctgtacacggcccacttgcacgtagcgtgagcgatctacgtttggcctataatgcaatgtcacaatacgacgctcgtgacgtatggtgggttcctgcgccgtttgagggtaaaacactccctcgaagagcggcactttgcttagcacccggcgggattcagcccgctcccgaaatcaaaaatgcccttctcaagggcgcgaaagctcttatttcagcaggctgggaagttgaagaagtcagtgaactcccacacagccgggaagcggtagaagatcaaattcggctctggtttggtgatggatataatgcgactctggctgcagccattgaagaaggagacgctggagcgattgcagcattaaggggaaagaaaaagttactggaaggaatggatcaggccgattttagcggttcactgacaaatcgggccagtgttcttcgaaaatggcagcagttccttgatatttacagtgtcatccttgccccagtctcgtctgaattgccattccctcagttgcttgatacccgcgatactgagtcttaccagcatgtgtggaatgctcagttgactcaaatcgttgtaccataccttggtctgccagccctaacgttgagcatgtcattcaataacgctacgccggtcggcatacagcttatcgcgaatcgcttccgcgaagatgtttgccttgcggtggcagaggaactggaatcgctgctgggtatcaatgtcaagccagtcaatcctgtgtga

SEQ ID NO: 198115 - DNA, 417 bp, Klebsiella oxytoca
gtgtcacttctctctataaagcttaatgacgagtctctcaaagattcctctgcagtagaagctctggttagcgccttccatcttcagcaccaaaatcagcatgaggtgtgcgccccggatgacaccgtagaatttgcggcatggagcgtcgaggcactgggaaatcagcggcacagtgatatcgacagtgcttacctacaaagtgtaaaagatgctgaagcgtttgaaacgacaattggatacatcgatctcaccggtaagcccgttgaattgaactgttaccgaaccagtcaaatcagcaccggtgacctcatcagcggacgcgcacttgttcaggacagcctgacagccattctggtactcgcagaaagcaaagaaatcgtcattcctgaagggggcgtactgattactctgtga

SEQ ID NO: 198116 - DNA, 288 bp, Klebsiella oxytoca
atggctggagtcacagcaattcttttggtcgcaagactggggtcagcttcagcgaatctggccagtgacggcctgcttttggatataatcagcgccggtgtcattgggcgcgtgagtaactacggtgacgtaggcaatcccttatatgcagctatttgcgctcttttcgtgaccatcatcagtaatgtcattaaccagtttgacgtagcctattacgccatactggttatcaaaggattcatcattatcgcctttgtttatcttgataaggccatcaggaagcaatag

SEQ ID NO: 198117 - DNA, 180 bp, Klebsiella oxytoca
atgctgttttgcggtgcatgccttcgagcctttaatggctttgcagtggcccgggtcacgctggctagcatgaccatactgggaggcgcatccgtatggataacgaaatcagccagtattaccggctatccctatcagttcgaggatcttttcctttatttcccggctgcccgtgaataa

SEQ ID NO: 198118 - DNA, 1362 bp, Klebsiella oxytoca
atgactgagcaatcgcaggtgttccaggaagaccggctaggtgttataggcgatgttaacaatgatgtagtcgaccctaaaaaagtaaggcagtatgttttttccgcatcatcaggtaccgcgctggagtattttgatttcgctatttatggactggcaacggccttaatatttaatccattgttcttccctaatatctcaccaatggctggtttcctggcaagttttgctacctacgcaataggattttttgcacgtgctatgggtggtgtgatactgggatattacggcgaccgccttggtcgtaagtttgttctggtactcaccattggtcttatgggaggcgcaacggttgcaattgggctgttaccgacctatcaccaaataggcatctgggcgccggttctgcttgttattttgaggattgcgcaggggtttggtgcaggtgctgaaatcgccggcgcacagacaatgcttgctgaagtttcaccacgaaacaaacggggtctcatcagttcattcgtgtcatttggtacaaatgtgggcaccattgttgcacttggcatatggctactcatcagtaagttgcctgaagaaagcctgctcagctggggttggcgcattcctttcctggcgagcattttggtagtggcatacaccctctggatgcgtcgccacctggaggaaagtccggcatttactgccaatgaggagcggcaggaaagcattgcatttggcccctacatgaaagatctgctgacgaacgggcgacgcagccttctgcgttcaataggcttgcgtataggtgaaagtggcccgtcgtctttctaccaggtcttcctggtcggatacattgcgaatgtgctccattttgataaaagcatggcaaccaatgcgctgctcataacttcatttgcattatttgccattattccgttgatcggaattctgtgtgacaaattcggccgtcgacccatgtatctgttctttaccggctggagcatggtgtggtgtattccggcaatctggatggtcagtacgggtaacagctcatggattaatttggcattctttggtggctacgggattggtgtggtgggcacttacgttgtacaactggcttacatgccagaactttatggctcaaaatatcgcaatggcggactggcagcttccaaagagttaggtggaatgatcagtggaggccttgttcccttcgtttgtgcaggcatagcagcattgactgagtcagtgctgcctatcgcagcttatattatcattctcgccgctgccgccttctttaccgcactccgcagcccggaaactaaaggacgtgatttgttcctcgaagaggatgcttaa

SEQ ID NO: 198119 - DNA, 1059 bp, Klebsiella oxytoca
atggcagacaacatttcactggaagcagaagcgaccaatgcgctgaccgcgcaacagagcgatattggctgcgactttgcagcagacgtcctttctaagtattacggtattcgcggtgaagtccgcagattgcgtagtgaaagagaccaaaactttctggtgctgagcaaggatgggacgaagttcacgataaaatttgcccatcccggcgaagaaagaatggtgagcaacttccagaccgagctaatgcatcacatcaatcttcgtgctcctgacctaccgattcagcaggtcagggctgctgtaaacggcgaatttgagctctttattgattgcctgggtcagatgcgtatggtcagggtcgtgacctatcttgaaggcatgctgatggcgcagtcaccggcttccgacgtccagaaattcaacctcggcagtatggctgctcatgtcacgaatgcactgatggatttcagccatcccgcgcaggaccacgtgctgctgtgggatgcgcaacacgcgtcattgttacgtgattatatgaatgcggttgtcgcccctgcaaggcgtgccatgttggcattctgtctagataattttgaagcacgcgttaagccacttttaccctcattgcgtaaaagcgttgttcataacgatatgaacggtgacaacgtgttggttaatcctcagaacactgacgaaatcgcggcaattcttgacttcggtgattcggttaatacagcaatagctattgatgctgcagtaggagcgacttaccagatgggaactggcgagcatcttctcgatggcgctctcgcctatcttcggggctacgtagctcaggtcccacttcaggaagaggagatcaacattatgttcgatctgttcctcatccgcatgtttgtccggattgtcatcaccgaatggcgggcccgtcaattcccggaaaatcgtgaatatattctgagaaacacctcaaccagttggtcacagctggaacagttgttatctcggccgtttgacgaaacccgttatctcattgaatcagcctgtaaggaataa

SEQ ID NO: 198120 - DNA, 735 bp, Klebsiella oxytoca
atgattacgttagaagaagcaacatcagttcatgagtacctaacagcttattatcaagattctgaagatccgatttcccctccgggaataaaaaatgtagaacttttagagtctgctatagcaaggccgttcatgacgatgaacagaaaagatgtttatcctgatgatttagataaagcatcagcattgtttcatggcgtcatttcaaaccattgttttcataatggaaacaaaagaactgcactactccttactatgtgttttctagaccgagcaggatattggttagataagtgcgatgacatccaactttttgaatttacgagaagtgttgcagcgcatgagatatgtgaacatagaagagatgaaataaaaacgatcaaagcattcttcagaagtaattcacgaaagaaaaagataacagacgagcaattaagctttattgcattaagcagacatttgactaatgcaggttttactattaatgaagatggcgactattacgctatatataaaaatggtaaaagatacacaaaaataataaaaaaaggcgcatcaggccatgagaagtatgacccacaatatattaaatcacttagaacacgattacttcttacgccgaaatatggatgggatagtataaggttttatcagttatattcatcattgacagataatattggagaattactccgtttacgcggagaagtaatggactggcttgccaagatctaa

SEQ ID NO: 198121 - DNA, 396 bp, Klebsiella oxytoca
atgataataaatttcctttttagagttcttttaacatttaacgcaacatcgttgttggctataattttctttgtacaaaagaagtacaccctttattactttttccaaaggtttgaacacagtcattggttgagtttattaccacaaatgacatcatacgtattttacatgctaatccccatattactaacttggattagtttgcttttaagctccagactgggcaaggatgagtttaaagaaggtgaagtagtttctgtggagtgttttttgtttattccgttttatttatttttacctttatgtctcaagcattatactttaaccctttatttctactgtttagatatgagttttataacattaaaaacaagagcggcgcatccatttttttaa

SEQ ID NO: 198122 - DNA, 810 bp, Klebsiella oxytoca
atgaaaataagaacgcattatgacaacttaaaagtttctcgatatgcgtcaaaggaagatataaagagagcctatcgtaggttatgttttattcatcatccagacaagcaccctaaggaacttaaaaaaagacaaactgaaatactgaaaataataaatgaagcatataaggttctttccaatgataatttgcggaacgcacatgacctgtggattataaagcaagagcaagagcaagagcaagagcaagagcaagagcaagagcaagagcaagagcataatagatcccagggctcagaacaggcacataactacggttggaaacaaagtaaagacaactgcatctataatgattttgatttcgaaagggttaaagaaaagacaatatctatagctaagactgcaatggttatttttggttcaattattatattgctcgtgggaactgcgatcaaagaagtaataaaaaataacaattcattaggaccaaaatccgaatttgaaaatgcgttcaacagagaaataaagaaaacaactttaccagtaaaagtcgataaaataacaactctgactgctgtatacgctcatggctttgaaatacattatcaatatagtattaatgtgccatctacgagtatcgatatggaaaaaatagaatttctttcatatggatctttcaaaatgcaaaaaatatgtgagccggaaatatcagctcaactacccgtgactgtatcatttcattattattttgaaccagatcatgtagctaaagagtttagaaagacattgccgtatttgtgcggtcgatag

SEQ ID NO: 198123 - DNA, 402 bp, Klebsiella oxytoca
atgaatagagagtacaataatatatattttatatttcttgtttttttatctttgtttggtgtcgtatttaactctgcatgggtgttaatcaaacttgcatcaaatgattggtacattgatattactgaagcaaactttatagatgctgcatcaataattgttttgattgtattttcggtaatgctattcattaatgataggaaaatccttaaagatatcggagcctattgtccatcttggggctggtatttcatattccctgtttatgtttatttacggcagaagaaaaacaatctaggtttaaaatatttttggatctatatgataagtactttcattgtcaccaaattagctcaaagtttagccacacagattctgattgggttaattaacatcaaatga

SEQ ID NO: 198124 - DNA, 2916 bp, Klebsiella oxytoca
atggcaacgcaaagcgaatacgagttagaaacgcagctggttaaccagctggtgggtatgcattacgaactggtcaatgtcaccgacgaaaccagtatgaaagccaacctgcgcaagcagattgaaattcacaatcggctagaggccgccccacttaccgacggcgaatttaaccgtatttttctgcatctgaccaaaggcactgaagtgatcgatcgcgcaagaatcctgcgcgatcgttaccagttgctgcgtgatgacggtacagagaaatggctcagctttatcaacaaagatgagtggtgccagaatgagtttcaggtcacccgtcaggttaatcagtacaacgccgaacaaaacacacgcaaaacacgctttgacgttacgctgttgattaatggcctgccgctggtacagatagagcttaagcgacgtgggctgggcctgaaagaagcctttaaccagattgatcgttaccatcgggatgcattctgggtaggcagtggcctgttccagtatgttcaattatttatcatcagtaacggcgttgatactaaatattacgccaataatcgcgcgaaccatttcgagcagaccttcttctggacagacgagaaaaatgaacccattaagtcactggagaagtttaccgaagccttcctgaaagtttgtcacattgcaaaaatgattactcactacacggtgctgaatgaaacccgtaagtgcctgatggtcatgcgcccctatcagtactatgcctgtgaggcgatgatccgccatgttaaggacagtctccatctacagggcaaaccccgtaacggctatatttggcatactacaggtagcgggaaaacgttgaccagctttaaagccagccaggtgatcatgtcgatgcctgaagttgatcgggttatcttcgtcgtcgatcgtcgcgatctggattatcagacagccaaagagtttaacagtttcgctaaagacagcgtagataccactaacaataccagtacactaattaagcagctaaaggctaacaacagtaaactgatactgaccaccattcagaaactaaacaatgctattacccacgaaggatataaggcgcagcttgagcacctgcgtaaggaacgtattgtctttatcttcgacgaatgccaccgcagtcagttcggtgacactcacaaggctatcgtaagtttctttgaaaatgcgcaactgtttggtttcaccggtacacctatctttgccgacaacgtcaatatcaccaacggcgtcaaacagaccactgaaatgctgtttgataaatgcctccacaagtatgtcattgtcgatgccatccgtgatgagaacgtattgcgatttgccgtggagtatgtaggaacctatcgccgtaaggaaaccagcaatgagatcgatatcgatgtggaagatatcgacaccaaagaggtcatggaaagcgatatccggctgggcaagataaccgactacatcctggctcaccacaatgcaaaaacccgaagccgtgagtttaccgcaatgttctgcgtgggctcggtggacatgctgatcaagtactacaaactctttaaagaaaaacaaacagagcttcagcaggccgatccgggttacaaaccgttgcgtatagcaacaatctttacttatgcagccaacgaagcggacaaaagcgataaggaaacggttaacggcttactggatgaagaagacatcagcctgcctcaaggcgggaaaatcgatatttccagccgggatcatctggacagcttcatcaaggattataatacgctgtatggcaccagctattcagctaatgattcgcaaagcttttacaattattacaagaacattgcacaacgaaccaaagaaaaagggattgatatcctgctggtggtcaatatgttcctcacgggatttgacagcccgactctcaatacactttacgttgataaaaacctgcgttaccacggactgatacaggcattctcccgtaccaatcgtattcttaatgagaagaaaagccacggtaacatcgtctgcttccgcaacctcaagaaagccactgatgatgccatagcgttattctcgaacaaagacgcatcttcagtcgtgctggttaagccttttgaggagtacctgagcgactatcaggctgctgtagacaccctgttgaccctgacacctacagtggaaagcgtggacagcctccctgatgaaaaagctcagcttgcttttgtgacggctttccgtgacatgatgcgactgaagaatatcctggagagctttgctgattttgatgaagtgagtaaacctttatcggatcagactcttgccgattacaccagtaaatatctcgatatttatgacaaggtgaaaaaacgcactggcaaagataaagtctcaattctggatgaggtcgattttgaagtgtcactgattcaccgggatgaaattaatgtcggctatatcctgaggctactggctggcatccaggctatgccaccagaagcgcagcaggagcagaagaagaaggtcatggatatcgttgacagtgacgtcacgctgcgcagcaaacgcgaactgattgataacttcatcgaagaaaacctgctgcaagtttcgcatgatgaagatatcacccagacctttgaaacctacgttgaacgtgaaaaacgtaaagctgttgcaacgctatgttctgaggaaaagctggatgaaagcaaagttgccgctttattggataactatctgtttaccgatgtaaccccacgcgaggatgaggtagccagggctctaacatggacaccaaggatccttgaaaggaagaccgtccttaaacgtgtctatgacaaggtttgtggtgtgattgatacttttatcaacggaatgcgtgggttctga

SEQ ID NO: 198125 - DNA, 1197 bp, Klebsiella oxytoca
gtgatagcaccaaaacttcgatttagtatattttctcaagagtggactaaaattcgcttaggtgattatctacaaatctaccagaaaaaggtgtcctctgataccaacatacctgtttattcctcctctcgacaaggattaaaacctcaagcggaatattttgccgatcgtgaacttaaaaatgatggtgagtatggtgtagttccattaggatatatcacttatcgtcatatgagtgatgacaacactttccatttcaatcttaatgataagatttctgaaattgcagtaagtaaagaatatcccgtctttactggcaaaggtcttaataatcattttctgttatcaaagttgaactacactaatgagttcaaattatttgctattcaacaaaaggcagggggaaccagaaccagactttattttaagaacttatgcgaatggtatgccacatttcctgcgctcgaagaacaaaccaaaatcgccgattttatttctgctattgacaaaaaaatcactctactgaacagtcaatatgagcagctcatccagtttaaaaaaggcatgatgcaaaagatttttagtcaggagttgcgatttgaagatgataatggaacattatttcctgaatggagtattcttcagctaaaagatgttgcaacacgtgtaacaagaaaaaataaagaaaacaataatacaatattaactatttcaggaagggatggtctagttgatcaaatgacttattttaataagcaaatcgcatctaaaaacgtgactggttactatttgatcaagaagggtgagtttgcgtacaacaaaagttactctcagggttatccgatgggagcaataaaaatgctttctaactatgaaaaaggggttgtttctactttatacatctgtttcaaattaaatgatgagcaatcttgtgacttttatcaacattactttgagagcggtttacagaatcgggctattgaaaaggtagctcaggaaggggctcgcaatcacggtttattaaatattggtgttaacgacttttttgatatcgaacttcaagtacctggccttgcagagcaaaataaaatagcccattttctctctgccattgacgacaaaatcactacaaaaaaaacagaactggataagttaaaaacctggaagcagggcctgctccagcaaatgtttgtataa

SEQ ID NO: 198126 - DNA, 1593 bp, Klebsiella oxytoca
atgtataaccccagccactatcccgttgatgtctttccggacgttttgagggatgccattattgcattacatgaagatacgcaatttcctgtggagatgattggcagcacactgctggcagcaacttctcttgccttgcagccgctggttgaagtgatttccccctacagtacggataaagcagagccctgttcattatttttacttacgcttgccgactcaggtgaggggaaagggccaatatacgaaaaaattatggcaccctttactgctttcatggctgaaatgcagagggaatataaagaacagctggatatttataagaaagatcatgcaacctggagtgttatcagtaagggacttaaccgcagtctgatgaaagcctccagggatggcgaggactgtgaagcagaagcctcgttatttcgtgagcatctggataatgagcctgtctgtccgaaaccttttgaaatgctgaataatgacaataccccggtaggtctgatcgaacagttagaccggtatccttatgcgggttgtttttccagcgaggcaatgacttttttctcaggctatctgaaagataatctggcgctgcttaaccaactgtggagcgatgaagattactcctataaccgtaaaggaagaagtattcttctttcgggatgccgcctgtcgatattactgatgactcaaccatctgagtttgagcactatgttcagcgacagggtgccagggatattctgaatggttttctggcacggtttttaatcactggaactatcagtaccagagcacagcgtaaaacaaatcttaatcaggaaagatcagaaatagcacttaacaaggtctttgtcttctttaatgacttcctggagaaacagaaggcgatgtattatgataaatcaatcacacctaaagtgctcaggttatcggaagaggctaaagaggtatttaaaagccgaaaagaacagcataacgtattaacggctaaaaatcagcgatgggaacatatcactaaatttatttccaaggctgagaatcaagccatcaggatagctgcattgtttaattattattctgaaagtgatatctctgctgttgctgtaaatgatgctttcaccctcactgagtggcatctgaaccaggctgctcattatttttatgagtccagcgagtcgtttcagcttaagcaggatgtttatgacttgtttatacagataaaaaaacgttttgagagacagggaggtaatatcaaatttacagacctacagacgggacagttttgtatttgttcacgtcatccatggcaaccatttttgcgatatgaggtcacgcagtacgcaccgggaagattgagaggaaataagaaaaccgaacctgcttttaatgaactgattaatcttggtctgattatgaccattagttatccaccgtcaagtgagatttatgtggcactatccggttatgatgttaatggtaatattctgccattgaatagtccctcgacgttattcaggatacatcaggtgagaaacaattctgtaaggccatcggataattatgatctctcaagattaagctggcagtga

SEQ ID NO: 198127 - DNA, 126 bp, Klebsiella oxytoca
atgaacacgatcagaattgttggtatcgatattgccaaatctgtttttcaggtatgcgtctggatgttcgatgacaggagccgtattgatcgccgtttatttggccatatctataccttcaattag

SEQ ID NO: 198128 - DNA, 2661 bp, Klebsiella oxytoca
atgtctacgcttcgctttattcctctagatgcttctgaatcggctgttttgaaagactctcgctcgcttttacctcttgatgtttataaaaaaattgctcagtttattcggcaggcgttaggcaatatcccccaatctgctgcttcgcccgagcttgacgatgtacgcagccataatgcggtctctatcgatggtgagaggggtacaggaaaaacgtctgtgctggttaacctgaaagagtatcttcagcaggatcataaagatttgttgaaggatatacacattcttaaaccggttgatcccacgctactggaagataacgaatccctttttctccatatcattgtcgctgcactcctgtctgataatgcaatcaaattggcgcagagccagtcgccaaccaaaagccaggcgttaaataaaagccttgaatcactcgcacatgcattagcttctgccgaaacacagagtgctgattacggcatggataagctacgcgctatgttcggcaatcagcatctggcagactgcgtgcagcacttttttaaaactactctcgaactgctggataaaaagctgctggtattgccgattgatgatgtcgatacttctctaaatcgtgcttttgaaaaccttgaaattatccgccgttatctgacaaccccgtatgttttgccgattgtcagcggcgatcgcgatctgtatcgtgaagtcacttggcgtgattttcacggacgtctgaccaaagattcccattatcgaccgcgtgaggcttacgacagagccgtagatctggctgtagaatatcagcgcaagctgttgccgttgccgcgtcgtctggtgatgccggaagtgagcgaatacctgacggaaaaatcggatagagcgatcaatctggaactgaaaggagagaaattaatttctctcaataatttctatgtatggttacagatgtttatttccggtccggtgaatggcctcgaagatagccagctttccttgccaataccttcaattcgcgcgctaacccagctgataaaccactgtggctcattgattccagatttaccctctgcaattcgcaacgcgtctgatgaattacaggttaggcggctttggcagatgccggggataaatccgcaagcattcgatactttttatcaggagtatcgccagcagagcatgtcatccaaacgtgactatgcacgcgcatatcagcgattttatgatgagcagcaacagcccataactattgaagagtgcattctgggcgcgaaggaaatagacaaatgggaacaggcacttctcgattacttccgttatgaggtcaaggccggagcggtatatctggtgctgctcgctagtcgctactggcagtcactcaaaaataaccgttcagatatggttgagagatccgtactcgacacgccgctgtttaaaccgctaatccacggtaccggcgatcttaaccattttgcaaaaacacacgatttctctgaatggattaatcgcctgcagggccgcctaccggatagctggcttagcagtctgcaatctcatcacacgatcctgccttatccagtggcggaagtgggggtgaataccgcaacgaactggaaatattggctgcaggtgccggatgaggtgaaagagcaggacgtgggcgacaaaattatctttctggcctctttgtcgatgcagtacaacttctataccaacgccaaacagtcactaatgatgaacatcggacgtatttttgaaatcgttgttgccagcctgtgcggcgatgtgcgcctgattgatttacaaagaatcattcagaatgcgcccttcttctcagccagagcgctggcaccgacgaaaaatgtcacggtggcagaagagattactaagaacaaattcaatgacgaaactgagacgagcgatttctacgaacagcagggggatgtcgcggatatccaggagaaccaccttgcggagttagtacttaacatttcgcagtggcgcgagcgtcacgaccttaacaatgtgcgcttttcgccatggctggtctataaggtcttcaacaaggtctttagtcaggcggcaaatacggcaaattttcccagcggttccaaaaatattggtaaagtgatcgaaagtatcggcaaagttttttattcaatctggtcagcttttggcagtttcgaaaaggggcgcctgtttggtttgccggaagtggtggctacggtaaatttaaattctccctacaactttgttagtaatgatcatttcaatgtcaatgtcgggcctttcgttgtcagagcagaacaggttgcgccagcaaaaagtaaatacgctgcgagtacgcggacggccagctattacttggccgatcatcctcttaaactttggatagaggaagcgctggcggtatttgctcctgctcccaaagaacaaactccggacactgaggttagcgatactcgtatctggctacgtgaaaaattggggttggagaaggatacgcgtttaacggataagagaattgcagcttcattagaaaattttagtaatgatgaacgggcgagtttagtgaatgagatgttaactttataccctgatcatcgtgtgactagccgccttcacgatatcatcgaccagatgaagagggaaagatag

SEQ ID NO: 198129 - DNA, 2751 bp, Klebsiella oxytoca
gtgctactaaggtcactatcagaacatgctgccggatgtttctatggcagtgaactgctagcctcacagctgtggatttttttacagcaaaccgcaagcggggataagactcagcgtgtaaaagcgctacaggaaacctgctatcagcagttgattgaaagcgtggacagtcggcacccgcgccgttaccgcctgaacgatataagccaactaatgaatcatctctgcgatggcgacctttttcatacgggcagactaccctggctaaccaagctttttgatcagttgatggtgcgcaacggcgatcttatctgctatcgcgaaacggaagttcaggcctattcccggctgacggcagagttggacccgacgctgttggtggcgtggaatctgagtcagtggttggaagagagtagtaatcctacggcaaaggatatacagcgtattgtggctgctcaggataccttttttgcaccgccgggtaacccgttacaaccctttgcggaagggcacgtgcacataggaggtgtgaccgctgacagcgcaattcttgatgaatacctcttggcaaacccggcctcagagctgcccgagaacaagcgttcaacctcctggcatctgcagcagacctcgcaactcaataatctacttgaacgcttaagagcattattgtggctgctgctagatggcaaaagtgatgatccggccacctgtatttaccagcaaccgcagcgggataattgcgacgcacgattacatccgtggcaagaagagtgggtaaatcttgttccacaactctcaatgccgctacaaaaagccagaattcccgactgggaaatgacggcaaaaaaacatgccgtaaatgaagtgggttcccctggctggctgctcagtcagtttgccgtggcgatgaagtgcaacttacgcgggcgctggttgtggttgcagctctatctttgcagttgttaccgttcacctcaggctacaccacaggttcgggtcgccattctctgttggtatcaatcgctgaatgagtttcgtcgacggctgattatggatggtcaggggttaacccggttctctaaacgctattttaatggacctttgggcagggggagcaaggcattacgcaaagacaatataagacaattattatcagtagctggcgatgtggtggaaattaagtcgcatccgggcgttttcagtgccgactttgccgcagattttgccaccacgctggcgcaagagagggggttaacactaccggatgcgccttatatctttggcgagcatgaaatcgtgccagatgcgaaagtgtataactatatgcagcagcttgagcgctggcagttttgcggccatttttcgcgctcggcaatgctcctacaacgtggtagagcaccagtcgccaatatgaaagcactgtggaaatctgccatcgaattgatgaaaaaagcggacaacacagccgcctggaaccggcctgaattcatgatgggctatcgtaatccgcattttcactttcagcccgcgcgttggtttcgcgggctggacgtggcgggggatgaaaacgatctgcgcatcgaatggtttgcgccggtgctacgctggctgcggcgggggttaatttcacgtcctgagggtgagtacgcttctgctggtttccatttgagcatccacgccggggaggactattcccatcctctatctggcctgcgacatattgatgagacggtccgtttttgtgaaatgcgcgacggcgatcgtttggggcatgctttggcgctgggtattgaaccgcagtggtggatggcgcgtcagggcgagatgattctaccagcagacgaacatctggataatctcgtctggctatggcattacgccgttacgctaagtggacgtttaccactggcgcaacaggtgcagtccctgttagcgcgtcggatagcccgcttctttcctgcatctggctggcacagcgttcctgaccttactggcggccggcactccgctccgctcaagcatgaaagcgtcaatcccgaaattctttttcgcgcctggctactgcgcagaaactgtcattttcgatttacgcagttgcatggcggtactcctctcagcacacttgaattcagcgccttacccgacttcactctcttgaagagttccgatcctgcggcggtgctgtatgctaagcggcaccagcacctgtccgccgcaagcgttcagccgttggttgttgtgcgtatcggcgatgagcagcaagcgcaaagcgaccacattgctcagggcggaaaaagcatgatggaagaaagcggaatgctggaggatattgataccccagcagaggtggaatttatgcatgcagtgcaggattatctactggatcgatacgatcgaattggcttgattattgagaccaatcccacgtcaaacatttatatcgcccggctcgaaaagcaccgcgaacatcccatttttcgctggagcccgcctgatgagacattgctagcggcgggtgaagtctataaccgctttggcttacggcgcggcccgatgagggtgtcaataaatactgacgatcctggcgtgatgcctactacattgcgtaccgaatttttattactccgtgaagccgccatcgaatcgggtatcagtcgaacggtagctgagcgctggctggagcagatcagacagtatggcatcgagcaattccaccggaatcacatgcctgtttttaccccactttaa

SEQ ID NO: 198130 - DNA, 687 bp, Klebsiella oxytoca
atggacaaagaacccgatgttatcgccagttttcctcagttaatacgctggtttgatgacgaagccaaaaggctgttggcgaaaagtgagcaggtacgtatgctgagttacctattccggcgtttgtcgctttatttcggcagtgcactctgtttcttcattttatgcctagtgatgacgttcaccaggagtgttacgctcgttatggtcaatgattggttgaattctgtgccagaggctctaggttggtggacggggctgggactgttgtttattactggcgccttcacttggttttttcgccagagtaaccggattgcggccatcatactctccagcttgatactaattgccttgatggcactattcttcgtggcattaaccgccgaacaaccgctaatcgtcgggatttcgcttgcgggaagtgtgacaatcatggctttgattgctaataaaacactgggtttcactcgccgtgatgagcgttatcagttgtttagccgccgtgctaaatttttggctaccctatatagatcgcagcaagcaatgaactctgtctttacgcaggagaatttgcaggagttaaagcagtttaacgaaaatctgtggaataccaagcaaagtgatactctgagtgattcattctacatcctgaagaggcttgaagataaacttagtaaagattga

SEQ ID NO: 198131 - DNA, 2385 bp, Klebsiella oxytoca
atgcacgagaacaatatcacgttactgtgtaatgaagcagaacgattattgcagcttaatatttttttgctgcaaaaaatggttgatgagccgaatttccttgtcgaaagcaaacaaaacaacaacgaacaactctttaataaaagtaaagccttgaaaagaattgaagaattacagggtgaacgaaccaaaattatccgtaaagagatggtgctggccgtcgttgggaccatgaaagccggaaaatcaacgaccatcaacgcgattgtgggaaaagagattctgccaaaccgcaatcggccaatgacctcaatccctacactcattcgccacgtgccgggtaaacatactccagaccttcagctaaacaatatcgaccctatccatcagttgctgagcgcgctcaagaaaaagattacaactgacgaaggcaaaaagcgcgtacttgaactcgataaggatcacgagaagagtaagttattgcgaattgccatggatgataactggttaaaaaataactacgctggtgaagctgaaattttcacctgcctcgcctcgctcaatgacttggtacgtctggcaaccgcgctgaatgtcgaatttccgttcgaagcctatgaagaggtgcatgaacttccggtgattgaagtcgagtttagccacctgacgggaatggatgatagccatggaacattgaccctgctggacaccccaggtcccaatgaggccggacaaccccaactccaggcaatgatgcgcgatcagttgcaaaaagcgtctgcggttctggcggtgctggattacacccaattaaattccgaagccgatcagcaggttcgcgcagaattgaacgatattgcaaacgtggcggcaggccgtttgtttgtcctggtcaataaattcgaccagcaagatcgtaacagcgataacgctgagacggtcaagcagagcgtgcccgccatgcttgaacatggcgtcctgaatagcgagcgcgtttaccctggctcctctcgccatgcatatctggctaatcgcgcccgcagcgtgataagccaggccggaacgctgtctggtcaggaagactgggtggaggattttgcgcaactggcctttggtttatcctgggaagaagaggatcttacgagtccggatgatgtcaggagaaacgccgataaaatatggcgtcgttcactttttgataagctcattaccgaagtgattcaggctgcgcatactaaagcggcagcactggccgtcgattctgccgtagccaagctggttcagaacgcagaaaacgccaatgaatatctctcggttcgtcatcagggcctgttgaccagcattcagaccttacaaaatcaaatcaacggcttgcttagcgatatcgataatatcgccacctgtcagaaagaggtcgacgccgaggtgaaacgggccatgaaaggcatcacgcgtgaaacggacgcgttgcttgaacaggccgagaaaacgctgagcaaagacctgaatgaatacttcaaaaatggaaaacgtcaggagaaagaagcattcgggatcgatcaaccgaaggaatcgacaagtctcacgatctttggaacgttctttaagacgctgaccggtactacccagccacgagagcgtgatttcgatccgaacaatccggaaatgaagtttagcgcgcgttctgatgccgaaagattcatccagcaaatcgaagactccgtcaccagtttgctggcagagaccgaagaaaaaattaaaccgacgctgacagagatcgttgtcggcatcgaaaaaagcttccatggcaacgcgataaaggctgtggaaaaaatcgcccatcaaatcaatactcgtcttgaagacgatggctttgcggtcaatattcgcttccctaaagtaagccagctacagaccaacctgtctatcagaactcgtatggccagtcttctggaggaaaaaaccttcagtgaaaccagacgtcgccgttcgagtggagcatggggaacggtgtgtgagtggtttaaaaccgatgactggggctgggaagattacagcgttgatgtcacccgtagtgtggtagatattcgcaagattaaaactgccgtgaaaaaacagactaaagaacattttgcagagttaaacgagaccatcgaggcgagtatcaatcagcctattctggtcgaaattgaatcattctttggagcctttaaaagtaaagtggagcagttgcgtaatacgcttatccagagcaccgaagatcataaaaatagccagaatgagcaggaaaagctgacactgcgcctgtgtgagctaaaaaaacttacaccggagatgatccgtgacggcaaagcgctcaaagaggaactggagccgatgctgtga

SEQ ID NO: 198132 - DNA, 906 bp, Klebsiella oxytoca; identical to SEQ ID NO: 85517

SEQ ID NO: 198133 - DNA, 1089 bp, Klebsiella oxytoca
atgagccaaacgatgagattaggtctggcgctttccggtggtggggcgataggtgcttatgaagcaggcgtcgtcaaagcgcttgcggagtcgggaaccgacgtccatatggtttccggcgccagtattggcgcgttgaacggcgcgattatcgcctcttcttcagggctgtcgcaggcggcggaacggatggcggaaatctgggaccatctgggtaatagcaccgttttgtcggttaacaaatcagcctatttttcgctgctgttgcagtttgggatcggaatggggctctccccgatgctcagcaagacgggaagtatgctcagtacgatccttaatcgtgcggcgctgatcaccggtacgaaaggctttgaaaatcagcctttgctctcggatcaacccttgattgccctgatggatcgttatctggacatggatgcccttgcggtcggtttaccccttttcgtctcgttataccctactgaaggcggagtgcaggatattatcaactgtattgccgccgaactgggtctgggttcaacgcgcgattccgaattttatcatgtgcaaaacctccccccagaacagcaaaaagaggcgctaatggcctcggcggcactgccgttgttgttcaaatcccgtgaagtcaacggtacccattatagcgatggcggaatgggcggctgggcgagtttgcagggcaatacgccggtcacgcccctcgtggaagccggttgcaacatggtgatcgtcacccatttgagtgatggatcgctgtgggatcgtcaggcatttcctgataccacggtgctggaaattcgaccgcagcgttcattacgccgcaacgatggggcgctgggaggtgcaaaagatctgctgggctttacggcgatgcatattgattcgtggattgaacagggttatcacgacaccatgagcgccctagacagcgtccgtaaaccgcttcaggcccgacgtactctacaagtttccagtaccgcgcttgaaagcagtctggcagagaataccaccgcggattcggtcttaaaaaacgcaatatcccgacttaaagatggcattcaacgctga

SEQ ID NO: 198134 - DNA, 141 bp, Klebsiella oxytoca
atgcgcagcgagttaattcgcgggaacccgcttttctcagtcaaacaagatgcgatgagagataatattacctctcacctgctcattatcatcctgcccgaagttaagtttcgggccaaccagtctctgttatacgcatag

SEQ ID NO: 198135 - DNA, 732 bp, Klebsiella oxytoca
atgcggacacgctttagtctacggttatctccctttacttcatttcctttctcacaggccagaaaacataactggcctgaatattctctctgggaccacggtcccacctgcatcgtcggtcagcttatctgcctgggaccacggtcccacctgtatcgccggtcaggttatctccctgggaccacggtcccacctgcgtcatctgtcagcttatctgcctgggaccatggtcccacctgcgtcgtcggccagcttatctgcctgggaccacggtcccacctgcgtcgtcggtcagcttatctgcctgggaccacggtcccacctgtatcgccggtcaggttatctccctgggaccacggtcccacctgcgtcatctgtcagcttatctgcctgggaccatggtcccacctgcgtcgtcggccagcttatctgcctgggaccacggtcccacctgcgtcgtcggtcagcttatctgcctgggaccacggtcccacctgtatcgccggtcaggttatctccctgggaccacggtcccacctgcatcgtcggtcaagttatctccctgggaccatggtcccacctgcgtcgtcggtcagcttatctgcctgggactacgatcccacctgcgtcatctgtcagcttatctgcctgggaccactgtcccacctgtatcgccggtcaggttatctccctgggaccacggtcccacctgcatcgtcggcacattattag

SEQ ID NO: 198136 - DNA, 603 bp, Klebsiella oxytoca
atggaactatctattgtagaatcaataaaattagcggcaccgttttttcaaataatagtaacagtaatactaattcctcttataaaaaaaggatatgaatcgcgaagaacatttttttctcttcctcttcagaaaaaaatggatgctatagcctatttaaaaagacaccaaccgtcagataatagattggaaaaagctaaacataagatcatcatgggaggatataggttatccaatgatgttaatttttcaaggaaaatcattgagttttattatgataatgaggaagaaaacgcccgtttttgcaaagtgctccttagtgaaagatattattattgtcatgagaatagtgttataaaagcaagaaaagtaaaatatcatattaatattatgatttatattataacagtattgctttatgttaatcttttttatgttaaatcttccacgattatttacaacgcacaccttccggcagagccagttatcattatagctactggtatatatagttatttgtcatggaaagtgctgcgtggacatttgagtgtccagttaaacaagaaaagattttataatttcctacatcaggataatagttaa

SEQ ID NO: 198137 - DNA, 1251 bp, Klebsiella oxytoca
atgtcaacgtggtcacatatctctatcggtaatttcactctgtacgcaacgcagaatagctattatcagtggtattttcagaaaagcgatcgtgtcagggagattaacaaagaggaggacgggtactggtcagaaaaaacgtttatcggctatcgaacaaccgtggcacagatgcgccgacggttacagctgaatggatatgaccgcgccgctctcgaacgggatttttcgactgccattgaatgctggaaaacggattctattgcggagctgaccgcacttgaaagcgaaaaacatcaacacggagaattttatcttcagtatagaattatctggctaaaacatgtcattccggttcttgaaaatgcgacgctggatgactggcttgagcggttaaataaggcggcatgctggccgagtaaggagagtgatttttcacaaattttgacgtggattgaaaccggtgatcctgtgctttccctgatggtcagctcggttgacggtgattgctcttgggttcgtgattcgaactttaatttcccgtgtacagaacaagacttttactcactagcgattctgataatcactgaggatgacgctgtatgcgaactggacctgaaatggctcatttctgcaggatggattgatgattttgacgacctggaagaaaaacatgcaggggccactcaaccgcttagacatgtcagacagagcctttcagagttaagtgcactggtcacctctgcacccgaaaatcctgtgctgttgagaatgtgttactccggcatcattaccgtcatggaagcataccttgcagatattttcatacgggctgtaaagcatccttcggttaagcgacgattcgttgagagctatgataaattcaagggcagcactaaaaaacctctatcagacatttataatcaacttgattctctcgataaaattattgaagatgagctatttagcctgtcatttcaccatatcccgacagttacaaaactctatcaggaatgcctccttgtcagtttccctcccgatatattgaaaggtatagcgcgttcagtgatcattcgacacgacattgttcatcgaaatggtcgggataagaaagggaattaccatttaattgagttccatcatgtaaatcaactcgaggttctcacgcaggtgtttctggcagatatagataaacagattctggacggccttcaccagcaatttcagaatgaaaatgacgcacaaatgtaa

SEQ ID NO: 198138 - DNA, 1104 bp, Klebsiella oxytoca
atggttgatgatgatgacgtaggtctggagccccgggcccctgaacttagtccggacgttcaggccctaattaacaacggactggaatttctggacaaggcgcgggaggagctggaagcagcaaagccaaagttctccatcgtcagcttctggactgcggttgaaattctgctgaaggttcctctggcccatgagcactggagccttgtttgcagcagaaagactcctcccaaaaaacagacttacctggacggggattttcattccataagttatgatgaaattcgtaccctcctccgggatgtccttcaaaaaccactgagtgataaaacccataacgtttttgacaaagtcaggaaacaccgaaatcgtgtggttcacttttatcatccctcttttacagatgcggaacagcatcaaattcagaaagagcaggcagatgcctggtttgcccttaatcgtctcatgcgggatgaatggcagtccatcttcggcgctaaagacagctacagctggaagctggcgcacggtgagaccctcctgctcaggggaagtgaattctattctgccgttcggctccggcaggttaaagaggaactggatgcgctgaacaaatcaggtaacctgataggggtctgtgagtactgcaaacaaaaggcggtggtgtctcaatttcacaataccggaagcgaggaacgaatgctgctcatagaacggtgtcatgtctgtaccagtcagtcccgccatattctattcagttgcccaaattgcgacgaacgacagtccttacatgaaggtgatgaaccttttacctgcgaccgctgcaaagagactgtagatcgaatggagcttttggatgaggaaacatttctgagcgtcgatgagcagatgttctccgtactgcctgcaggttgcacaaattgcatggtacctgaaagtgtctgtaaacacggtgatggttatctttgcacacagtgtttatcgtattataccgagctgaaagtatgtgaatgttgcaaccacctgagcgacagcgttcctgaatttagtcgttacagaggatgtgaattttgcgatggtgatagccgctatcatgacgattga

SEQ ID NO: 198139 - DNA, 2211 bp, Klebsiella oxytoca
atggctcaactcaggatccggggcgtaagaagttacgcgcctgaccgggatatctgctttgatctcagcagtaaggtgacactcatctacggccagaacggctcggggaaatccacggtatcaggctatttttatgaccggcaggcggataaatatcggcactgtgcctttgagagcccgcacatcagccactttcaggtctttaatcaggaatatattgacagcaaattcgcccgtgcggactatcagcccgggatcttcactctaagtgaggccaatcaggaaagccaggataaaataaacagtaataataaagaaagaacaaaactgagtgcccgcctggagaaacttaatgaggagattgcacaaaaagaagggatgaaagaaacgatcgtcgaccactgtgccagggatattttcaaccggacagtcaatgacaggaaaaacctcagcgatttccttgagggtgccaaaattaaaagatcgttttacgaacgtatggttgcaacaccactttcagacgtgcgtaccacaacggaggaactgactgataaatggcgaatgttaagtcaaagcgaaggaacgcttgtcagcgaaattcatattccacgaacaactgtcttaacggaagaaacaataaaactgatgaaggaacctgttgtgcctgtaagtagcacgcaattctctgcactcatccagaaaatcggtaatgcagactgggtgcgccaggggcagcattatatacacgacgatgtttgccccttctgccagcagccctttgatgtcatagccttttcgcgcgaactcactcagatgttcgatgagtcttatcagacttctcttggagtgctgagccaggcagcagaagggctggctcaagactgtgatgccctggccgaatttgaacaccgtgttgcaacccattctttcgttgatgagggaagtcagattttatctctggtgaaagcggtaaataaaggctttcagattttgttacagcaactccttaataaaattaaagaaccgtctctgaaggtacagcctgagaaccttcaggaatccctgttcttactcgagaatgaagtggacgcgttcaatacccgggtacgggaaaataaccgactggctgaaaactttacccatgaaaaaaagtccctgcacgctgatgtaatggcgcatctcagagggatttgcgaagagttctttaccgaacgtgacaggcagcttggtgagctacaaaatgaaattaacagtaggttgcgtgatggcgggatcctcgaagcaaacaagaagcagctggatgacgagacgaatgccctgaccggacaactctcggacatacaacccactattgacagtatcaacgcgaatctcagactgctggggatcaccggctttgagatcatctgccatgatactgagatgaaactataccgtctgcgccggggaagcgagccagagaaggctgaagtattcaaatccctcagtgagggtgagaaaacaatggtttctttcctttatttcatagaatcatgctccggcagtctcacccctgaaaccattcatccggagaataaacttattgttattgacgatccgatttccagcctgtcacataactatatttatgaagtcgcagctctcattaaacggaaaattataaagtcaggtgcagcgagacatgtagtgatactgactcacaatatgtttttcttccaggaaatactgttaaacagtggccgcctgcaggataacagagaggcaccggtgaactggtctctgcttcgaattattaagtctgactacagttcctgcgagaagctctccatgcacgagatgctcaatgaatatcaggcgttatggcagaccctgaaagacgtcagggatggaaaaacccagcctattgtgctttttaatacgatgagaaatattcttgagtactatttcagtttcgcctgtaaaactgaaaaacttaaagaggccctggagtctctggcagccgaacacagcgatgccggagagtatgattcattttatcgggctattaaccggcactctcattctgatggccgaaatctcttttctacaggggtcatcgataaggaacgttatctaagtatgtttagaaaagtgtttactcagacagacgacgatgatcactatcttgccatgatgggggaatcagcagacctgcaggaaacagtggaataa

SEQ ID NO: 198140 - DNA, 693 bp, Klebsiella oxytoca
atgaaaaaacaattaacaccactaataccaacacagtttgctaatcagcagatttataaaatactgcgccaggatatagtacgttgtgaaataaagcctgggacattactttcggagaaagaggtgtctgaacgattcgacgtttctcgccaaccggttcgtgaagcattcatcaaactggctgagaatggtttgatacagatccgtccacaacgaggaagctatgtaagaaaaatatctctctcgcgagtaaaagaattcagttttgtcaggcaagcaatagaatctgaaatagccaggagcgcgacatttctggcaacgacacaacaaatagaacagctggaagaaaatttatccctacaaaaaagttgcataacaaaaaccaatgcactcgatttttttaatattgatgatgactttcacaagttactcgctgatatagcccagtgcagtctcgcttgggaaataattgacagcaacaaagcaacagttgaccgggtaagatatctccttctcagtagtattactccccctgacatattggttactcagcatacttcgatcgtagcaatgctcaaaagtaagaatagtgaaaaagcggcaaacgtgatgaaaaagcatcttaatgacatcaatagctcagtaagcaggatttatcagcaacaccagcattggtttctggatgatctatga

SEQ ID NO: 198141 - DNA, 1467 bp, Klebsiella oxytoca
atgaataacctgttattaacggcaaatgcagcactgccatcatacgagcggaaaaaacttgtatcacgtattgtccacttaggttttggtgcttttcaccgcgctcaccaggccgtttatgcagacatactggctagtgaacatggaagtgactggggatataccgaagtaaatcttatcggtggtgagcagcaaatcgcagacttaaaagcacaagataatttattcaccgttgctgaaatgtcagctgatgcatggaaagcacgtgtcgtaggggttgttaccagggcactgcatgtcactagcgatggtcttgaagctattctggctgcgttatgtgaacctcaggtcgccattgtctctcttactatcacggaaaaaggatattgccattcaccggcctccggggagttactgaccaaccatccacttatcgccagcgatctgcaacacccaaagcagcctaaatccgctctgggtgtaattgttgaagcgctttcacgtcgccgtagtgccgggcttaccgctttcacggtcatgtcctgcgataatatgccagaaaatggacatgtaacacgtaatgtcatctgcgcatatgcacactctgtggatcccgggctcgcaaactggattgaaaaaaacgttaccttcccttcaactatggtcgatcgcatcgttccggcggtaacctctgatacactttcaaagattaaaaaacttaccggcgtttcagatcctgcagcggttgcctgtgagccttttcgccagtgggtaatcgaagacaattttgtatgcggaagaccggaatgggagaaagcaggtgctgagctggtaagtgatgtactaccctatgaagaaatgaagttacgtatgctcaatggcagccattccttcctggcttatttaggttacctggcaggcttcgaacacatcaatgactgtatggcagacaacgattttaaacgtgctgcctatgcgttgatgctacgggaacaggcggtgacgcttaaagtgaccggggtggatctcactcgttatgctgatgagcttattgctcgtttttgcaacccggcgctacgccacaggacctggcaaatagcgatggatggtagtcagaagcttcctcagcgcatgctggattctgttcaattcctcatcgataaaaagcaacctttcaacctgctggccctgggcattgctggctggatgagatatgtatccggtaaagacgagcatgggaaaaatatcgaagtctgtgatccaatcattgaacaattacaaagcattgtgaatagctcggaaatggatgcggaaagggtgactggtttattaagtattaatgctatctttggacaaaagttacctcaaaaccgattgtttattaatgcagtaactaaagcgtttaatgaattggtggctaacggttcgaaagaaacggtgagtaaatatgtaagtgaactggcttag

SEQ ID NO: 198142 - DNA, 462 bp, Klebsiella oxytoca
atgattgcaggaaatattcaacagttaggtaaatgccaggctgagttaccctttgcactttatgaagttctcagggcaattaaggatttagacttttcagtacatcaggatggtcagaaagaagtaaatggcgttatttataagacatttactgcgaataccgatctgcctgagaaacgtacacctgaaacacataaagactttattgatgttcagtttgtgatttctggtaatgaactggctgagtttggttgccttggtgacacaaaacctcatgtagaaaaaccggaggatgataattatttttacgatcgttcaggccttgaattgaatgaagtgaagctcactgatggtgatttcgttatcttttttccatgggacattcattcacccttgtgccacaaaagtgtcagcagtaaagtcaggaaaatagttgctaaagttcctgtctctttactttaa

SEQ ID NO: 198143 - DNA, 1017 bp, Klebsiella oxytoca
atgtcattagtaaagtttgatgaaatgaaacaaactgttaaacaagcattcctgaatgccggtttaagcgaaaaacaagctgatgtttgtgctcagattcataccgaagcgagctgcgatggtattttctctcatggtctgaaccgtgttgcccgttttgtcgattacgtcaaaaaaggctgggttgatatcaatgcggaacctaagcaggtaaaagcccttggcagcatggaagtctatgatggtcagcgtggtatcggtatcaccaactcattgtttgcggttgaaagagcaatggagctcgccagtcaatttggtatcgggatcgtaggtatgcgcaataccacccactggatgcgtggtggtacctacggctggaaagctgctgagaaaggttatgccgcgatttgctggacgaacacagaatcctgtatgccagcatggggagctaagaatccgcgactgggtaataacccttatgtcatggccgtgccaatgaaagaaggcgctctggttcttgatatggccatgtcccaatatgcgtatggcaagctgcaagtaacccgtctgaaaggtgaaaaattaccgttccctggcggctttgataaagatggtaatctgacggatgaaccgggtccgatcgaagagtccatgcgtattcttcctgctggttactggaaaggttctggcatggcagtacttcttgatgcaatggccgcattccttaccgccggtgcgccgactaatgagatcgataaaattcaggaagggagctgcaccggagcaagtcaggtgtttatggtgtttgatcctaaacattttggtggtaaagaattcagtgaaaatatggctgcaagcgttgctgaatatgttaaaacgtcaacccctgccgaaggccagcgtgatgtgtactatcctggtgaaatggaactggctaaccgcgctaatttcactgtaaacggtattccggcagatgacggtgtctgggcagaagtacaagaactggcgaaacggtaa

SEQ ID NO: 198144 - DNA, 1530 bp, Klebsiella oxytoca
atgataaatcgtgacttggataagccaataaagctaaaaaatatgctggcttatggcggcggtgatttctttggcggtggtagttttgcggtactgggcctctggctaatgtttttttataccacctatgccgggttaagtccggcgcaggctggtgccgttattgctattgctcgtctccttgacgcgttttttgacccgttgatgggttatgtcaccgacaatttttatcggacaaaggttggtcagaaatttggccgtagaggattcttcttcctgtttggcggcccactggtaatgcttacctacattatcatgtggattgacgggatgagcttcctctattatctctcaacgtatattctgttctatgctgcatataccttagttattgttccttacgaaacgttagccgcagaaatgactaacgactttaaagagcgctcaaaactgactggggtaaggatgttcttttctacgggggcagggattctcgcagcctggttaccagggcggatcatcagcttcctcggcgatagcaacccatcttcattcctttatatgggggttatctttggggtgttatttgccgtggttatcatgtgcctgtacttgtttacatgggaacgacccatcgcgtttgatcccaactcaccgaagaagaatttttctcaggatatgaagcatctgttccgttccctggtatccacattccagttaagaacattcagacaacatgtcggtatgtatctgggcgcatatgtggcactcgatgttctcggtgcgattctggcttactatattatttttgttctgggcgagacggcggttagtgcttcaaatgccttaacatttatgaccattgttcaatttttatgtgtggctttgtttattaccctttgtattaaatttggtaatggtaagtcatataaaattgcgcaaagctttatgctgttaagcgtcacattgttcttgtgtattcaccttttctccctaccttatagctcatggctggtttatgtcgcagcgctgctgatgggtgtgggtcgttcagggacttactatgtatgctggaatatttacagttttattccagatatcgatgaaatgctgacagggaaacgccgggaaggtatttttgcaggtgtgatgacatttgttcgtaaagccgttcaggccctggcgctttttctggtcggcgtcattctccagagctacggctttgttgcaaaaagcacatcacaaagtcctgaaacaattcatggtattgtcatggtgtttggcgtcggttcagttgcgttccttgcattcggaattatctgttcactgaagttcagactcactcagaaaaatcatgctgtacttgtcgatgaaataagtcgacttaaaaataatggcagcaagaaagatgcaacaccagaggcaaaagaagtagccgaattacttaccggttgggactatgaatacctgtgggggaacaataaagtttctcgtgaggaaactggtttatccagagcatcagaaagttaa

SEQ ID NO: 198145 - DNA, 1020 bp, Klebsiella oxytoca
atgaaaagtgtcgtcattgaaaaaccaaacaccttactccttgaagaacgtcccgtaccgcagccacaggcaggggaagtaagagtaaaaattaaactggcaggtatatgcggttcagatagccatatctatcgtggccataacccattcgcgaaatatccgcgtgttattgggcacgaattttttggcattattgatgccgtgggtgaaggcgttgaatcctcccgtctgggcgagcgtgtatccgttgacccggtaatcagctgtggacattgctacccgtgccgtattggcaaaccaaatgtctgcacctcattggtcgtactgggggttcaccgtgatggcgggtttagtgaatatgcagtggtccctgcgcgcaacgcctggaaaattccggatgctatcagtgatgagcatgctgtgatggttgagccgtttaccatagcggctaacgctaccgggcaattaaatccacgcgaagatgatattgcgctgatttatggtgccggccctatgggattgacgaccgttcaggcgttgaaaggtgtttataaagtaagccaggtgattgtcgccgatcgtattgatgagcgccttgaaatggctaaacgcagcggtgcagatattgtcctcaacaatactgacctcagtttgaaagaaatcctcgcggagagaggaataaaaccaacattgattgtggatgcagcatgccatccgactattttgcaggaagcgataggacttgcatcaccagcagcacgaattgtcatcatggggttttcctcaacaccaagcgagattatacagcaaggtattacaggtaaagaaatttcaatcttttctacgcgattgaatgctaataaattccctgtcgttattgactggctctccaaagagttaatttatccggataaattagttacccataaatttgattatcagcatgttgctgatgctattaaactcttcgaaaaagatcaaaaacggtgttgtaaagtgctattaaagttccacgagtag

SEQ ID NO: 198146 - DNA, 1215 bp, Klebsiella oxytoca
atgaaaatcgttagtgctgatgtttttgtcacttgccccggacgcaactttgtaacggtgaagatcacgaccgaggacggaatcacgggtatcggtgatgccaccctcaatggccgcgaactgtctgtggcgtcttatcttaaagatcacctgtgcccacagcttattggccgggatgcgcaccggatcgaagatatctggcagttcttctataaaggcgcgtactggcgtcgtggcccggtcaccatgtccgccatctctgcggtcgacatggcgctgtgggacattaaagccaaagccgccaatatgccgctgtatcagttactcggcggagcctcccgcgacggggtgatggtttactgccacaccaccggtcataccattgatgatgtgctggaagattacgcgcgccataaagagatgggcttcaaggcgattcgcgtccagtgcggtgtgccgggcatgaaaaccacctatggtatgtcgaaaggcaaagggctggcctacgagcctgcgaccaaaggcctgtggccggaagagcagctgtggtccaccgagaagtacctcgatttcacgccaaaactgttcgacgccgtgcgcagtaaattcggtttcaatgaacatctgctgcatgacatgcaccaccgtctgacgccgattgaagcggcgcgctttggcaaaagcatcgaagagttccgtatgttctggatggaagacccgactccggctgaaaaccaggagtgcttccgtctgattcgccagcacaccgtcacgccgattgcggtgggtgaagtgttcaacagtatctgggattgtaagcaactgattgaagagcagcttatcgactacatccgtaccaccatcacccacgcgggtggtattaccggtatgcgtcgtatcgctgatttcgcgtcactctaccaggtgcgtaccggctcgcacggcccgtctgacctgtcaccgatttgccacgctgcggcgctgcattttgacctgtgggtaccgaacttcggcgtgcaggagtttatgggctactcagagcagatgcttgaagtcttcccgaacagctggagctttgacaacggttatatgcatccaggaaacaaaccgggccttggcatcgagtttgacgaaaaactggcagcaaaatatccctacgatcctgcctacctgccggttgcacggctggaagatggcacgctgtggaactggtaa

SEQ ID NO: 198147 - DNA, 255 bp, Klebsiella oxytoca
atggatgaagaaatgatgttttcgctcagctatgagctgctgacgcaaaatacagaagaagaaatcaggaaatgcgaccttcgccaggacggcccgtactacgtccaggaactgaacaggtcctcagacattctccggttctggtttatcctcgcaatgatcgggtacccgggcgtgccggacatggaacgcattgacgctgacaggcagcgccttgaggggctgatccgtggtctcagggagatcagcgcgtga

SEQ ID NO: 198148 - DNA, 396 bp, Klebsiella oxytoca
atgaaaacagtgatatgggttgcggtgtatctcgtggtatccattctggtcttttcgggatggctgatctgcttttcacagcatgctcccctgaacgggcctgaacatgatttgacactaacgtatctgctaaatttattttatgtttatgttttgatggaacccttctaccagttctttcaggtgactgaatattttaaagcaattatggttctggaagataaaagcggccagtcgataagtttttataatgaactccctgtgatgtggatatatagtctgtctgcactcttaactattgtcctgtatgtaatatctgggaaatggatttttcatagacgattacaaagacagcatcctgtgaatgattcgaaaccatcaaaatctaaattataa

SEQ ID NO: 198149 - DNA, 240 bp, Klebsiella oxytoca
atgccgcgaaactcagatatcgaaatggcctggcgtcaggcaattgtcattgaatcaaatggccgccgtacagtgacaacatccaggtttatcttggaactcgcaaaggttaactggatatggtctccgcgtcaggcaaaccagtggatagagcattatgtgacgacgttccgtgatgtctcaacgaaagagggggatgagcgaacattccagctttataacccgaacggagggctgtaa

SEQ ID NO: 198150 - DNA, 879 bp, Klebsiella oxytoca
atgattaggggcgtagtggtatcacctgctgccatctcaaaaaaagatggtgggattcatcatgatcattcactttctacggtagagattaattatttatgcttatattgggataaaatttcaatacccacaaataatatcattcattttggcgtgagtaatgaggaaatattaattgacgcaggcgtattggttaggcctgagtacgtactaaaaaatttttcaacagatcaaaatgattttaatgagttttacattgaatgccaatttgatactttaaacaaacttcgccagagagatttagatactgactggagagcgaatcaaattgggaatgaaataatcttacccaatgattatggtgatcaaagtgaagatgtgaaatttattaggcttgagctcgatcaattactcccggtcccaggaggtgatgttcatattcatgatattcttgagtttaaacaaaggcgggcggcagagttaactgcactccattcatattgtgatgatttgtatcttgaggttttgagctcagctgacccaaatttgaccagagcaagaaattactccaggcttagaggtgcaattgaagatttacataaaatcaacaaggaaggttggcagagtcctattagattcagcatagacatatcttcggaatttgacctgtcgcatgttagagctgggtacgtggcattatgtcaggctcttcaatctcctcaacctttagaaaccgttgctattggttccttaatatcacttttagaggggtttgttaaaataaaacctgaggtaagaagcattcgcaagaggagggatataaatgagaatcttatatatcttacgaatgcaaggaaagaaggtctcattacggggtaa

SEQ ID NO: 198151 - DNA, 597 bp, Klebsiella oxytoca
atgagtaactccctgctgccgccatcttccaccgcctggcttcgctataccgaagcgggctgcgcaagactgtcagcgatcacggtggccctgcgcaccctgtggacgccgacagccagcccggtggatttgctgccctatctggcctgggcattgtcggtcgacaggtgggacaaggactggccggcagatcgaaagatcgccgccattcagcgatcgtactggttacaccgccgcaaaggcacgcgagcagccgtgcggcgcgtggttgaagatatgggcttttccgcgacgttcgccgaatggttcgaggtcggtgacaccccgggaacttttcggcttgaggtcgacattaaagaggtcggactgacagcaaagacgctggcagagctgaaccggttgatcaacgacgccaaacctgtcagcaggcatctggcgcagctcaacatagcagcgaaggtgcggggcgacattcgggtcgggtcaactctgagcagtggcgagataatcagtatttatccgccggattatgagccggaggaaaatattttgtataacggcgtgatttttcacgacggcatttttagttacaggtga

SEQ ID NO: 198152 - DNA, 1857 bp, Klebsiella oxytoca
atgacagcaataagtgaaatattaatttctgcaggaataaaatatgtagtaggccaagctgcaaaatctgggagcagttggttcactcgaaataaaaacaaattaatggtcgcactcagaaacgatgcaatactaaaaaaatacagcaacaactgcattaacaatactttttcttttagaacattattacataataacaaagatgtgtatcttgatgagatctattatccattaacaatagaatcaattgatcgccgtacttcatacgagattgctgataatactatacttccagagcatacacccatcgttattatcggaattgctggacaaggaaaaacaaccatcttaagaaaactattccttgaggaaattaacgatagaaaaagactagctttctttttttatctacgacaactcaagaacctcgaaaattctaaaattgaggaattaattcttggacatcttattgagaatggcgtctgcggaactattgaagatgtttgttatctatgtgaaaaaacacctttagctttatattttgacggatttgatgaattgaacccaagccaaagaattgatgcaataaaaataataaaagaagcaagaagaaaatatcataccaaaattatcataacttcaagaccagactctgagattgcaagggagtctgggtttcaaatttttgaaataaacaaactcaaccccactcaagcattaagcttgattggggctcaggccataaataaagaaaaaaaagaacatttaacaaaaatatttaaagaaagaaaatttctttcagcaacaataacaactccattattattggacttgtttgtcataacatcaggatattttaagaaagaacccacatccgtcatggatttttacgatgagttacttcatgctttaatttataggcacgagcgattgaaaaacttctccagaataaggaagtccgagctttgcgataaagatcttgaagactgtttcgtgatgtttagctttgttacttttttctctaatgagtcttctttttcacacgaaaatgtactaagccatttacaaaaatcattaaatatacttgaatgcaaagccattgtccaagatgtactagatgatataataactggcactaatctaattaaccaagatggctataataattatacattcatacatcgttcaattcaggagtttttttcagcaaaatatgtccatcggatgcgcatggatagtaaagagaagttctacaaaaagttaccaagcctcaccattaataacttagataatttcctttttatgctatgcggccttgactcatattacttctccaatttattcatcattaacggactcaaatcaagagatatgtttgactttggaaaggtaataccactaaaaaaggatgagtttataaaatgttttgattattatttaatttgctttgatgccaatactggtagaatcacaaattttagcataggagggccaggcaacataaataaactaattttcttagaaagagttgatagcataataaaagatcagtttcaagatacacctcaccaggtgataggacaatatatttatactgatgcagtagatgaggttactaaaatttatctaagccgaaacatcgatattgctgacagtataaaaaatgaatacgcaaatgtggaatttgttaaattaacttcattcctcgataaactgccgcagcttaacgagtgcatggatcgggaatattaccatttattacagatcaatgacgacatagaggattttataacaaattcatacaccaaaaaaggtagagaggccgcaaatatagatagcatcattgaattaatctaa

SEQ ID NO: 198153 - DNA, 1053 bp, Klebsiella oxytoca
gtggctcgccgagtaggcgttctgcgacggatcccactgcagcgcatcctgctgcaggcccgacacgtcaccggagatgttctccaccgccgtgttggtggcgtacagctgcgagccgttcaccgcgtcggtgctggtcgccgacagacggcctgccgccacgttggtcacggtgcgttcgctgcccacatcccccacgctgaccgtgctgatcgggttcgccccggcaaacgcatagtcggtcccgcgcagggtgaccccggccgttcccaccgtcgccgccgttttcgagttcgcccccagcgccacatcgttctggttgccggcaatggcgcccatcccgatcgcgacggaatccagccccagcgccgacgagtcggtcccggtggagttggcgtggaagtacttggtcccggtggtatagatgttctccaccgagtcacccaggttattgatactggtggtgttaccctccacctgctgattggtcgcatacagctgcgaaccgttcaccgcatcggtgctgtctgtcgacagctcgcccgccgccacgttggtgatcctgttcaccgtcgtgtcaccgtggctcgccgagtaggcgttctgcgacggatcccactgcagcgcatcctgctgcaggcccgacacgtcaccggagatgttctccactgccgtgttggtggcgtgcagctgcgagccgttcaccgcatcggtgctggtctcagacaaacgacccgccgccacgttggtcacggtacgttcactgcccacatcccccacgctgaccgtgctgatcgggttcgccccggcaaacgcatagtcggtcccgcgcagggtgaccccggccgttcccaccgtcgccgccgttttcgagttcgctcccagcgccacatcattctggttgccggcaatagcgcccatcccgatcgcgacggaatccagccccagcgccgacgagtcggtcccggtggagttggcgtggaaatacttcgttccgttggcgtagatgttctccaccgtatcgcccagattattaatattggtggtgtttga

SEQ ID NO: 198154 - DNA, 942 bp, Klebsiella oxytoca
atgctcagactgtctcgtccggcgctgctgctcatgctggctggcgtatccgcttccgcgctggcgaaaacgccggaaaccgtcaatatcggctatcagaaagccaatatcttcgcgctgctgaaatatcgcggcaccctcgatgaaacgtttaaaaagcagggcatcgccgtgcgctggattgaattccccgccgggccgcaaatgctggaagggctgaacgtcggcagcatcgacctcgccgcaaccggcgatgcgccgccggcctttgcccaggcggcgaaggcagatctggtctacttagcccactcgccggcgaatccaaaaaccgaggccatcgtagtggcggaaaactcggcgattaagagcgtggccgaccttaagggcaagcgcgtggggctcaacaaaggctccgacgtaaactacctgctggtggctgcgctggagaaagccggattaagctataaagatatcactccggtctatttgccgcctgccgacgcccgcgccgccttccagcgcggcgcgattgacgcatgggttatctgggatccgttcctcgccgaggtggaaacaaacgccaaagcccgacagatccgcaatgccgaagggctggtaccgcactataccttctacctggccagccgcaaatttgccgacgcttatcctgaaaccgcgaagcaggtggtcgatgaactgggtaaactgagcgaatgggccaacagccatcaggacgatgccgccgggatcctctcggcttctaccgggctggataaggctatctggctgaagacgctggcgcgcctgccctatggcgccgaacggatgacgcctgcagtctataacgagcagcaggcgctggcggacactttcacccgcatcggtctgctgccggtgaaggtggacgtccgcagtgcgacctggtcactggataagcagtaa

SEQ ID NO: 198155 - DNA, 438 bp, Klebsiella oxytoca
gtgccccggcccgataaagggctggtacatgcccagcttacccgccgggtcgagcgaccagacatcatcatgcaccccgccgacaatgccgttacggacattcacaaactggtatttatccaggaacagcccttcaacatagtccgggcagtaccaggcatattcgaggttataaaaccgcagtcggctctgattaatctctaccacccagcccccgccacgctggagaaggccaataccgagcgatttatattctgtacccagttctgcacagccagatacgttaatgctctccatgtcgtaccagccgagcgaacgcaaatcgaaccccacgccgaatccgatattttcacttcggttttcagccgtaccgcacacgcgcagattgcggaaaatgccccgcccttttgtgcgccgtggaatttgcccgcccggtga

SEQ ID NO: 198156 - DNA, 267 bp, Klebsiella oxytoca; identical to SEQ ID NO: 94214

SEQ ID NO: 198157 - DNA, 390 bp, Klebsiella oxytoca
gtggccaccgcagagtggcaggacgcccatcagcgcgcgcatgcggaggagatcaaccgccgctttaacggacagcgggtcaccaccggacagatcgttttgtttgggctgacgggcgggctaatcccctgcccggcgtcaattaccgtattgcttatttgcctccagttaaaaaaggtttcgctgggagccacgctggtgctgagttttagcgttgggctggcgctcaccttagtggcttcaggcgcaattgccgccctgagcctcaagcacgtcgccaaccgctggccgggactaaacgatctctcacggaaagcaccgtggatttccggtgcgctgattattgtggtgggttgctatatgctgctgcacggctggcgtaatctgtag

SEQ ID NO: 198158 - DNA, 234 bp, Klebsiella oxytoca
atgaacgcattagaaaaagccatacaaattgctggtgatgcaacgaagctagcagaaaaactggatgtttcatccatgacgattagccattggaagcaccgccacggtggagcagttcctcagtctagagttttccagatctttcatgtgacaggcgtaactccgcatgaacttcgcccagacctttacccaaatccaaacgacggtttgtcttcacaaaatctggcgggatga

SEQ ID NO: 198159 - DNA, 132 bp, Klebsiella oxytoca
atggaatacgatgaggataaggcggggctaaaattcaatgcgtttgaactagctgtggcggatctagtagtggatgggcacttagtcgaacaacatagggaagctgggaacgtcatagagaaggggtcataa

SEQ ID NO: 198160 - DNA, 954 bp, Klebsiella oxytoca
atgattagatcaccgatcaaatgggcgggcggtaaaacccgcgtgatgccggagctgctgaagcacttaccaaaagctgattgtttaatagagccgttcgttggcagcggtaccgtatttatgaatacggaattccgccgctatgtgctttgtgacagcaatcgcgcgctgattcacttcttcagcgtgctaacgcgtttcaccgatgaactaatagacgttgcccgatcattctttacggatggtaacttcagcgaagactattacgcatgccgtgatggtttcaatttcatcagcaaaaaccaggtcattggccacgctcgcaaaatccaatgggcggcaatgttcctgtatctcaatcgccatggatttaatgggctatatcgcgttaatcaaaagggcgaatttaacgtcccattcggaaaatttgccgcgccttacttccctgaaaaagaaatgcgcttgttcgctgaaaaagcgaatgacacaaaagcgatattcctccatgcagattttcgtcattccatccctgacgttattcaactggcatatgacgctgttatttactgcgatcccccgtacatcccggccagcaaaactgcaaatttcaccgcctacggtaagccgttcacaccggacgatcaccgcgctctagttgcgacgttgctggaggtaaaccgccagcacggcacgcgctcggttatctccaacagcgacaccccggaaacccgcgagatttactccgctttcaagctccacgcgttaagcgttcgccgctctgtcagcgccaaaagtcgcgatatggctggcgaggttattggcgtgcttcgcgtgtgcgattgctgcggtcgttctggcggtggttattgccctgactgcggtccggttatgggggcttctacttacgacgaaatggcggcgacaggtgcattcgatggggcggagggattctga

SEQ ID NO: 198161 - DNA, 567 bp, Klebsiella oxytoca
atgaatcacttaatgatcgatttgattaacgttaataagaaaccgtcttcacctttatgcgctatcgaagccgtattctttgaaccgtcaacagggcagatcggaaaggttttttattctccgatagacattcgcaaagctgaaagcctgaagggctgtatcagcattggcaccgcctttgactggatgaaaaaagactctcactggcgcgctgaagtcatgagcgcaaccgaggctgaagaggatgcgctttgcaaccttgcgggcttcatagccgataatatagcgaaccataccgcgcctttatttgtgtggtttaaagacaccccggaaaagttagtttcgctgcgatatgccgttgagcgcacggaggtgactggcgttttccttgatggtgcaaaattccgttgtattcgttctcttctcgatcttgccgcagctactggctacgtgcctcacgcgcggaaagccttcgcacgttacgccctgacagacgctatttatcaggccgaacaggtttgcgagatctggcagcgcctgacctccccacacattgaaacgctgtga

SEQ ID NO: 198162 - DNA, 240 bp, Klebsiella oxytoca
atgaaacgcctttatgctgagcagattaataaaatgctggaggattattattttaatctggaaaacaacccgcagggcagagactcccactatggtgttttagcgagcggcgtccagcatatctatggtgctgctttttgcctgaatgatgatgacacgctatgtgagcttcgcccttttgtaaacgcagtaatgaatggtgaaataccatccccaatctctatagagatagctttatga

SEQ ID NO: 198163 - DNA, 612 bp, Klebsiella oxytoca
atgttcgctgctgtgcgagattctttgatagaaatcttttcgagatctgcgcgctcgccctcagtgagcggcaccgctatgcgggcgttccctttggagccacgcggcaaccttgcccgtggtaggtttttttcttgtgtcatagtggtatcttgtgatcatctaagtgttggtgaaaacattatgagatctatagatctcttttgtcaaggtggacatgtgagctttacatctcaatgcatatcaagattgaaatttgaaagaaagcgcctatcccttaatcaggctgacgccgcagccctatgcggggtttctcgtgaaacttggggaaaatatgagcgcggaacaatggttccgggaggagatgttttgctctctttcgcaatcaacggtgcaaacgttcaatacattttgaccggcgaagaaggtggcggtaccacgcttacgcgagacgagttggagctaataaatcactttagggctgcgcctctcgcaattaaggccgccgccatggcggcgctcaccgcaggcaactctgcatcaggttctatcaacgtttcaggtcagggtaaccgagtagcgggaagggattacaacgaaaacaaaaagtaa

SEQ ID NO: 198164 - DNA, 630 bp, Klebsiella oxytoca
atggatgttaattctactggtaatcaaaatcgtatctcaggtcgtgatttcaatgagaacaatatccagatagataaatttgatggtcgtcacacaattaacatcgcaattccatcggaaaagcatgatgaacggccactagtaaaagcacaacgcaaagagcttaacactctcgttgcaacagtatccgctacatgtggtggcgaagcatatgagatttggcaaaagttgcatgctgaaataggcgtttccagtattgaggaaatgactgtcaatcaataccaaactgcgatcagctatttacaggctatgattgagcgcgtcaaggatagggatgcaagtaaggcgctggtcagcctcttgctacgtaatagtgaggatagtgagttgcggcaaaagctaatccattactgccatgtcaattttggaacaggcagattaaacgaccttacccgcgcccaacttcagatggctatttcatggctggatcagcaagtacaagctgctaccctgcctcttcctgagccagttgtatctcgacttggtttcgccacgttactgcaggcctacccaagagaaattggacttatgtttatagcaggtgtgttgttaggagccctgcttttttaa

SEQ ID NO: 198165 - DNA, 240 bp, Klebsiella oxytoca
atgaataatgaaacaattatccccaaggaagggctttacgtatctaggactgatccctacgtaagacttgtcgtcaccgaagtacatgtcgttgatgatggtgatgatgatgatatctacttcctcgcaacggtagttaatgaaggcgatgaagatgatatgtccgcactttcctatgagtatgagcctgatgaatggtatcgccttgtaaaaaatcagcagcttgagtacatcccataa

SEQ ID NO: 198166 - DNA, 408 bp, Klebsiella oxytoca
atggcaaataacacacaaacgattgagtcgactatcatcgactttcctcgtgataagtggaaaaacggggggtctaatggcggtgatggggggaacgatatggacgacctgaaaaaacgagtagaacgcactgaagaaaacatagcacagattaaaatcgaccttgcgacactaacagcaaggtctgagaattttgcttccaaatctactttggatgctttggttacccgttcagaagcattcgcgactaaatctgatgttgagagtgtccgaacagaaatctataaagccaaggctgaattatctaaggaaatcagttcaatcagtcgctcaatttggatacctttgaccgttggcttagtgggtgggctgttgctctgggctgctaaaatatttctcctcaaataa

SEQ ID NO: 198167 - DNA, 2136 bp, Klebsiella oxytoca
  misc_feature (2109)..(2118): n is a, c, g, or t
atgcaggataaaatttcatttctcagtaattttgagatcgataaagaactgtcgtcagcacgcaaactccccggaaaacccacaatttataatgcttataactcaaatacgggttctatcgtattgataaaaaaatggccacgagatgagaatttaaacgatagcgaattgtatctaatctggttacacgaagtacgtgaattgcaaaggctgcaaacataccctggtgcacaaaactacttactgcctatgtcagaagcgagcgttgatactgaaggatattatttggtctttaactcgcaagagagaataccttatccctgccattctgaagaaagctcaaccactcggttaactttaaagagaagaaaccctaatcttttttggaacaatattaaaagattagtcaaaggtttaggtgttttgcatgcacagggtttgttacatcgaaatttagacgcatggagtatatttacaaccaatagcaatgagcctgactatcaattaggcggatttgaatggagtctccgccttggggtctccggtataaaagatagtgaacgggaagaatcgttagaaaaaaaatcagcattttcctttcgtgaagactggaaagatttgggtattcttatagccaacttactaaatatagatgtcactgttttacgtgatgaaaaattaagtgcagaaagtaaaatatccattgaagaactctcacttctaaaaagcctaatatatcagtcgcgcctgcatagagtcgactgcgactccacttgtaaaagtatcgacgaaataatcaagtctcttgccaatgatgtaaaaaataattccaaatcattatatttatgttatgatcatggaaaaaatatggtttcattagtcaatgcgatgaggaatgccgaccaaacactccttaagcaatatgacgtaagcctctcttcttcattaattgatttcatatctgctgatttagaaaattacgaaattgttgaactaaaaaaaacaggagataaaaatagtaaatatgccctaaacggacaatatttgacttacagctttaacgagtatagaaagtcatggaatataggaaatatcagcgagattaaaaaatcccctcatccaaacaagtttgtaaaacaaagaaaaaacattgaaaatgtaaatattcaagtgctaaatcctcttcaaatagcacaaaaccttataaaaattaatagtgacgccatttattgggatactatttttgacaaatctcaagaagataatagtttatcagaagatgctacccggagtttcaatgcattattgtgccttcatgtcattgaactgttgcagcaaacggcaaacacttggcttgttgagattgtttctgcaaatgaacttaatggtgaggagaatgtaacctatgctgttaaatgcattaatgataattacagagaaaagttatcccgtgcgttgtgtatcgagaatccaatccgtcgatttgaagatctgcttgaagaaaaaatggaagatgaggaaataaaattaaaagccagtgaaaatggtactgtaggtgctaagcataatagttttgactggaactacttaggacaagataataacccgcatgacgttaattactatagatttaaaggtaaaaagaattacatcgaaggagaccgagtctatctacgtttagcaaatgacgtcggttatgatgaattgatgcagagaaggttatttcttcttgcgcgtatcaaagaaaaccctagtcttctggagtctctgattgacccattattataccgtaatcgtagccacgaaaatatatctgagaatcttccatctaacttagatgagtccaagaaaaaatcgttcaacgaaatcttgaatgttcttccttcttattttctccaaggtcctccgggagtaggcaaaacgcatttagtgactgaacttgtcaagcaacgcttcaataccgagccatcgtcaagaatcctaatatccgcacaaggacatgatgccgtcaataacctgatggataaaatctgcaaagagatgtccaaaacacatcaagaaagtgacattcttcttgttcgttcgaattctcgacgagcgacaaatgannnnnnnnnnctaacacaccatctttaa

SEQ ID NO: 198168 - DNA, 1305 bp, Klebsiella oxytoca
atggaaagtgaaatttttaaaaaagcgccttcattaataaaatcaaaaattgaggagacctatagtaaaatagaaaactcaagtgatgatgagttattttctgacaagtctttagaatcattattacttcgttcagcaaatatggtattttctacaacaaattcttcagatcttgaaaagttgatattatctaattcagattttgactggtcgatcgttgaagaagctggaagagcaaccggaactgagctaatagcccctatgttactttcgcatcgaagactgttaatcggtgatcctcagcaactgcctccttttggcgaagataaaattctaacactattaaaagacccatccaagtttaaacaggctctagagcatgctgaagggttgttagacaaatctcttaacgaacttggtttcgatgatatccttgagaaccttgaagaagattcaactagtactaaattggcaagggatattagtcactttctccttttgtttaaatcattgtatgatgaaacatttgaaaaaaatgattctcttcctgtatctggtcgcctaagatttcagcacagaatgcatcctgatatatctgaactggtttcacatgtattttatgatgacgaccttcacacagatccaaaatgtttagaacgttttgaaaaggaccccctcacaataaaagactctgcattaccacaccatcctattgtgattgttaacatgcctcattcacaacgtacggaaggagatttttatagcgaaaaaaaaccttattatcacaacccttcagaggttgatgaagtaatagccttacttgaaaaactaaaatacgtaaaattcaaagaaaagaaattgtcacttgtggtcctcactccctacaaagagcagatagttagcataaaaagagccatagcgagagtgaggaataccaaactttctcatttagaatattttgaaatgtttgacgatccagttcaaacaatagattcatttcaaggaaaggaggctgatatagttatagcttcattagttagaaacaacagtcgctcttacaaaaaaggccttggtatcattggtgaccatcgtagaatgaatgtattaataagcagagcaaaacacaagatattcatcatcactagcttggagtttttaagaagtcgtttccttcccggcaggactgttcagcctgaggatgacttatacttcttgaagaaaatgatatcttatattgataagaagagcacagggcaaggtgcgaccatagcatttatagatcactgcaaaaaggaggcagtttaa

SEQ ID NO: 198169 - DNA, 1755 bp, Klebsiella oxytoca
atgaaacccatctctcacactatactattaccattatacaagggtgtggctaatttgcgcattgagaaaggtgaacaatggagtgatatcgagcacattgtactttttactttactagatgaaaatcgcactttacagagattaaaagaattaaccaacctctcccaatcaatgttaatcgaaatattaattaggttgatgcgggctggttggattgagctattagaacaaaaacccgctatgtattttagtattactgatcatggtcgtggtgttgtagaaaaagaaaagcttccagctattaccaaagaaattaataaaaccgttcatttcgttatagatttgttaagtggcgaagtgcatcttgctaatacctttacccatttattgagtccagttaaatccaatcgttttttgccccctcagcaaggtgatgatgacgtagccatactaaaacctattgttacttctggcaatctccattgcgatttagatgttttatccaagttatcaatgaggcctgatgaaaatatagttggtttcaatactgaaaaatcttggctcagcaagggatggtatgcaaaactgatcgtaaccgaatatgaaatagaaggtttaccagacaaaggtgtagacaagttaaaagaaataatcttagagcagtgcatggatgctgtcattgagaataaacgccctgaatcttctatctctcacatcggaaatcatagaaaaactgcctttgatactcaccatataacggaagaaaatgtagagtttattgttggtggtaaaaatcatgaaaacttctttcacaaggttctcagagaagctgaccgttgggttataatacattcaacctttattggtcttgatcgcctgaccactcagctatcatatttagcagaagcttccaagcgaggagtcagaattgacatactctgggataaagatgaggaagacaataattcaacggaaaagctaagggaatgcagaagtcttttgaaagaaaacaaagattgcaatagaattaccattcataacttttctacaaattcacacgcaaaaatgattattgctgataatggtgcagaccactatttttctgctattgggtcatgtaattggttcctcactggattcaagtctacagaaattacggcatgtatacatgaccatggttttgtttttgattgcttacatgttatttcaaaattaacacacacacccgggaaaaaacaaagcaacttctacaatgacataattaatcttggaataagaataaagcctattaacaaaaaagaaaatggcgaaatcaaagtaagattattaagttcaaaatgccatgaagagattattcacactgctcgtgataatgcagagagtgagatttttatcgccagtaataagctcggtggagctgttgaaaaccaagtgctaatccctgctgatggggcatttagcaggaacgccataacggtgaaaatttattatgaacgattatctggcccagcatatggaacaaacgtaattgacgaaatcattaaaaaatatggtacttcaatgaacataacaagaaaaagaaacgcgcacgccaaatttctttcatgggataatgatgatgctgtcattacaagtcttaactggctttcgaaagacgctgatgatgaaaattcttacagtgagatcggagtattaataacgggttccggcaaggcgaatcttataaaaaatgaatatttaaaggcaaaaaattaa

SEQ ID NO: 198170 - DNA, 195 bp, Klebsiella oxytoca
atgattgtccctcatgtgcaaatagcggaagctatctttaatatttcggaaaacaaaaattccccgaatgaaactaatattgattggtttttctcaccgtattatcagcggttgcagaccctatcaatcagaaaaagtaaacaatggagaaacccgcacctgatattggcgaaatgcacagaggtaacgcaataa

SEQ ID NO: 198171 - DNA, 183 bp, Klebsiella oxytoca
atgctacgcccgcaaaagctcgctaaagggcctttaaaggcctttaagggtaagggagagaagtgtgggatttgggggggaatgtttgaccatctgcattggctacgtcctcacgacggagcctgttcaaaggcctatgtactgacgccccaatatggctttaccgccagcgccgattgttga

SEQ ID NO: 198172 - DNA, 1191 bp, Klebsiella oxytoca
atgaaacgatggataataagcatggcggcgttgatttcactgtggtcttcgtggggccaggcaacaataatctgtgaagaaaccgccagcggccgttcagactatgtagattactctgtgcctatcttgggcagtggaatgataatctccgccatgcgcgatctgccgataggtggcattttatttcgtcaagtgatcaaaaacccagatacatcgtggcttggattaatgttttgtggctcagatacgaatgaaatagaattcgctaacaggactctaaggtttggaccagaaggtgcactaccggcggtgatcagtgattggtcagggcacaatgtttatgataccggtgtacccggtattggtatggttctgaggttcagcgtttattctggcactacaagtgacaacaaaatatttccgtactattttgttgaaccagatgtaccatttaagccaggtggtctgtcggcaagttcaataactgtaaatcaattttcgattgagcttttattagttaaaacgggtgacatcccagcgggaacctggagcgttccgattaatttaccacccatggtgattgacgttacgttaaccggtaatgtcggtgattttactaaggattatggaccgcgtcttaatatttccggtgccgttaatattttagcgggtacctgccagaccccggatgtaaatgtccccatgggagagcatgatgtatcgggcagtacggtgaatacaaattgggtagattttaacatcagcttactgaactgccctccgatgtatggccgttatggtagtggcaacccgacgatctcaatggcaaccaaccaatggcttgtcaccggaagtatcgaaggtcctccggatcaacccaatactctggggctttcattaaatccggtcagcggttatgaaacccttgcttccggtggccaatgcgcaaagctgacgccgggcactgacacagcaagcggggcctgccttgaaattcaaaatgcaacgggtaccaatgtgctgaccaattcattcacgaataccgtgaccgatagcggtttgacgttacttgccagcgccgcaagctaccagattccattaaaagcgcgctacggactcattgcaggtagttcgacaatgacggctggcaaggctgattcagctattgagttcaccattaattatcagtga

SEQ ID NO: 198173 - DNA, 171 bp, Klebsiella oxytoca
atggaagcagggaggagtcaggaagtgagttgctggcatcacgttctcatacgctttgccagcttattcttgaacgtaaagagaaacgccagcatcccccgtcacgctttagtgtcggaccataaaaatgaagataatttttcacagcaaatggccgtcagtggatggtaa

SEQ ID NO: 198174 - DNA, 522 bp, Klebsiella oxytoca
gtgcgtagatccagaacatcatcgcttaaagggaaaggattagggtcaatcccgaacacgatacctatcagcgaaaggccacctgaggccgctgacagagccattcctggtcactgggaaggtgacttgattcagggctcgaaaaactcctatatcatcacccttgtaaaacgtcattcccgttttgttatgctggcgaagatcagagacaacaagaccataacggttaaatctgcactcatcagacaagcccgggaattacctgctgagctctataaaacattaacttgggatcgtggcgctgaaatgaccagccacacacgatttattgtagcagcagacattcagatttatttttgtgatcctcaatctccctggcaacgtggctcaaatgaaaatacgaacagattgctcagacaatattttccaaaaggaactgacttatcggttcacggccagcaaagacttaacagtgttgccagacaactcaacgaaaggccgagaaaaacgctagactattaa

SEQ ID NO: 198175 - DNA, 228 bp, Klebsiella oxytoca
atgcaccgtagtgatgttgctcacgaacttgctctgaccgaacgtcagacacagcgtctgatgaaccgctttatgactcaggtgtcgctgacttggcaaaccttcgacgtggacgcctcggtagccgggttactctcattcgcattgatagcgataatttttattaccccttcaatatactgcgcagtattgctgggggttatcttttcggctgagaagatccgttaa

SEQ ID NO: 198176 - DNA, 570 bp, Klebsiella oxytoca; identical to SEQ ID NO: 159567

SEQ ID NO: 198177 - DNA, 1077 bp, Klebsiella oxytoca
atgtccactaccaaacgccgcgcattgatcctcatctcttcgacccgacagctgccgctggccgaaccggacgacgtcaaatcgatctcaaccgggttcttcctggtcgagatggctcaagtgctcaaggagttcgagaacgattacgagttcaccttcgccacccccgacggcaacgccccgcaactcgacatcaatggcatggccctgtccatgcaagccatcgagaagaccggcattattaccgttcctctgcgcatgcagcagtgtcgccgctcattcgacgtcaaccgcttccgtcagcgccaccccgggctggtcgcccgccgcgagcaggaagtccagttgctggagcggcacatcggccggctcccggtctccgaactattgcccaacagcgaacccgagcttaccgagtatcgccccgaactgctccgccgcctggacaagctgcctgagggagtcttccactcgctgcaggacctcgtcctgcgccaccgcgacccggccgatccgttcactttcgccgacttcgacttcatccacgcgctaggcggtcacgccccaatggtcgacttccgtgacaacccgtggctcggcgaagccctccacctggcccgggagaacggcgtcatcatctcgctgatctgccacgcgcccgtagcggtgacctccacccgtcaacgcatcgatgctcagggtcacccctacctcatcagcgacaaccctttcctcgccgccgccatctctacggtcccgacgattggcgagctgttcgcgctgcggttcctctacccgcgcgtcccggggaggaagacacgactttcctacttcgtcgacaaggccatcaaggaagccggcttcaaactcgcgacctccctggacatggctgccccgctgctggcctacgaaccgtccgtgcggctgctcaccggcaacggcccacaggccatcgatcagcaggcagccaggctgcgcagcgtcctcaccagcacccgaactgctcagcgcggcagcggaaatcagttgagaaaacaagccgtgaccgtccacgccaccggccacacacaacggtaa

SEQ ID NO: 198178 - DNA, 822 bp, Klebsiella oxytoca
atgtctgaaaaaatctggttcatcacgggttcctcgcgcggcttcggccgtcagttcacagaggctgccctgcagcgcggcgacaaggtcgcggccaccgcccgcaacaccagggggctggccgacctggtcgagcggttcggtgacgcggtactgccgctgcaactggacgtcaccgaccgcacccaggtgttcgaagcggtcgcggcggccagagagcggttcggccggctggacgtggtggtcaacaacgccggttactccctgatcggcgccgtggaggatctcggcgagcaggaactgcgcgaccaactggagaccaacgtcttcggcgtcctccatgtcgtccaggcggtactgcccgtcctgcgggagcagcgtagcggccacatcgttcagatctcctcggccatgggggttgccaccttcggcggcaccggtggctactgcgcctccaagtgggcgctggaagggatgagcgaggtcctctcccaggaagtcgcgccgttcggcatcaaggtcacgatgattgaacccggcgccttcgcaaccgacttcgcgagctcggcggtcttcaccgcgcatggtcaggacgcctacgggcccctgtacgcgtcgctggccgagatgggtgcctcctcccaggcgcccggccccgagggggtcggtggcgcaatcctccagatcgtcgacgccgaggagccgccgctgcgcgtgttcttcggcgaacagcccacccagtggatccccgcggtgtaccagcagcgcctggagacctgggcccagtgggcacacgtctccagagccgcagaaggcaagtag

SEQ ID NO: 198179 - DNA, 819 bp, Klebsiella oxytoca
atgagcaaagtttggtttatcactggcacctcgaaaggctttggccgcgagttcgccctcgccgccctcgagcgtggcgacaaggtcgcagcgaccgcccgcaacacggacactctgagtgacctggtcaagcagtacggcgacgccgtcctccctatcaaactcgatgtcaccgaccgcgaccaggtgtttgctgccgtgaagtccgcacacgagacgttcgggcggatcgacgtcgtcatcaacaacgccggctacgggctcttcggaacggtcgaggaaatcaccgagcagcagctgcgcgaccagatggagacgaacctgttcggcgttttccatgtcacgcaggcggtcctcccgatcctgcgcgagcagcgcgcgggccacatcatccagatctcgaccatgggcggcattatggcgtttccgacgcttggcgcctaccatgcgtcgaagtgggcgctggaagggatgacggatgcactctcccaggaggtcacaggcttcggcatcaaggtcaccctggtcgaacccggtggcttcgccaccggctggtccggtgcatctgccatcgtcgccgacgcgcaccccgcgtacgcacctctgcacgagaacatggccgcgcggcgggcacaggtcgtacttccggagccagtcggcttcaggtccgcgatcctcacggtcgtggacgctgagaagccgccgctgcgcgtgttcttcggggagggaccgacatttatggcaccgcaggtctaccagcagcgcctgaccgagtgggcccagtgggcacacgtctccagagccgcagaaggtaagtag

SEQ ID NO: 198180 - DNA, 345 bp, Klebsiella oxytoca
atgtctacctgtgacctgacacttattagccacccactatgtccctttgtgcagcgttcagcgatcgtgcttcttgagaaaaatgtgccatttgaacgcgtaaatgtagatttatcggcaaagcctgactggtttcttgctctgtcacccactggcaaggtgccgatgctgaaagtgcgtcagtcaaagggtgaagatgccattattttcgagagcatggtgatctgcgagtaccttaatgaaacgcaagacggtgattcgatgtatgctgacgatgcattagtaagagccagacagcgcgcatggatcgaattctctacatcaatgcttggaaatgcatggtaa

SEQ ID NO: 198181 - DNA, 747 bp, Klebsiella oxytoca
atggctagattacaaggtaaacgcgcactgatcacgggtggaacaagtggtattggtcttgaaacagcgaagctgtttgttgcagaaggtgcacgcgtaattgttacgggtgttaaccctgattctgtcgcaaaggcaaaagtagaactgggtaatgacgtgttagtcgtgagtgctgattccgctgatgtgaacgcacagaaagcgctggctcagacagttcaggaacactttggacaactggatatcgctttcctgaatgcgggtatatcaatgtatatgccaattgaggtatggacagaggagcagttcgaccgcatttatgatatcaacgttaaaggtccttacttcctgatgcaggcgctgctgccagtgttcgcgagctctgcatcagtggtatttaatacctctattaatgctcacacgggacccgtgaactcttcagtttatggctccaccaaagcagcattactgaacatgtcgaaaacgctttccaacgagttactttctcgtgggatccgtatcaacgcagtgagccctggccctgttgatactccgctttacgataaggcggggatcccagtggaatatcatgatcaagtgatgaaagatatcgttgcaaccatccctgccggtcgttttggtaagcctcaggaagttgcacaagcggttctttactttgcatctgatgcgtctgcctggactgtgggttcagaaattatcatcgacggcggcgtttcaatctaa

SEQ ID NO: 198182 - DNA, 807 bp, Klebsiella oxytoca
gtgagtcgtcatgttgcaaccctcgaagagcatttgcagaccagattacttcacagaacaacccgcaagctttccctgactcctgaaggagaacgttattatttggaagcaagacgtattctggaagctgtcgaagagtcagagtcttctttcagagaaaatgttacacccacagggctattacgcgttgcctgccccacagcattggctcacacattcttagtcccgcacatccccgattttttagaacgctaccctgagctgatactcgatctacagattaatgaccgctatatcaatctcgtggatgaaggggctgagctggcaatccgcattggacacctggaggacagtgctatgcgtgcccgcagacttggcatgtttgagcgagtctgtgttgccagtaacaagtacttagctaaacacggaacccctgataccccagaggatttaaaaaaacatgattgtttgatctataccttgctgacaacaggagctacctggagatttcaggatatcaatgttcctgtttctggtcggctcagggtcaattcacccgaagcagtacagaaatttgtcaatgcagggattgggatcgcacagggcccggaatggctgttcgaggagggactgaaaagtggcaatttacaattattactgactgattacactgcatcgcccgttcccattcaggccgtttatgttgctaatcgacttttaccaaaacgggcgattgtgttcatggattttgttgctgagatttttgaaaaaaatcccggcttcaaagttcagaactcaatgaaatga

SEQ ID NO: 198183 - DNA, 495 bp, Klebsiella oxytoca
atgccgactccgacagtgactccgattccgacagcgactctgactccgacagcgactcggattcggacagcgattctgactctgacagcgattcggactctgacagcgattctgactctgacagcgattccgattctgacagtgactcggattctgacagcgattcggactctgacagcgattccgattccgacagcgattccgattccgacagtgactcggattccgacagcgattccgattccgacagcgactcggattcagacagcgatgccgactccgacagtgactccgattccgacagcgactctgactccgacagcgactcggattcggacagcgattctgactctgacagcgattctgactctgacagcgattctgactctgacagcgattccgattctgacagtgactcggattctgacagcgatgccgattcggatagcgactcggatatcccgcaagccaacgcggataccaataccgctctga

SEQ ID NO: 198184 - DNA, 144 bp, Klebsiella oxytoca
atggatgagagtccgacggagagaggctggtcaggcgaaattgcttgcgctgctaatcattgcggtgcgacatactttatgacaattatttgtagcggaaaagttcagaaaatggtgggcatgcgcggcatgccctggagatga

SEQ ID NO: 198185 - DNA, 1479 bp, Klebsiella oxytoca
atgaattttatcggagtggatatcggtggtacggtcaccaaagccgggatatatactgagtgcgggcaggagatccacgtggcttcgcaatatgctcaggtattatccgaacagccgggttttaccgagcggaacatgcatgagctatgggataccgtttgcagcgtaataaaaaaagcgctgtttgaaagccaggtgccagcgttaagtattggcgggatcggcttctcctcgcacggcaaagggctgtacgcgattgataaaaaaggcgagccggtgcgcaacggaattatctcatccgatacccgggcgctggcgttcgtcaaaaaatggtaccgcgaaggggtcgataaactggcctatcccaaagggctgcagcagttgtggaccgggcacccggtatcgctgctggcgtggttaaaagcacatgagcccgccaactacgacagaatcgacgccgttttaatggtgcacgactacattcgctttcgtctgaccggcgaggcgacggcggaaattaccaatatttccggcagcaatttttataaccagctttcctcccgctacgaccgcgacatgatggcgcttttcggcattgaggaagtggcggataagaccgcgccggtggtcaactcgacggactgcgtgggccacattaccctgcaggcctcgctggactgcggattatgtcccggaacgccggtgttcggcggctttttcgacgtggtggcctccgccgtctcatcgggcattgaccgggcggataccctgagcgcagtggccggtacatggagtatcgccacctcggtgacggacagcattattgccagcgactatccctacatttggggaaaatactgcattccgggcaaatattttgttcatgagggcagccccacttcggcgagcaatctctcctggtttgtgaaacagtttttccctgacgatgaccgctgctacgaccatttcgaaagctggattgcgcaagagaccgacagcaacctgatttttttaccttatctgttcggttccaatctggcgatggatctgccgggtgcgctggtaggtctggcgggacatcatacgaaaaaggatattattgcggccatctaccgcgggatcgttttttctcacctgatacatcaggaccgcattattgaactcaatcggggtattgaaaaaattcgctttaccggcgggccgagccagtcgagaggctggacccagatgtacgccgacgcggccaatcttcctctggaagtcgtggacatcgaacaggcgggatgtcgagccgccgcgctgtgcgcagccgccggcagcggagcctacgccaacttcagcgaagcgatagcggccacgcagcccgaggtggtcagttatcaaccggacggcaagcggcatcagcagctgcgcgaaggttatgcccgttacgtagaggtcgcgcaaagcctctccagggcaacgggggcggcgcaatga

SEQ ID NO: 198186 - DNA, 1119 bp, Klebsiella oxytoca
ttgatttctgaaaagaagggccggaatccaaaacttgatgataagctgggtaacacattgattgtcatagattttttttgtggttgtggtggagctagcgaagggctgcgtcaagctggttttgacgttgagctaggtattgacatcgacgcacaagcctctgagacctataaagccaatttccccgatgctactttcatttttgatgatataagaaatgtaagtgttgaaaaagtggcaaattctattgcattcaaaagtgcaaatggtttacttctcagcgcatgtgctccgtgtcagccattttcgcaacaaaataaatataaaaatgaggatgatgaaagaatctctctacttgatgaaactcatcgctttgtatcaaaactcttaccagaatatattatgcttgaaaatgttccgggaatccaaaagattgatggaagcaaagaaagtccatttacaagatttatttcattgctagatagcttggattataaatatgtttattttgtagctaatgctgaaaagtatggagttccgcaacgaagaaagcgctttgtattgttggccagtttactagggccgattacaatacctgaacaaacacatgatactgataattcaccagtaaaaacggtaagagattttattgaagaatatcctaagcttgaagccggtgaagttgataaaaatgatgagttacatcgtgcagctgaactgacagaacttaacctaaaaagaataaaaaatacgcctgaaggtggcgaccgtagaaactggcccttggagttaattaatgagtgtcataaaagttatacaggtcatactgatacctacggtcgaatgtcatgggataaacctgcaccaacattaactactaaatgcaatagttattcaaatggtagatttggtcatccagatgtttcacaacatagagctataagcattagagaggcatcaagattacaaacttttccggctgattacatttttaaaggtgcattcaatgctatggctaaacaaattggcaatgctgtaccttgtgagctagctcgtcaatttggactccatttccttaaacattacgaggtttttaaaaaggggaagaaaaatggctaa

SEQ ID NO: 198187 - DNA, 423 bp, Klebsiella oxytoca
atgatcctttttgtcactcccgcatctgagccagcactgtcaaccgcaccacttttcacagagcgctgtccggcaggttttccgtcaccggccgcagactataccgaagacgaactggatctgaatgcctactgtatccgtcgccccagcgcgacctattttgtccgggccattggcgactcgatgaaagatatgggcctgcactccggcgatttaatggttgtcgacaaagctgaaaaacccatgcagggggatattgttatcgcggaaacagatggcgagttcaccgttaaacgcctgcagcttaagccccgtattgccctgctgccgatgaatcccgcctaccccaccctctatccggaagaactgcagatattcggcgtggtgatggcattcatacataagacgcggggtagcaactaa

SEQ ID NO: 198188 - DNA, 672 bp, Klebsiella oxytoca
atgtgcggtcggtttacgcaatacaactcccgcgaggagtacctttcctttctcggagaagaagcagaacgggacatctcgtatgatccggaacccatcggccgctacaacgttgcccccgggacacgggtattgctgctgagtgaacgccgctcacagctgcatcttgatcccgttcactggggttatgccccggagtggtggaacaagcccgcgctcatcaacgccagaagtgaaactgcggccaacagccggatgttcaggccactctgggagcacggacgggccatcgtctttgccgacggctggttcgagtggaaacagcaaaacggcgtgaaacagccgtttttcatttaccgtaaggacggaaatccactcctgctcgcagccatcgggaaaccaccttttgagaacggcaatgaccaggaagggttcctgatcgtcacggcagctgcggatgagggactgctggacattcacgatcggcgaccgctcgtgtactcaccggctgccgcacgtaaatggctcagcgaaaacacaaccggtaaagaggcggaagacattgcccgtgagggcagtctttcggccgaagatttcacatggcaccccgtcagccgggctgttggcaacccccggaaccagggccgggaacttatagagccgctggcttag

SEQ ID NO: 198189 - DNA, 678 bp, Klebsiella oxytoca
atgtcccgatttatccagggtaattgcgtccatatcatgtccggatttccggataatgctgtcgatttcattctgaccgacccgccatatctcgtcggttttcgtgaccgccaggggcgtaccatcgccggcgataaaaccgatgaatggctgcaacccgcctgccatgagatgtatcgcgtgctgaaaaaagacgcgcttctgattagtttttacggatggaaccgcgtcgatcgctttatggccgcctggaaaaacgcgggattcagcgttgtcggccacctggtgtttaccaaaacctacacatcgaaggccgcatatgtgggctatcgccacgaatgcgcctacatccttgcaaaaggccgtccacgtctgccacaaaacccgctgccggacgtgctgggctggaaatacagcggcaaccggcaccacccgacagaaaaacccgtaaccagcctgcaaccgctgatcgagtccttcacacatcccggcgcgattgtgctcgacccttttgccggcagtggttctacctgcgtggccgcgctccaggctggccgtcgctacatcggtattgaactgctggatcagtatcaccgggccggacagcaacgtctggccgccgtccggcgcgccatgcagtacccggccgctaacgacgagttcccggaggccgcgtaa

SEQ ID NO: 198190 - DNA, 420 bp, Klebsiella oxytoca
atgtacggaacctgtgaaaccctgtgccggttgttaggtgagctgtatcccgcagaaaccccgctgaacctgattatctggtccccggcggatatcgaagcgctggccgacggaatggaatatgccgtttcggagcaggacacaagggtggtactggcgcgtatggacgccattccggaggaacaacggcttgagtcgggcgtgtctgccggtgcggtgatggatctgattgaacaggtgaaagaggccgcgtcgggagtggtggtaccggtggaactgcttgaaaccctgctgatcactgccgaacaggcgttatggcacagggaatggaccgcccgggatgagaaccatccggtgccggaaagcattacccgtcgcctggctgatgcggcgaaagttcgcgccttactgaaaaaatga

SEQ ID NO: 198191 - DNA, 507 bp, Klebsiella oxytoca
atgagcactacgaccaccacaccggctgtttacgtgggcacctggcataaatacaactgcggcagcattttcggcaaatggtttgatctgacggagtttgacggcagggaggatttttacgaggcctgtcaggcactgcatgccgatgaatgggatgccgagtttatgttccaggaccaggaaggtatcccgtcacagttcgtctctgaaagctccattgactgggattttatcgccgcttacaaacgcgccgaagaagagagcagggaagccgcttttatcgcctgggcggagtataccggcgagtgtgactatgacgcgtttgatgatgcgtaccgcggcgaggcggaaagtgaggaggactatgcgcgggagatggctgaggacaacggcctgttaaatgaggtgccggagccgttgcgcagctatttcgattttgaagcctgggcgcgtgacctgttcagcagcggctatgtgttccatgacggttatgtcttcagcaactga

SEQ ID NO: 198192 - DNA, 192 bp, Klebsiella oxytoca
atgaaacttgcaccacaaagccgtgagatcctgcgacagtacaaagccctgattaatgcccgccgacgtgatgccggtcagcgggaactgaccaccgcgcaggtgatggatgaaatttgttactacatgacgtgtcagtgtgccgtgtacatcggcggtcatttcatcttacagggtggaaaaggccagtaa

SEQ ID NO: 198193 - DNA, 1635 bp, Klebsiella oxytoca
atggacatcagcacgcttatttcctcatcccggcacattcaactgtcggcggaggagaccaagatcccctgggacgaaccggccttcagccagcgtatgctggcgaaccatttgtcgcaggaccacgactgggccagccgcaggcaggacgtcattgagcagcaggtcgaatggattgccagccagttaccccctggcgcacgcatcctcgatctcggctgcggccccggcttttatacccagcgcctggcggagcgcggatttcactgcaccggggtggatttctcaccggcatccgtgaactgggcccgtcagcaggcgcagaatgccggtttgaatatcgactatgtccagcaggatatccgcgcatactggccggataaatcgttcgatttcatcatgatgacgttcggggagctgaacgtgtttagcgcggcggatgcgcactcactcgtcagccgctgcgcgctgtggctggagccggggggaaggctgctcactgaagtccatactttcgacgaagttagacgtcagggaatggctgaaccgagctggcaacgctgcccggacgggctgtttctgagcgtccctcacctgctgctgacggaacatggctgggatgaagaagcgcagaccagctcaacgcagttctgggccatagaagcaaatggtcacactacccgtttcggcagccagatgacggcctggcgcgatgaagagtacgtcagcctgctcggtaatgtcggttttatcctgcttcctcctcctgaaagccacgactggccagtcagcgagacatttgaagggaagctgtttgctctgctggccgaaaaagcaaaaacctcagaggaacttcctcttaatactcaacgcaataaaaggaattccacattggatatcccacgtatttttaccattagtgaaagtgaacaccgtatccacaacccgttcaccgaagagaagtacgccactcttggccgtgtgctgcgcatgaaaccggatacccgcattctggacctcggcagcggctcgggcgaaatgctgtgcacctgggcacgagactacggtattaccggtaccggcatcgacatgagcccgctctttacctcaaaggcaaagcagcgtgctgaagaactaggggtcagcgaacgcgtccattttatgcataacgacgcggcaggttacgtttcagatgtaaaatgtgacgtagcggcatgtgtcggcgcaacctggattggcggcggggtctccgggacaattgcactcctggaaaaaagtcttaggcctgggggaatagtgctcattggcgaaccttactggcttaagtggcccacggacgaaatagcccgaggatgcggagccacttctgtgaatgattttctcactcttcccgggctgatcggccactttgatacgctaggctacgatgtaattgaaatggtgctggcggaccaggaaggatgggatcgttatatcgccgcaacctggctgacaatgcggcgttggctggtaaataattctcatgatgaacttgcatcttacgtgagaactgaactcaccgcatcgcccaaacgccatgtttcttgcacaagggactatcttggctggggcgtcttcgcactcatggccagataa

SEQ ID NO: 198194 - DNA, 258 bp, Klebsiella oxytoca
atgaatttatcccgtcaggaacaacgtaccttacacgttctcgccaaaggtggccgtattgcgcacgtccgcgatgcgtctggccgcgttatcgccgttgaatgctacacccgcgaagggctgttgctcaccgactgcacccttgccaccttcaaaaaactcaaaaccaaaaaactgatcaagtccgtcaacggtcagccgtaccgcatcaacaccaccgggctgaataacgtacgcgcgcagcttgataaccgctaa

SEQ ID NO: 198195 - DNA, 717 bp, Klebsiella oxytoca
atgtctgtatctgtcggtatattagcgggcatgggccctcgttcaactgcaccatttatcgaacaacttataaatgcatgtcaggaattgtatggtgctaaatatgatattgagttcccccacatgcacattatctcactccccacgcctttctggcccggcaggaaaatcgacgaacaggaaatgatgaatgcgcttcgttcaggtattgtctcgttaaaaaatgccggggttagtctgatcgccgttccctgtaatctcgcacacagattttttattgaaatgcaggaagtctgtatgggtatacctctgatacacattgctgatggtgcagtaacttcattacccgaccggatgcaaagggtggcgcttatcgcaaccgagcccacgctggatgccggattttatcaggcacgtctgcaggaaagtggaaaacaggttatttgcacaccggagatgagtcttttaaccacagccctgatcgctgcaattaaagaaaagggatacgcggatattcaggttcatacactctggactactctggtttcgcttgcagaagctgcggatgctgatgctgtgcttattgcctgtactgatataagcccacttgcagcaaactattccggttctgttttcatgattgatactgcaaaaagtctggcttatgaaacaatccgcaactatatgcagctaaaaagaatttccggtattgtctaa

SEQ ID NO: 198196 - DNA, 897 bp, Klebsiella oxytoca
gtgaacctgtacatacgtcagagcattttaatcggaatgagtttccttctttttatgaccgttaatgccagccatgcgcgtgctcctgtaatagatgaaaaattaaatcatgagttaactattcttgaaaagaattctggtggccgtctgggtgttgcgttgattaatacggaaaataacgatcttacgttgtatcgtgcagatgaacgatttgctatgtgcagtacaagtaaggtcgtggctgtctctgcgttacttaaaaaaagtgagtctgacaaaacgattctgggaaagaatattgcattgcatgaagcagaactcgtaacgtggagcccagtcaccgaaaaaaatatcactaccgggatgacgctgggtgcactaagtgctgcgactttgcagtatagtgataataccgccatgaattccatcctcaattatcttggtggcccgtcggcagtaaccgcttttgcccgctcaattggcgatgagaaatttcgacaggaccgaacagaacctgaattaaatactgcaatccctggtgatgaacgtgatacttcaacaccgcttgcgatggccacgactcttcagaaactcacgctgggagatgcccttgctacaccgcagcggcaacaactggttgaatggctaaagggtaatacaaccggcgctgccagtattaaagctggcttgccagaaggctggatagtcggagataagaccggaagtggtgattatggaacgacaaatgatatagccgtgatttggcctcccgagaagtcaccgctaatattggttatctttttcacacagccattacaggatgcacagtcacgtaaggatattctggctgaagcaactaaaattgttgtttctccttttgttggagctgagaagtga

SEQ ID NO: 198197 - DNA, 378 bp, Klebsiella oxytoca
atgttatccttggtgctacagtcgtcagattcctgggttctcagtggttcactctgcgggtggggtgatgtatttgtacatcgtttcacactgattgtatggttaagagtaaaccatgacatcaggatgaaacggcttctggcaagagaaactgctcgctatggtgatgcgatcctcaatggtggggaatatgaagagatgcataaagcgtttatgtattgggcaggaggatacgatttttcagaagatatcagccggaatgcatccagacataataactggttaaaagatattgaatgtccagtaaaggttgtcttcaatgagggtacactggatgaaactgtcaaccttatcattgatgaacttaaaataggatga

SEQ ID NO: 198198 - DNA, 558 bp, Klebsiella oxytoca
atgataaatattcatactgaccgattacttatcagagatcacattgaggaagatttacactcgcacttcaagctcttgactgatcaggaagtgatgttttatttaccagccattcgttgcacaactttagatgatgccagaaagcatcttaatctttgcatcagttattcgtcccagcccctccggaaatattatttcttacgaatagaggatcgtttaaccggaaagcatattggtgaggcaggatttacagtactggagaaaactggtacggcgggttactttataaataaaaaacactgggggaagggatatgccagtgaagcactaggtgcacttattcattttgctttcatggctctctctctggaaatgatggtgtgtggatgtgtcaaacaaaacacccgttcagaaaaagtaatgatgaacaatagaatggaattacataaagactatgtaacagaccacggtatagcacgactggaatatatgatatcaattgaaaagtggaaaaggtcccagtctacatctgaaaaatatttttatacgaccaactga

SEQ ID NO: 198199 - DNA, 558 bp, Klebsiella oxytoca
atgacagtacgtggcgtcaataaagtcatcatcgtgggtaatctgggccaggacccggaaattcgttacatcccaaatggcagcgcagtagccaatctcagcctcgctacctctgagtcctggcgcgataagcagaccggagagatgcgggaaaacacggaatggcatcgcgtggtgttgttcggcaagctcgcggaagtggcgggcgagtacctgcgcaaaggctcacaggtttttatcgagggccagcttcgcacccgaaactggcaggacgacagcggcgtaacgcgctatgtcactgaaatcgtcgtcggacagaacggcaccatgcagatgctgggtggtcgtcgtgacggcggtcagtctcagagcatgcctccacagcagcccgcacaaccgcagaatcctgccgctccggcacaacctgctggctcccctgaaaaatccccgaaacagaagggtggcagaaaaccccgtcagagtaccgcgccgtctcagcaggcaccgcagccgttaccgcacgattatccgccgatggatgatgatgccccgttctaa

SEQ ID NO: 198200 - DNA, 243 bp, Klebsiella oxytoca
atgaccagcaacgttataccgccccttcagtcactgccagatggcacattcacccgcgaacaggctaaagcggtcgcagagcagtatcagaatgtcgcgattgaagacgatcagggaacgcactttcgcctggtggttcgtcagaacggcgaaatggtgtggcgggtatggaattttgagccgggtggtgagtacctgatgaaccgttatatccgggactacggcatccgtaaacagcagtaa

SEQ ID NO: 198201 - DNA, 1998 bp, Klebsiella oxytoca
atgtcagtaaccgagtctaaagcaaaaacccccgcgaaaaccagcaaaaaagcagtcaaacctgctgaagccgcagcccttaaggcggcgcttgaggccgctcagattgaaatggtgccgctgtcggcgctggtcaaatccccgctgaacgtccgtaccatcccgtatccggtggagagcgtacgcgacctggctgacaccattcttgctatcggcctgatccagaatcttgtggtccactcgttgccgggtggcctgtcaggcgtggcggcaggtggtcgtcgtctcgcagccctgcaactgctgctgagtgaaaagcgcatcgatgccgggtatatggtcatcgtcaagcgcgtcagtgacgaactggcggtggtggcctcgatggtggagaacaaccagcgagtggcaatgcatccggcagagcagatcagcgggttccgcacgttgtctgagcaggggaagactccggcgcagattggtgaccagctggggtatagctcgcgtcacgtccagcggatgctgaaactggcgaaccttgcaccggaacttatcgccctgctggcagagaacaagctcgacgtggagcagtgtcaggcgctgagtctggagaacgatcccgttcgtcaggtagagatttaccagcgcgtgaaggcgcagcacagctatgcccctgcgcacatgcttaaacgcgctgtcactgataccgaaatcagcgtgaaccactcacgcttcgtgtttatcgggcgtgagatgtatgagtctgcaggtggcgtggtacgtgaggatttgttcagcgcccaggagggtgacggtacggcagacggtgtgctggttgagcgactggtgcaggagaagctggagtccgccgcactggcaatcgaactgcaggaagggtggtcatggtcactggcccgggagggagcggtcagaaactacggtgacgaccgcgaacattatctgctgttaccagagccggaagcacagtacaccactgacgagcagcaacgtcttgatgaactgtatgccactcaggaggccacggaaacgtttgaagatgaagccgcgattcaggtgctgattgacgaaattgaatatgcggcatcgagccgggcgtggacaccggagcagaaatcagcctgtggcgtagtggtcagcctgtatgacggtgagctttgtgtccagcgaggggtgcagaagaagcctcagaacgagacgaaagaagggcagggagagaatggcagtagcggctccctccatgtggtcagcagcaagccggatgtgacggaggggatcagcgccccgctgctcaaaaagatgtcttcagaaagaacgctggcagtacaggccgccctggtacagcagcccgaaaaagcggtggccctgatggtatggcgactgtgcagttgtgttttcgattactgcaataccacccgtcatccgttcgtgatgcgtcttgaggtgcatcacagtgggctgaccagcgaagcgccgaccggaaagagtggtcaggcatggctgagtctgatgcaggagaaagcccgtctggaggcgctgttgccggagggctggaagaaggatttcaccaccttctttacgctcgacggacagactttgatgagtctgatggtgttctgcacggcctgttcggtggacggggtgcagacccggacaatggggcataccacacagagcgacctcgatggcgtggaaacggcgctcgggttccaccttcgcgactggtggcagccaacggcagaaaacttcctcggtctgctcagtaagaaccagattgtggaggcgctgaaagatgccggactgtcaggcgctgcgtcagatgccgggaacatgaagaagggagatgccgccagccatgctgaacaatggctctccggtacgcgctgggttcctgcctggatgcggtcacctgatgcgcaacctgacgtcgctgagggtgaggcgacagactctgatgaccatacggcacacgcagcctga

SEQ ID NO: 198202 - DNA, 432 bp, Klebsiella oxytoca
atgcgaaacattattactcccgacgtactgaaaaccatgatcccccaggaatttgaagactggcgcgaagcgggtgaagatttgcgccgcgaactgacccatgcagtcatgcgcgatctgacctgcccggctgactgggacatgaatggtgaataccggagtgagttcggtggcttttttcctgtacaggttcgcttcacgccgtcacacggcaacttccatatcgccgtatgcagtcccggcgacatcaccccgtcatggatggtggtgtttattcctgccagcggtcgcccgttttctgttatcagcaccctgcctgcctggtcgccggaggttatttctcacacactcagcctgacagcgcgcctcgatgccgatggctacagtcaggccagcattatcagtgttctggcgatggagggcgcacaatga

SEQ ID NO: 198203 - DNA, 729 bp, Klebsiella oxytoca
atgatcccggcgaatttgtcactgatacccctgagtcatgagcgtcgtgctgcaatgcaggccatcgcggaggtggagaagaaatatgagcgtggcgttcatattgctgagtttgcctatgcccatgccttcttccgcatcctgaacggcagcaaacgtgtcaccgtaaaagatattggctggttttctccggggatgacagcacagaacctgcgggggaaaaagcaggactggctggcagcgattgatcggctgattgaaagccgtggcgcatgttgctggttacccctgtcggtgtcggacggctggcgactgttcccggaaacgaagtttcagatgtcagagcgtcgtcgcaggcaaaatgaactgtgcgctgaaaaatacacccgccagcgccggaaagaggcgtgccagcgggaatccgcgtaccaggcgctggcgggacaggcggaaatagacctggcttttcataccccggaaacagtcagcagctggagcgcacgctggtcgggtactgaactgcgccagtgcgatcttgaggacatgttctggcgctggagcgagcgttttccgtcacttgagccaatggagcgctggatgatggcgaaccagcctttctggagtgtgatggtcgaatctgatgccctcgcaaaagaaagcccggaatctgtccggcaactggagcgctggatggtacccaacaagctgatgcatcaggaggcacgctga

SEQ ID NO: 198204 - DNA, 234 bp, Klebsiella oxytoca
atgagaaacaatccctgcaaaacagagcttaaggttgcccgaagccagcgtaaccggctacgtaccattgagaaaaaactgactgaaatgtccagtgagtgggacggactcagcggctggctggagacagaaagcgaccggctggccagagaggtcggtcagcatctgcaggcactggaagaacaacttcaggaatgggctgacgggagtggttaccgggaggatgacgaatga

SEQ ID NO: 198205 - DNA, 306 bp, Klebsiella oxytoca
atgattattgacgaaaaaagactttttttcatggcgttgcttaagggaagtgttcgtctggttgccatattagccttgctgatagtgataatcacgccaataggtatggtttatgaatattttgatttttatccacaaattttgaatgaatttgaatatcatgattatccggaaaactatttcatacgatgcttcctgactggattcatgagcctgcctttattaatgggcatctgtattgcaacgtttgtgttttttcatctcctcggttttatagttttactgctcggaggctactatgactaa

SEQ ID NO: 198206 - DNA, 222 bp, Klebsiella oxytoca; identical to SEQ ID NO: 84764

SEQ ID NO: 198207 - DNA, 375 bp, Klebsiella oxytoca; identical to SEQ ID NO: 84765

SEQ ID NO: 198208 - DNA, 348 bp, Klebsiella oxytoca
atgcacttacacctcaaagaatcctcggcccttccgggaatgcaggccaccgctgaagccgagcgggcgtactggctgagccgtgagaaagcagcggtgaaagtcccaactgaaatcgacgtacacgctttccatgatgcgttggggctgatgtacccgatgaactggcgcagcagtgagaacggtgagtgtgaaaccttcatgctggcagaaatgatctgcggaaacgtgaccgaaatttatgcacggatcggtatccgttattaccggatgcgtgactacagcaaccttgaccacgcggaaattctggcccgcgttaaggaggtatcagacaagagccagaaatga

SEQ ID NO: 198209 - DNA, 531 bp, Klebsiella oxytoca
atgcacacaattaacatcaaaaccgccactcgtgaatcagccgaacaatttaaaacagataagtttcagcgctattgtgtaacagatggtgatgaacgacttgattttatccctgcacttttttttacaccgtcagctgacaatatgatcgccagttggttacgccagcattcagattatgatggcggcttctggaattactggattattccgcagggtgtcggcggtaatgtggctcctaacagagtcatcttcactacaactcaaaccgggtatattgcacctgctggagaacaactttatgacatgtgtatcccaggtaattattttgaatcagaggtcagtgccgatgctgccggaattattgcgacattaatgataatgaactggttgtcctggcaggtggcggatatgggggcggaatatgcgaaagtatgcaaacatcttgtcgctcgccaggatgccctgaaggattatatcagccttattcaacatcccgagaggggattaatatttcgcgctattgattga

SEQ ID NO: 198210 - DNA, 306 bp, Klebsiella oxytoca; identical to SEQ ID NO: 84768

SEQ ID NO: 198211 - DNA, 216 bp, Klebsiella oxytoca
atgcgagtatgtaaggttgttaaacaagagtatactcgcgagtacactctatctaacaagctgaatttattgaaatactctaataagagtatgccctgcactctgattagagtgtcattagagtatgattatactcttcatcacggcgtttattctaaaatgctgcataaaaatatctgcaaccgcatgtttttaaagacttatcatgcaagatga

SEQ ID NO: 198212 - DNA, 387 bp, Klebsiella oxytoca; identical to SEQ ID NO: 84770

SEQ ID NO: 198213 - DNA, 264 bp, Klebsiella oxytoca; identical to SEQ ID NO: 84771

SEQ ID NO: 198214 - DNA, 129 bp, Klebsiella oxytoca
atgtttttggacatgacgacgtatgaacaactcaagctgcaggctggtaaagcacgtcggactattgctaaagaggccaggcatattattgagcagcattttgagtctgacgagaaagacaaacagtag

SEQ ID NO: 198215 - DNA, 360 bp, Klebsiella oxytoca
atgaatttttccttatcaaaaggcggcctccccgcgtctgtacaaaaccgtgcatggcagtactgccagatggcatggcgtggtgtgaccagtaaaaaagcgctgtcccgtctggctgcactgtctccgctgctgttactcggtgtgggacagatggctaatgcaaccgacctgctggccgggggcaaggatgatgtgaaagccaccttcggggccgactcattcgtcatgatgtgtatcatcatcgccgaactgattgtcggtgtggcgatgtatatccgcaccaagaacctgctgatcctgctgggactggttgtggttatcgtcttcaccaccgtcggtcttaccttcatcaactga

SEQ ID NO: 198216 - DNA, 306 bp, Klebsiella oxytoca
atggagggaaacgatttagacaaataccgtttcccgaaaaccctgtcagagcagaaccgcattattggactgccccttgatgaagctatccccgcagcggttgttttgctgtggggatttttcaccaagaaatatttattcagtctgattattgcggcagttatctggcaactgatcagggcggcgaaacgcggaaagagttcccgctggttatacaactggtgttactggtacttgcccactgaattattccgggttgtctaccgcgttattcccgattccagtttcaggaaatggataaaataa

SEQ ID NO: 198217 - DNA, 564 bp, Klebsiella oxytoca
atggaaatcagcgctcgtaattcatccaccaaaattattgccatcattattctgtcgctcacgacactggtctttattctgggctttgctgtggcctggctggctgtgactaacagatcactcatccacgagcaacgtatagtcgtcacaccgatgacctacaacgcgccttttgtggtatccgaaacgaaagccgataccgagtatttccggatgatgacgctgtccttcctggccctgcgtctcaatgtcgctcctgaaacggtcgattccaaccacgcctttctgatgacctttgtcgaacctgatgtccgggcggactttgtaaaagtcctggatgaagaggctgctcagattaaagccaatgatgtgaattccacgttctacaccacagaaatcaatgtctatcccgttgacggccgcatcgatgttcgtggcgtgctgaaaatgtggatcggcaactccaagccttccacggaaataaaaacctaccggcttcgtctgaagtataccggaggctttacccgtatcggccggttctatgaggtgaccaatgaaaaataa

SEQ ID NO: 198218 - DNA, 741 bp, Klebsiella oxytoca
atgaaaaataaccttccggcgttattgtttggtacagccatgatggtcgttgtgccccctgctgcgcaggcacagtcacctgccacgatcagcttcccacagggcggacagttccggctgagtatcagcagtaccgatcccaacatgatttttatccctggtgacaaagtcaccgccatcacagcgcccgggggcatgctggcagacaagcgactgacaacggcaggaggtgtgttgttcacctctgtggccacccgtactttcacattttttgtagaaactgcgctgggccagaccttctctgtcgtggccacgcccgtaaaaggtgaaggccgcgtctatcgactgatgagcgctgaaccgccctcacggcctgaaacccgtaaatgggaaaccgctcaggcttacgaaaagctgctgatcagccttaatcgcgccgtgctgacgggcgacatacctgacggctacggtgaagtaaaaccgctgtctgacggtattcgtctccccggtggtttttctgttactcccctgaaagcctgggcgggcgaccagctgcgtgccgatcgttatgaactgcgtaatgccaatacctggggggtcgcgctgcgggagcaggacttctggaagcccggcgttcgtgccgtgatgtttgataacaacgcacagactctgatgggcggaggaagaatgaccgtcaccgttatccgtgaaaacggggagggtgaagatggccaacgttaa

SEQ ID NO: 198219 - DNA, 1362 bp, Klebsiella oxytoca
atggccaacgttaacaaagtcgtccgccgtcgtcaggttgccctgcttatagcccttgttctggggattggtgctggcggtgccgggacatggatggtctcagagatgaacctgaagaaagcgccgcccgccaaagcgccaaaaggagaacccgcgccggatatgaccggggtggtcaatcagtcctttgataacaaagttcagcgttctgccattgcggaagcccagcggcttaataaggaaacgcagacagagattaaaaaactgcgtactgaaatggggcttgtcagtcgcgatcttaaaggcagtcaggatcgcattcgtgagctggaagaccagaaccagctactgcagacgcagcttgaggccgggaagaattttgactccctcagtgccgaacccctgccgggggcgctggcctctcaggggaaacctgtacccgctggtaatgtcccacccccgaccagcttctggccagccagtggtggacaggccccggctgcaccggtgatgacccccgttcagcgcccgggaatgatggacagtcaggagttcagtctgccggataccgggccgaaaaagccccgctttccgtggatttcttccggcagttttgctgaagccatcgtcgtggaaggggcggatgccaatgcgtccgtaactggcgataaaaataccgccccgatgcagctgcgtctcaccggcaaagttcagatgcccaacgatgaagagttcgatctgacaggttgctttgtgacactggaggcgtggggggatgtctccagtgagcgtgccatcgttcgtacccgctcaatcagctgcaagctgggtgacgaaaacatcgaccagaagattgccggtcatgtgtcctttatgggcaagaacggtatcaagggcgaagtggtcatgcgtaatggccagatcctgctgtacgcgggcggcgcgggcttcctggacgggatagggaagggcattgagaaagcctcctccactaccgtgggcgtcggcgcgactgccagcatgagcgccggcgatatcggccaggcagggctcggcggtggcgtcagttctgcagctaaaacactctccgattactacatcaaacgcgctgaacagtatcaccccgtcattccaatcggcgcgggcaatgaagtcacgcttgttttccaggacggcttccagctcgaaacactggaagaggcgcgcgcgaaagctgctgcacgtaaaaaacaaaatccaccttcttcctcatccacacctgctgccatgccgggtaacacgccggacatgctgaagcagctgcaggacttcagggtaggagacaccgtcgatccgaccactggccaggtcgtcacacagtaa

SEQ ID NO: 198220 - DNA, 225 bp, Klebsiella oxytoca
atggcagacgtactggaccagttgcaggagcaggaagacctgattcacaggctgcacattcaggcggtcagacaacagttaagcgttaaaggtgaaagccttacccggtgtgaatgttgtggaaaccgtattcaggaacggcgtcaaaaagcgttacctggtgtcaggacctgcactgagtgtcagcgggtactggaaattcgggaaagaatttatcagaggtga

SEQ ID NO: 198221 - DNA, 222 bp, Klebsiella oxytoca; identical to SEQ ID NO: 84773

SEQ ID NO: 198222 - DNA, 444 bp, Klebsiella oxytoca
atgaatgcttctttattacttttgcgtgatttcagcgacctgaccagaccggagttaattgcacggttgaagcacctgaagatccttcaggcacgggtggagtacacacatgacaatttttctcctcgtcagctaagggcctttaccctggccaccctgatgctgttcatgggctacgtgttaacggattccatccttttcagtggagtaaccggcctgataaccctcatcggtgtacagcgttattcccggctacccatgacatggcacgcacagctgaaagacggtatttcccggttcgagagtcttcgaagctcgccgcttcgtcagatgaatgaagccgatgcccattatgactggcattacgcctcttattgtctggctgctgaaattcagcttattcactcagcgctttcgcagccagccagacccttcagtgcataa

SEQ ID NO: 198223 - DNA, 600 bp, Klebsiella oxytoca; identical to SEQ ID NO: 84775

SEQ ID NO: 198224 - DNA, 2592 bp, Klebsiella oxytoca
gtgaaaaaatttctgaacgtactggaaaatctgcagaacgccttccggatgccggatggcgcgtcggagatgactcgcaatctagccagcctggattttccgcagctgaccagcgtcctgccgtaccgtgactatgaccgtgacagtgggctgtttgtgaaccgtagtacggtgggctttctgttgcgtgcagagccccttatcggcgctaacgaacagattgtgtatgtgctggaagatctcatcaaaagcaaactgccgcgtaagacgccaatatcattccacctggtgtccagcaaactgatcggtgatcagcttgacaggggcctgtctgagttccgctggcaggggaagcatgctgacaaatttaaccgtatcacccgggcgtattatcagcgcgcggcgcagcagcagttcaacagcccgaccggtctgccgctgactctgcgtgactaccgtctgtatatttcttactgcgtgaaggcgaagaagcgcacggcagctgtgatgacggaagtcgctcacaccctgaaagtccttcgctcctcactggatgcggcaaaaatttatacgcaggcggcagatgaccaggagctggccacgctggttcacgggatgctgaatgcccgacacgaccagctgtaccccgatgaggttcgtgtcggcaaatttgatgagctgcatcagcgctgtgttgaccagcgtattggtatcgatgtgcgtccggatgatgtcctcatcagtcttgccgaccgtcagggcagcgttaccgcaacgcgggccatgaacttcatgctggagaacaacccggatatgttcatgctgtggatgggcggcgataacctgtccaacctgctcagccccgatctgacaatcgccagcccgttcgttatcacgatggtgatggaggccgaagaccaggtggcgacgcaaggggaagccacgcgcaagtatctcgaccgggacaaaaaagcgaactctccctatgccaccctgtttcccggcgtggccaaacaggctaaagagtggaaggagatccgcgagcatctcaacagtaaccagacctgtattgtccgctattactataacgtcactacattctgtccggatacggatgaggatgcgcttgtctgcgaacagcaggtcattaataccttcaagaagaacggcatagatctgttttccccgacctatatgcagttccgtaactggatagcgatgatccccttcattcatgcggaagggctctgggaagatataaaaatgggcggggccacctgccgggctgagagtatccaggccgtgaatctgctgccagtggtggccgacaaccggctgtgtcagggaggattgctgacgccgtcctaccgcaaccagctggcgttcctcgatatctacggggacgggatgggtaacaccaactacaacatggcggttacaggcacctcgggggcgggaaagaccggtctggtacagcctatcctgcgtagcgtgctggactccggcggtatcgcctgggtgtttgacatgggggacggctacaaatcgttctgcgagaacgtgggggggacataccttgacggtaaatcactcaaattcaatccgtttgccaacatttccaacatcaatgagtccggagaacgcatccgtgatcagcttgcggtactggcaagcccgaacggtacgctggatgaagttcaccacagtctgctgctgcgcggggttcaggaggcctgggaagcgcacaaggaaaaagcccgtattgaccacgtagttcagaaactgacggctatccgtgaggatgagaaataccagaactcgccgggtatcaccaaccggctggatgaaattatcgaactgctcgggaagtactgctcctgggggatttacggcgaatacttcaacagcgacgagccgtcactgaccgatgacgcccgctttatcgtcctggagctgggtggcctgcaggacaagccagacctgctggttgcggtgatgttctccctcatcatctacatcgaagacaaaatgtaccgcacgccgcgcagcctgaagaagtgctgcaccatcgacgaaggctggaaactgctcaactttaaaaatgagaaggtcggtcagtttattgaaaccggctaccgtacggttcgccgccaccgtggcgcgttcatcaccataagccagaatatcaaagactttgacgccgatgatgcctccggcgcagcaaaagcggcctggggtaactctgccttcaaggtggtcctcaagcaggatgcctctgagtttaagcagtataaccagaaccgtcccaaccagttcagcgagctggagcgcagtgttataggcaagttcggtgatgccaaagaccagtggttctcctcctttatgctgcgcatcaacgatacctgcagtttccatcgtctctttgtcgatccgctcagtcgcgcgatgttcagttcaaagggtgatgatttcgaatttatccgccagtgccgggaacagaacatggatatccatgacgccgtataccagctggcacaacgtaactttcctgatgagatgcgcgaactggaagcgcttgcggaggccgcatga

SEQ ID NO: 198225 - DNA, 435 bp, Klebsiella oxytoca
atgaaaacggaaaaacaggttaacgacactcaatcaaaacccacaactgccagaaaggccctgacccaacgcgaacgccagaggcgtcgctgtctgcgcagcctgctgctggttgccgccaccatcctgtgtattaacgccgccgtcacgtcgctgctgattagctggcgtatgccagctgtggtgtcatttgatatgaaaaaaacgctggatcagttcactgaacaggccggcgctcagtcactggatgagcctcagactaaggcacttaccgaacgatttatgaccagcctcaatacggagctgcaggactggcagcgccgccatgatgcactaattctggtgacgcccgcagtggtcagcggagcggccgacatcactgatgaaattcagacaggggtggcacaccgaatggcggcggggggcggcaactga

SEQ ID NO: 198226 - DNA, 636 bp, Klebsiella oxytoca
atgaaaaaagggctgctggcgctgttgctgatttccggcgtagcacaggcaaaaaatctggggacatggggggagatgtaccccattgctgagcaggacatgctcaccaccatccagacccgcctgaaggcaatggaggccagcggtgagatggcccgggagcaggaagcattcaaacagcgtgtcattgaaaacactctacgtcctaaaccggttgaaggactgacgctggcgcaggagaacaccacgcactatatcgatccgtcgctgacggtcagcgaagatatgaaggaccatcagggacaggtgtttgcccgcaaggggcaggtgattaatccgctggatacggtgcccttcaccgacacattgtattttatcgatgcagataatccgcagcagctggcgtggatgaagaagcaaaagcccgggacgctgacgtaccgcgtcatactcgtcaacggtgatgtccgtgaagccaccagtgccctgaatacccgaatctacttcgaccaggatggctctctcagccggaagtttgaactcaaaaccattccggcccgggtgacgctggcggaagaccgccgtcgtctgcgggtggacaccttcgccctggatatgccggaggtgacaccatga

SEQ ID NO: 198227 - DNA, 996 bp, Klebsiella oxytoca
atgaagcgatatctggctgctctggggctggcgctgctgtgtctgaccgggataaccggaacggcacaggcagcctccgctgaatgtgaaggtaattttgtcaatccgatcaccgatgtctgctgggagtgcattttcccggtcaccattggcaatgtgccggtggccaaaggacgccagccggacaccgccaacccgtcgatgcccatccagttctgcccgatggggattttctggcgtgtaggactggccatcggttactgggagccgatggccctgaccgatgtgacgcgctctccgtactgcatggtgaatctggggggattcaacatcaatattggtaatgtcggcagcgggaccggcgggcaggagaaccgggccaatcccggtgcgttctaccatgtccactggtacaaatatcccctgacatactggcttaatatcatcacgtcagtgggttgcctgcagaccggcgatatggatatcgcctatctgtccgaactggatccgatgtgggacagcagttcgctcagcatgattatccagcctgaagcgatcctgttcggcaatgtgattgcacaggcggcctgtgcggcagatgccgctgcaagcctgacgcatatgccgctggacgccctgttctggtgcgccggcagtcagggaagtatgtacccgtttaacggctgggtttccaatgaattcagccccctgcagacctcattactgctcagtgaacgtatggcgttcaagctgcaccggcagggcatgatcatgaactcaatcggtgaaaacacgtcagtctgctttgaatatccgtcccccatcatgccgaaaagccgctggcgctatcacctggtcaataaatatcccgatgccgggcagtgtcatccgctgggccgcagcgtgacccgctgggaaaccggtaagaacatgcccaacgaccgtcgaaactttggctatctcttctggcgtaaacgcaactgcgtttttctctaa

SEQ ID NO: 198228 - DNA, 369 bp, Klebsiella oxytoca; identical to SEQ ID NO: 84776

SEQ ID NO: 198229 - DNA, 618 bp, Klebsiella oxytoca
gtgagcaaatcactgatttttctgcttgctctgttgaccacagggctggctcaagccacagaacacacggaaaatcgccagtttatccatgagcaacttcaactggatcgtcagcgcttcaactcactccagacccctgagttcctgaagcaggcccgtccggtggcaccgcaggagcagtcgttcctcgacgcgaaggcacagcagttccggcaatccatgcagcccggggagcgccccgttgatgcggcgctggtatttgtttcattctcgatgccacctgatgaactgaaacagcgcgtacaggacgcggcagcgctgaatataccggtggttatccgggggatggtgaacggcgacatgcgggccacggcgaatgctgtcgccgggcttgtgaaagagagtaatacaggcggcgtgcagatagacccgaccacctttcgtaaatacaacatttccgccgtcccggtactgattgtcgcctgcggtaatcagggcgataaagtagaccgtcttcagggcgatctcacactgcatcaggcattgaagcgagtggcagaagaaggtgactgcgcgcagaccgctaaaagcctgctgggcgaggaggagggcgaatga

SEQ ID NO: 198230 - DNA, 1830 bp, Klebsiella oxytoca
atgaaaaggatactccctttactggtggctacggcatcggtctttatggtgcaaccgctcctcgctaacgagcagtttaatcagggaatgcagcagggtaaggcgagcaaagggcagggtgctgatgccattcagggttttaagcctgcggaggttatccccggctacacgacctcccccgcagagagcggatattacggaggggtgacctcatcgggtgtggatatgacatcaccgggttctgccgcgatgaacagttctgaggccggaaaagccatcacagaatccatccttaataccccgccagacaacaaaccttcactggatgcgccatttattgccgaaggactggcgatgaaggacaaggcagaaactattactggcggtggatttgacggatgtgtggaccagccagccagttttaccgagatcaccacacatcagtgtctgcgagatacgaagattgaacagtactgcacgcgcaccgcgaccattgttggcgactggaaagaaacgaccgagattaaaacctacaccctgaccgctttcagctttagccgttccggaaagcagattgttttcagtgtggcggctcctgaggcgggcgtcatacacagcgcgagtctgaacgtgaccacacaaaattatctctggaactcccgcgtcagctttatgaataccacgttcaatctgacctggaataacaccattgcgctggggggcgcgacagggatgacgctgaccagcggacaggttctcagcgggacaagctgcagcgggaacggcagttgtaccggttcgctggatgacatcatttttaaagagctgaccggtggaaacacacgtttcacgctgacgctggtgatgcaggtgaaaagtcgggagtgggtgccgcgggtggagtggtcggaaagctgcccgttcagcaagtctgaaggcgcaatgaccggctctcagtgtgtggagccaggcggcgtcaggactgtcgttgtggagggaaaaacctacagtatccaccaggactgctggaaatggcaggacacgtacctcacccagaccgagacagaagggacctgtggggagtacatgaaggactcggcctgtacggtgacgcgcagccagtgtgcggataccgtggatggtttttgtgtgagccagctggtcacatactcctgtgagcgtaaaaaagaaggtaatggtcagatctgcggcggagagtttttctgtaaagacggcagctgtgcgcagggccagaccggaaccagcaatatgtttggtcaggccgtctctgctctcgccgccgttgccgcagcgggcgaagacgtggctgaactgaacggcgagaacgtccgcgcctttaccggagaagggaagtcctgcaagaaatttgcggcgggatttaacaactgctgcaaggattccggctggggccaggacgtgggattgtccagctgcagcagcgatgaaaaagcgctgggcaaggccaaagagaaaaaactgacggtctatgtcggggaatactgcagtaaaaaggtcctcggtgtctgcctcgagaaaaagcgcggctactgccagtttgattcaaaactggcccgtattgttcaggagcagggtcgtcgtgaccagctgggcgttggcttcggcagcggaaagtctccggactgtcgtggcatcacggtggatgaactgcagcgccttgattttggggtgatgaacttcagtgatttttacagcgatctcgatgccggcagtgaaattccggaagaccaggcgttgctgaaaaaagcgcaggacatcattgcagagaaaatgaaggagaacgcgccatga

SEQ ID NO: 198231 - DNA, 780 bp, Klebsiella oxytoca
atgagatgtattgccggtgcgtttgccctgatgatggcagcatcgctgcatgctgctcccgaggatgtgctggcgcccaactacgcccgggaagagggatggcagtggtacaaccctaatgcggaagagaccgagcccgaaccggcgccgcagccgacactacgggaacgcctggccagcatgacgccatcagagcagaaaaaggtgctccagcaggcaacccgtgaagcgctggataccgccatcctgtatccatcagcggagaatttccgccgctttatgacactgcagaacttctggactgaccgggcaacggacttcacccagacggcgaaactggcccggctgaagtatccggagctggattacaacgtgaagcgctcccattacaacggcacggtggaagcccgtctgacggaagagaagaaggtccagaatgcggttatcagccaggtggcacagcgttatggcctgttcttcttctaccggggtaataacgccgtcgacaatctgatggccggggtgattcgggctttctgcgaagaccggggcatcacgctaatggccgtcagcgtggacggtaaactcagcgaccagctaccgcaaagtcgccctgacagcggacaggctgaaaaaatgcgtgtcacccacttcccggccacgtttctggtcgacccgaaaactcaccagtggcaaccccttgcatgggggtttatgagccacgacgacctggacaggcagatggtcagcgtgctgacccactttgcgccggattactga

SEQ ID NO: 198232 - DNA, 612 bp, Klebsiella oxytoca
atgcttgttactgtattacggaccgccatcctgatggcggcgatactgtccggctgcctgcacgccgggacactggatgatatccgtgcgctggaagccggaaaaacgggccggagcgcacccgcgatggattcgctcagtctgccagataacagggcgacaacaaccacagaccgtgctgttcagaatacgtcacctgtctggtatccgttgagcgatggcaggaaagttaacctgcaggactggaaggtggtgctgttcatgcagtcgacctgccagtactgccgccagtttgcgccagtcctgaaagccttttctcagcagaccggtcttgacgtgttccccgtcagtcttgacgggaagggcgatgccgaattccccgatgttctgccggcaacgccggatgtgatggtggaatatttccagagtggcctgccggtggccacgccaaccacctttctgaccaacgtcaacacgatggaaacctggccgctgctgcagggtgccgcagaggctggagaattccgcacccgcctcgatgaagtactccggatggcgctggatcgccaggctgggaaacctcttacatcaccttctcagggacaacgatga

SEQ ID NO: 198233 - DNA, 1365 bp, Klebsiella oxytoca
atgatgcgactgaaaccgctctgcctggcctttgcgctaggtctgtacagtgcaggcacggcgcaggccgcgctgcaggatgacatgaactcattctttaatgacatgagctatgccagcaacactacctcggcaaaggcctggcaggggcaggctgcacgctatgtctccggaggctcgttctacgcgcgcaccggcaacaagaatattcagctggtttccatcagtctgccgtccatcaacgccgggtgcggcgggattgacgtgtatctgggggcgttctcctttattaactccgaccagattatggcgtttgtgaaacagacgatggccaacgcggccgggtattttttcgacctcgcgctggaaactaccgtgcctgagctgaaagcagcaaaagactttctgcagaagatggccgctgatattaaccggttcaatatgtccagctgtcaggcggcaaaggcgatggtcgacagcgtggcctcaatgtggggcgagagccagcagaacgtctgccagtctgttggcgggcaaaccagcgtgttctcggactgggtggcttcccgtcagggctgtacctccggaggcaaatacggctccgtcgctgacaaggccaccggtgcggaaaaggaccaggtactgaaggatatcaacctgatgtgggatgcgctcggcaacagctcgctcagcagcaacgctgagctgcgtcagttcgccatgagcatcagtggttcggtgattttcggcagtaacggcgaattgcgggttctgtcttcaatggcatcggaccgcagcctgctgacagcgatgatgagtggggggacggcaaaggtatacgtctgcgataaccagaataaatgcctgtccccgaccctgaataacgtgacgatttccgcagacaaatcccttattaagatggtgcaggacatgctgaccagcatcgagaacaaggccatcaccgacacaccgctgacggaaaaagagaagcagttcatcaacagtacctccatccccatcctctcctggattgtcgaccagtcgtcactgagcgtctcgcagtccctgttcgcccagctgacggattacattgcggtcgatatctatctgcagtatctggaagccgtaatgaaggtggttaacggatcgcttgccaccaaagattatccgggcgccaacatgaaagagctgaaaagcgggctggccgaagcgcgccaggcgcttaactcactgcgtatggaagtgcagattaaagaagatgccctgatatccgcgcagcagcaaatccgctttatccgccagcaggtctcctcaaagatgagcgatcgtgtgctgggtaactaccagttcagcagggtgaattga

SEQ ID NO: 198234 - DNA, 2850 bp, Klebsiella oxytoca
atggccgttgatacgatttacaccgttgccggcggagcgtggtttcaggatacgctcaatggcgtggcggcattttttaacagcagggccggagactcactgattgcgatggccaccgccgtatcggtgattgtcggggcggcaacctatatccggacgcgcaatattatggacctggtcaaatgggccgggttttatgttctggtgattgccgttctggtcggggacaagcggaacgtgcagattattgacctgtctgagcctgcggccatctatcaggtggataatgttccaaccggccttgctgcccctgccagcctgatcacccgtatcggtgccggaatggcgcaggtttacgattttgtgtttgcccgcccggacgcgctgacctacagcaaaaccgggatgctgttcggcgcgcagctggcggcggggagcagtgatttccggttctcggagccggaaattcagcgcatgttctctgattacgtccacaactgcgtggtgggtgacattatgctgaacaacaagtacagcattggcgatctgatgaattctacagacccctacgcgctgatattcagtaaaccgagtccgctgcgtggtctgtatgacaaaaaccgcaattttctgacctgcgagcaggccacaaccaaaataaacactgattcgagtgatatcagtgggcggaatatgtccccgtttctccaacaggtgcttaaccggatgcacggtttcacgaaccaggtctttggtccgacaaacggtgccagtacggcactgttcaccgaaatgctgggcgacagctataactatttccacggcaactcgttgacctccaccgaaatcatccgcaagaatgtggtgatgaatgggctgcgcagtggtctggaaagtttttcagcgcagaatggcgatacggccggactggtgaacaccgcaacgcagacctcgatggcaaaaatgcgtctgtcgcaggcgaccagtgcgtccattgccgccaacacgctgccggtgatgcacagcgtgctgctgggcatgacaatggcgctgttcccggtgctgattgtcctggccgtggtgagttccctgtcctggaccattatcaaaggctatatctacaccattgcctatctgcagatgtggcccattctgttctccatcctgaaccatgcgatgaatttctacctgcagggcaaactcaacgggacggcggtgacgctggccacgtttgaccaggtgcagaatacctattccgatattggcaccacagctggctggcttgcgctgtccatcccgtttatcgcctgggggatggtgaaaggtctgggacaggtggtgtcgcaggcggggaactatctgggacagaccctgcagtctgcctccacacaatcgtcgtctcaggccgttgacggcaactggtcctataacaacatgacgaccgggaatgtacagggtaacaagtgggacaccaactacagccatcgtgaaggtcatatgaccagccagctggagagcggggcgaccaggacgcttacctcttcagggcagaatgtatttgatacgacgggggcaatgtcgaaattgcctgtcagcctgaatggcgccgaagtcacgagcagcagcctgacccaacaggcaagagagtcggaacaacgtgcacaaaccgcacttagcggatatcagagcgggcgagccagtagctggagtcagttgcaacaatttgccagtcagcgaggtaacagcgattcctttgttcagggctccgatcaaagcaccggcagtaatgccagcatcggaattaacaagatgcttaatgcgacgaaaacactggcgcaaacactcggtatctcagaaacagaggcttataaccgacttatggataaatcatccagaggcactgttagtgctggcactaaagcgagtgcgggagctaagttttttggtactggtgtagaggcccatacaggagcggaattaacaggcagtacaggatcttcacatggtacaagtgaaaccaatgctcagactaaagatgtcagaagtgacagaacatcacagcttgcacaagatttcagagaaggtttggatatagtcaaaaccagtcgcgttagtgcaggaggaagtcatactgacgctacatcatcaaataaattggaacaattgtctgctacgctcattgacactcaaaatagctaccagcaatattctgacagtttaacccgaagtcatgaatacagtgaaatggccgcttatgtccagagtaacagtgctcaaattaacagtaactttgatcaacagtttgctaactatgtaatgcaaaaatctggtaatgctgaagctatccttagtgacacatcttcgccagaagttgcagcagaacgtcagaagcttgctcactcatttgtgcaggataagatgttacctcagattgaggcggaatatcacggtcataaagcaagtcttggcagtggaatgagtaatgtaatgggtgcccctggtgaggaaagtgtcgttaatcactggaattcaaattcaaatactattcgtgatcacgaaaacaatgcgggaatcaaagaaaatgttcctcaaatcgttgagcagcgttatgttaattcaacccatgagctgagaggctcggagcaagatattgcaggatcaaaagagaagataggtgagttgcgagatgaattgcagtcacagcatcaaaaaacgctagatgaacatacacaagggatggtaaatgaaaaaacatcacaaaaatcattggcaggcattgataatgatgaactaactaagatggcgcaagatgctcaggagagaggttctacatattatggaaaaaaataa

SEQ ID NO: 198235 - DNA, 621 bp, Klebsiella oxytoca
atggaaaaaaataaattaaaagttcgcttcctgtttttgccattcatctattttttagtgtggttgcgttgttctattgttttttgctcttatagctggttgtatgcagctccatcgctactaatcttgttcctactggtgtttttaaccttctggtattatcgcctggaacggatgcttgcaataagtgatgtagggtggggttatttgaagcctttggtgaattttaaattaggatttgcagtttgtatatttctattatgcactcttagtgcagagctattacctttgattgcatatccatttgttttcataattggggttgtagcgtcttttattggtttttctaaggctaaagggagggatttcattgctattaaagatattttgttaacaggtggtgaaagtaatattgatgttatctgctaccgaatattaagtggggaaatagttgctgagcatgcttcagagggatctcagttgacaaattatgacttatctaacaattcgttggatgtaaatcctgccactggtttgccaatggtagatggaagtaagagtgttgacgtgaggggtaacccatatggagtggacctgaactatagagatagggatatttaa

SEQ ID NO: 198236 - DNA, 2250 bp, Klebsiella oxytoca
atgagcctgaatcctcgtgacttaacgcagggcggtcaggtcgctttcatgcgcctgaaaatgttcctgcaaataaataacctgatttcttattacgttattatggggacggttttatttggcatcgccgtcctgcttatgcgaatgagtattcagaatctgaccaacggcattatttactggtttgtccgggtaatgtcgccctttactgaaaaaatggtcagtcagcctgtctataccatccgttattacgaacataacctgcagtacagcgccagacaggtactcagcgacagttacaccatgtactgcggccaactgctgaaacaggaactggttattgccgggtgtgctgcgctgctggtcgcctttttggccacattcgctgtgtactggtatctcggtcgtactggtcgtaagcagagcgaggatgaaatcattggtggccgcgtccttagtgagtcaccaaaagatgtcgcccggatgatgaaaaaacgcggggaagcctctgatattcgtattgatgacctgccgctgaagctggattctgaaattcagaatatggctatgcatggcacggtatcaaccggtaaatccaccctgatgcgcaagattttaaaacagctgcgtgacaggggcgatctggtcattatctatgacaaaggctgtacgttcgttgaggacttctacgacgaatcccgggataaagtactgaatgcgctggattcccgttgcccgaactgggacttgtgggaggaatgtcgctctatcgccgaactggagaatgccagtacgaccctgatcccggccagtagcggtgaagatcctttctggcagggcagtgcgcgcaccatcttcgcggaaggtgctgagcgaatgcgtaaggacgaagatcgcagctacaacaaattcctgcgtacacttctggccataaagctggaccagctgcgggctttcctggccggtacgccagcctccacactggttgacggcaagattgagaagacagccatctctatccggagcgtactgacaaactacgttaaagctctgcgctacctgcagggcattgaccgtccggggcgggagaagtttaccatccgggaatggatgaagggccagaccgataaatcgaagaatggctggcttttcattacctccgatgaacaaaaccatgagtccctcaagccgcttatttcactgtggctcagcattgccgccaccagtcttctcgctatggggccgaaccggcagcggcgtgtctggttcttctatgacgaactggcgtcgctgcataaattgtcctcattaccacggattatttcagaagcccgtaaatttggcggttgttttgtgctgggttttcagaacatcgcccagatggaagaaatctacggcccgaaagccgcagcgggactgtttgacctgctgaacaccaaattcttctttcgttccccgagtgcggaaattgcgcagtttgtagaaaaagatctgggtgaaacccggcgtaaaaaattcagtgaacagaccagcttcggccatgagcaggtccgtgacgggatttctttcggcaaggaggaagagcgtgtcacggtggtgacctattcagacatccagaaacttaacgatctgcagtgttatgtcaccctgcccggtgactatcccgttgtaaaactctccatgagctatgaggcaatgcctaaagtggcagatgccctgttgctgcgtgacgtgcagacgagtctcgatcagacgcttgaggatgaaattcggcgccgcggtgaagaagaacggcacaagtttgccggattattcgagggagaatcgttaattcaggctgttccgggcggtgcgtttataccggagggtaatctttcgaatacccctcctcccccagcagacctggtggctgccgttcttgcggaagcgaacacgcctcctgcgacgtggccattgcagacaaagggtgcttccggcgaggcagataccgaaaacatggcttcgactgctgttgcagcggaagggggctcagcctccaccgggggtactgagcgggatatcgaacaggatttaccacaggatatacccccggggctgaacagcgacggtgaggtggtggatttcgcagcgtatgaggcatgggctcagacctcacaccagactcgcgatatgacccgcagggaagaggtcaacatcaaccatgcgacagataaaacgcatgactttgatgacgacagggaggtgttctga

SEQ ID NO: 198237 - DNA, 5298 bp, Klebsiella oxytoca
atgctttccatttcttctataaagggtgattcggcctattacagtcatgaagacaactactatgccagcggttcgctggagtctcgctggctgggagatggcgcggagaaactgggcctgaagggcgaagtcgccaacgccgatatggatgcgatacgtcagggcaaacttcctgacggcaccgatctctccagaatggtcaatggcgtgaataaacaccgcagtggctacgacctgaccttttcagcccccaaaagtgtgtcgatgatgatcctcattggtggtgatacccgcctgcttgatgcgtggaaccgcagtgtggaaaacggcatgaaagaggttgagaagcttatcagtgcgcgcatcacggacggtggaaaaaccgacactgttctgacgggaaacatggtggccgcactgtacaaccatgatacctcccgtgctttagatccgcagatccatacgcatgcgttagtgttcaatactacgtttgcggaagacaaatggcgggcgctggccagcgatacacgtatgaaaaccggattcggtgaaaatctgtatgcgctgcaggtggcgatcggaaacctcgtactgcaaccattcagacaggaggcggaaaaactcggttatgaaacggttacagccggtaaaaatggtctctgggagctgaaagatgttcccgttgcgccgttttcgacccgaagccaggctatcagcgaagcggcagggccggatgcgtccaaaaaatcccgcgacgttgccgcacttgatacccgccaggccaaagcctgggccgacccggacctgctgaaagctgagtggcgccggcggctgaccgatgaaaaattcgatatcgataactacatcggccaggcgcagacgcgggcggagccaccaggctctgctgtcggcggtacagaagatattcgggttacaggccagcctggtggtgcgtcttccgctcagatttctgagtcagacgtgcagaaagccgtcagtgatacgatttcggcgttgtcggagaagaaggtccagttcacctggtcggagatgctggccggcacggtcggtcgtctgccgtcagcgtcaggtctgtttgagcaggcccgtgccggcatcgatgccgcgattgaagagcagcggcttatccccctggatcgcgagaagggcatttttacttccgatattcatctgctgaacgaactcagcgttcatcagctggcgcgcacggccattcaggagcaaaccgtgctggttttccctgaacgggcacaggatcgcgatatgccggcaggtgatgctgtctctgtcctgacgcaggataaaaaaccggtggccattctcagcggtcgtggaggtgcacagaccctgcgtgagcgcacggaagacgtggccatgatggcccgctcacagggccgtgaggtgatggtgattgcagccgacggtcgcagtggccagtttctgtcagaaagcccgcatctggcaggtcatgtaatgctgcgctcgcagatgaatgcagacaccgtattgccggtgcagggtacggttatcgttgaccgggcggagagactgtcgctgaaagaaactgtgctgctgcaggaaaaggcgctcagcgccggtgcgcagctgatttttatggatacggagaaccgacagggaacggggaatgctttgtctgtgctgaaagaggcggatattccacagtaccggttttacagtacgcagttgccggaagtgcgactggtcagcgaggcggacaaacggagccgttatggtcagctggcgcaggactatgtgcgcctctcagctgaagggcgggatgtcgtggcccaggtgaccggtgcccgggaacagcagcagctgactgaggttatccgggatatgcggcgtgatgcgggtgaactgggccgggagcaggtgacactcagggtactggagccggtgtggctggacagcaaaacccggcatcagcgcgataactaccggcccgggatggtgatggagcagtgggacgctgagaagaaaacgatgacacggcacaccattgaccgggtggctgaggccactaacagcctggtgctgcagggagaagacggcagtcgcctgaccctgaaggtcacgcaggttgacggcagctggagcctgtaccgcagccggacactggatatttctgaaggggaccgcgtcagggcactagggcgtgagctgaagggagccatcaaggcgaaagagcagttcacagtggcggggctggaaaatggcgtggtacggctgtgcagcggcgaccgggagttgcgtctgcccactgaacgggccgtgaagctggctcatgactatgtggaagggaccggggcgggtaccagcgcgtcgcgcacggtactggctgctgtcggtcctcggggcctgaataaacagaccctgaatgcgctggcgcagagtggcagcgacatccggatttatacgccgcttgcgcctgagcaggctgcgcgcaaagtggaaagcatgtccgccgtgcgactggccagtgaccaggtccgtcagtcgaccggcgaggcaaatctggataccgccatacaggccagccgtgagcatctgatgtcggatgcagagcaggccgtcagtctggccatcccgcgcgcgcagcagggacaggtacacctcagtgaaattgccctgctgtcagaagcggtaaaatccggtcagccgctggctgatgtccggactgaaatcgcccggcaggtgaacagcggggatctgattcagctggattctgtttccggggcgggaaacagggtgctggttccgcgtgtggcgtatgagatggaaaagaccatcatccgccatattgctgagggtaaggatgctgtacagccactgatggcgctgacgcctgcctcagtgctggccggtctgacggcaggccagcgggaggccacacggacggtactggagaacaccgaccgctttatggccattcaggggtatgccggggtggggaaaaccacccagttccgggcggtgatgggtgccctgaacaccctgtctgaatccgtgcgcccgcaggtcattggcctgggacccacgcaccgggccgtgcatgagatgcgtgaggccggggtggaggcacgaacgctggccagtttcctcagtgaaacccggctggccattcaggccggagaaacaccggacttccgcaatgtcctgttcctcaccgatgagagctcgatggttgggaaccgcgatatggcagagctctatcagctggttgccgcaggcggcggacggatggtctccagcggggataccgcgcagctgcaggccatctcaaccggtctgccgttccgcctggtgcagcagcgcagcgccatcgatacggtggtgatgcaggagattgtccgccagaccccggcgctgcgcccggcgattgaaagcatcatcgcaggtcaggttgatacatcactgcgccaggtggatgacgtcagcccgcaacaggtcccgcgtcaggaaggggcctgggtacccgggaattccgtcatggaaatccgtgcgccgaaaaaggaccaggagcaggactctcccgccgtcggcgagcagacactgacaccagagcaattgtcactggtccggaccgacatcattgaagccatccgggatgactggatggggcgcaccccggaggcgcagcagcagacgctggttgtggcggaactcaacgccgatcgtcatgctatcaatgatgccattcatgccgcccggcatgagaaaggcgatacaggtgctgaagaacgcacgttcaccgtcctggagccgctccgggtgcctgacaacgccctgcgtgcggctgaaacctttgcggagtataccggcgccgtggccatgatgaacgagcgctactggactgtagcggaggtggatacgcaggacgccgtggtcacgttgcgtaatgctgacggggagtcggtgctgatctctcctcagcagaacactgcacaggatatttccctcttcacaccccgcgatctgacgatcagtcagggggacagggtgcgctttacacgctcggacaccgaccgcggctatgtggccaacagcctgtgggaggtggccgggttcactgacgacggggccatccgcttccgccagggagatcaggagaaaattgtcgacccgcaggccatgacggaggaccgtcatattgacctcgcctatgccctgacggtgtatggcgtacagggggccagtgagcgctttgccattgccctgaccggtaccgaaggtggcaggaaaagaatggcgtctctggagtccacttatgtgacgctgtcacgcgcaaaggagcatgtgcaggtctataccgacgatctggctggctggagtgccggtgcccggcattcaaatgccggacagaccgcccacgacctgctgcaccagaaaagtgaccacgaatccgacaccggcaaccgactgctggccaccgcctcacgactggataaaacagcgctgggacgcagggttctggcggaaaacggccttgagggcgaaacgatggcccgcttcattgctgccggcaggaaatacccgacaccgtatgtggccctgccagcgtggacccgtcacggaaaagaagccggggcactgctgaccgaaatccgtattgaggatgacgggatgcttgtggtgctcagtgatgagtcccggctgcgtggtggagaggatgcgcagttcgccggactgcaggcgagccggaatggtcagacactgattgccgacagtgcggaagccgcgctgcagctggcgcagcagaatccggaaagtggggtggtgatacgcctgcacggcgaagaacggttgctcaatgccgctcgtctgaccgggggacgtatcacggagcctgacgaggtggcacggacagtgcgcagtgtggcggacgccgaagcggcggcgaaagcggaagaccccattacgctgcctccggatgagcagcaaaaactggcagaggcacaggaaaaagcggcccgggagctggcggagcaggcccggcaggaacggctgccggcagtgccgggtgaggagagcaccagaccagaacccctgttgtctgccgatgaagaaggtcgcctgcgtgacggtacagcccggggagaacgtgagctggatgaggctattcaggaagcggtggcggaaggtcggggtatccgccagcaggtgcgcgaacagatgctgcgtaccgagcgtgagtgggtggtgaatgtaccggaaaaagacattgagctggaaaaaacgctcggtggggactga

SEQ ID NO: 198238 - DNA, 567 bp, Klebsiella oxytoca
atggttgccggaatactcatcattgccattttgctcgccggatttgtggtattgctcaggcaggccggttcagcccggcatccacttttgcagaaactgcgtgaaaaagggattcggccgggcagaactgaactgttgctgtgccgccgaccgtcgttcgtcagtgccggtcagctgatgacggagcgggagcagcgttttctgcgccggctcgacagggtgaccgatacccgccagtggcggctgtgcccgcaggttcgagtggccgatatcgtcagagtggcacccgaccgtaaatccgggagccgtgaatggtggcagctgttccgcctggtatcgcaatggcattgcgatgtggttatcacggaccgcgccgggcgaatcattgcggcagtggagctggacgaccgttcccatcaggcaccgaaacgtcagcggcgtgacctgctgctggaagaggtgctgaaacaggcgggtatcccgctgctgcgtggcgatgatgagcagcaactggctgagcgcgtcagggcacacctttgcgcacaacgaccggaggctgccgcatga

SEQ ID NO: 198239 - DNA, 732 bp, Klebsiella oxytoca
atgagtccgggaaaatctgttgccctgcatcctttcaggccggtcctgaatttttccgcgctgcagcgcgatgtcatccggatggccgcatttatggcaatggtgggggaccacatcgccactgcctttcagctggatatgcccttactgaacatggccgggcgttgtgcattccccctgtttgcgctggtcagcggctgtaacatggcaggcaaaaccctgcgtcagcacagcctcaaccgcctgtggctgatggcactcgtagcccagccgggttactggctggccttcagggaagccggactcatgtggtggcaactgaatatcctgttcgccttcgccgttgtcatgcaggtgacccgcttcctgctggcggcgaccgtgcttaatggcgttgcggctttcacggccctggtggggtatctgccgcttagctctgccagttacggtatacccggtttgctgatgctcgccggcgcgctgcttatctggcaggtccgggactcactgcggtcagccctgtttgctgtctggctgttgctggtcgccctgcttaatgcccggcatggtgatgtgatgacgctctccggcgtactgctgacgttgactgtgctgttttgcgtgcacgggctggtaccggctctcggacgacgcctgcaggccggacggtggtttgcaccagcgtatgccctccatctgctgtgtattggttttctggtcagtgttctctga

SEQ ID NO: 198240 - DNA, 342 bp, Klebsiella oxytoca
atgaaaaataagcaaatcgctttgtatgcggttatctccggttgcctgtcattaagcgggccgacgtttgcttcgtcaaaagggcctgtacttatccattcagaactacctgaacagattctggctgagcctcccgcgatgccggagcaggtcacgactaacgtgcttctgcgacagattctggcggaggtgataaagacaaatagccagaaggaagataaacgctgtagcgatggtgaaaagaactattctccgggctacatcatcagcgttggcaataaaacgctgcgttgtgatgttgccagggattacccgcaatggatcgagggggacaaagcttga

SEQ ID NO: 198241 - DNA, 381 bp, Klebsiella oxytoca
atgggctattcctttacatcaccagaggtggtccggtcgctcattgccgcgaaacggcgtggtgtggacgtcagggtggtgctggacctgaaagccaatacagggaagaacaataacgccagccgtgctgcgatgaacctgctggcgggggcggatatcccggtgcgcacggtcagtgcttacaaaatccttcacgacaaagtgatcatcactgacggccgtaacactcaggtcggctcatttaacttcagccgggctgcagaccgctcgaattcggagaacgtacttgtcgtctgggatgacccagtcttagcccgcagctacctgaaccactggacatcccgctgggcgcagggaacggactggaaacagacgtactga

SEQ ID NO: 198242 - DNA, 609 bp, Klebsiella oxytoca
ttgacgctgacagataaatcgggccatcttgcatggtgcgccctggtggcacttgcgctggccagacaggatggtggcgttctctcgccggcacaggaaaacctctttcttacccgatggcttgcgactgcgcttaagcaacgtcggttttcgcgcgatgttacacccgatattgaatggcttctgaaacaggggcggcagctgggcgtcagcgcaaagctggccagcaagctgaattacctctggcgctcctgcaccggcgagttgactgaacagaacgatctgttccggctgacctatgcgctggaaacagccaaagatatgcactggaactaccgtctgctgagcgatcgggaatggtccggccggaatgctgtggcgctcagtgcgggcgtgaacggcatttatctctcacgggccaacctcgatgtcgcttttgacgacagcggccgacagataaatccgctgacagcgcgtctgacagggaacgtagcgggggtaatgaagctgtttaatcgctgtggctggcaggcagagcctgagtctggtgcctccctgccccaccagtattcactgatggccggacagggagtgccaggaaaggattag

SEQ ID NO: 198243 - DNA, 315 bp, Klebsiella oxytoca
atgcaaacaaaaataataaacctggcaatctatacggtaatagttgcagggctcacttttctgggcgtgcgactctacgacgccgtttcggatacaacagatcctgccattgcaaatggccctttatgggctgggttatgtgtgaaaaaggacaccaaagatggagtgaatgagttaatttgctcggacatcaggattttcgtgaaagccgaagattatgaacgttctcttcataaacgtaatttgtccggcatcatgagtaatccccatacggagagtgggaaggcagatcgcttacctgatataaataattga

SEQ ID NO: 198244 - DNA, 216 bp, Klebsiella oxytoca
gtgctgctttgcccaccgcccgtaattattaacggactcatactgacgttctgcagcaccatcacggtaatacagtatatggataattccatgaagctgcaggtaactggctaccgtggttacattattacgaacgaagcgcgtgtggctctggaaggtatcaagatcaactccatcctgtccgtcatcaagcgcatcaagaataaaagcgattaa

SEQ ID NO: 198245 - DNA, 249 bp, Klebsiella oxytoca
atgctgattgttatactaaccattatgggttcagaggtaattgaaagctactcacgtgaagatgtcagtcaatttattcttttcttgactgtcaccttggctgcgttgatcccatggttttggatattatcctgtgccctcaaaatatttagcattagtaaaaaactgaatgcatacattctgccaaccattgagcctgaagccaataaagaggatttcagctcaatcctcaataacaaatacccttaa

SEQ ID NO: 198246 - DNA, 303 bp, Klebsiella oxytoca
atggggcctgcgcgggatatcacgccgtgcctaggagcacgtctggtgcaggagggcaaccggctgcactatctggctgaccgagcaagtatcaccggtaagtttagtgatgccgaaagcctgaagttggatgtcgtatttccacattttatcagcaagatagagtcgatgctgaccactggtgaactgaatccccgtcatgcccactgcgtcaccctgtaccacaacggttttgcctgcgaagtcgatactcttggtagttgcggctacgtatacatcgctgtctatctcactcaacgctaa

SEQ ID NO: 198247 - DNA, 864 bp, Klebsiella oxytoca
atgaatacaagtgaaggacaacagtccctgcagaactcgctttctgggctgccccagtgggtctctgaacgcattctgcagcagataaatcaattaacccactacgagcctgtaataggcattatggggaaaaccggcgcgggtaagagcagcttgtgcaatgccctgtttgccagtgaggtttcaccggttagcgatgtggtcgcctgcacacgcgcccccttacaatttaacctgcaagtaggtgagagcgttatgacccttgttgatctaccaggcgtgggggaaagtagtttacgcgatactgaatatgctgccctgtatcgcgaacaacttccccggctagacctggtactgtggttgatcaaggccgatgatcgagcgctgacggtggatgagcatttttaccgggaggtgattggtgaggcataccggcataaggtgttgtttgttatcagtcagtccgacaaggttgaacccacctgcggtgatgaaaagttgtctacagagcagaaacaaaatatcagccgcaaaatctgtctattgcatgagttattccaacctgtaaaccctgtctgtgcggtgtcgatacgtttgcagtgggggctgcgggttatggctgaacggatgattcgttgcctgccacgggaggccagtagtccggtggcagtacagcttagtgcgccacttcgtaccgatgttgttaataaaaaagcccgtgacgattttggtgaaacggtcggctcggtactggatacagtaagttcaatgcccctgataccggccccggttcggacagtcatccagtctgtacgcgacatcgtggtatcggtcgcccgtgcagtctggaacttcttcttctga

SEQ ID NO: 198248 - DNA, 741 bp, Klebsiella oxytoca
atgagaataacatttaattcagatagtgaactgacaattaatacaattgacagatatgcaaaaagctatggaatatcaagatcgaaagttatttctgatttacttgattcaatatcacccgctctcgattatttagtttttcaaaataatttaaagcacgaaatggagactaagttattaaacttgtttgcgtatgagcttaaggaggtagaggaaaaaatatctaaagatgaaattttctttaggcattttcatcaaaatataaaaaatatttcttattccgttataagcaaagattcaattcggtttacattgccggatagagaccgatggcctgatatgagagagcaatttcaaagtaaagtaaacaaaatgctcgatatatacaggccatgtgatagtggttattatgcttgtgttctgtaccctgattacctgaagaagggtacgtatacatcagttataattaatttcagttcgttaattgtcgatggctattgcttcgatatcaattcgctgtgttttgtcagagaggaagatttcttttattgcggcattaatgattacatgaagagaaatcttaaaaacagaaaccggttgcacctctcatggactccgctaacaaaaattgctgacgggtatctttttatggctgcaatacgcaaagaaaactcaaactatgtggccaaacaagaaggagattttacagtgaacttcccttacgatatatggaagcaataa

SEQ ID NO: 198249 - DNA, 582 bp, Klebsiella oxytoca
atgcaaagactttacccacactttaaaaaaatcactcccaatgacttcctcctgaatatgatcaatcaccatcttaatcagattctgatgtgccactccaaaatactggcgtttcgaatggattttgattaccagcgaggcaccaaccgattcattcgtaattcctcatttgagatacaggatgacctctgggagttaacccaagctgtaatgcaaatgcctcaactctgcggttgtttctgggtgctggaatggacaaagacaaatgctatccacgctcatgccattttttatcttaaagggcagaagcatcagaagtcatttccgtttattcagcagacaggtgaattgtggcagaagataactaacaacgaagggaaatatgaacgttgcaaaccaaaggactactgtcaggacaacatcaataacgtcgttgattatagcaacgacgaggacattaatagccttaggcgtattgccagctatctgacgaaagaatcccagaagaaagggtgtctgatttggggatgtaatgaggttcccgcccctgcacgacagggcagacccagaaaccccaaataa

SEQ ID NO: 198250 - DNA, 213 bp, Klebsiella oxytoca
atgaccagtaaaccttccctgtccgaagaccagttcgttgatatggctttcatcacccgcctgctgagggtcagtgataaatggatttaccgactcattaaggatggcatatttccaaaacccatcaaactgggacgaagttcccgctggttacaaagcgaagtcgaagcctggctgcaggcccgtattgatgcatcccgccctcagcgctaa

SEQ ID NO: 198251 - DNA, 534 bp, Klebsiella oxytoca
atgaagaattcacccttactcaaccattaccaggcctggctggatgattttacccgcgtcagtctgttccacggtttatgccagcagcacatcacgcagtggcacaggctggcgataaccgcctgcccgatgccggacggtagcgtaacagaatgcgtcattccacagtgcctgctgccggtcacccgcaccgaccaactgggatcctgttctgccattcctggcctgaccaaacacacagattattcccttctgcccggcgtgctgctcagcgaatgttaccggctggggaaaagccggctggcagcacaattgcagttgttattccgccagtacccacagcccggtatacgtgaatcgctgacgttactgtgctggtgcgagctggctacaggcaagaatatgggggagtggtatgagctgcatcttccacttccctacaccctgaagcgctggttggcggtaaaacagctgacatatcgggggctgaaaacgctgactgacgattacattcgtgccacccggccactgtga

SEQ ID NO: 198252 - DNA, 576 bp, Klebsiella oxytoca
atgaaaaaccgcaactggacaccggactggtttttgaaatctgtccttgatatgcatattaacgcgatggttaatcgctattcctgtctgagggtaatacggctggatcttttctatcaaaaaaatacctttaaatatcactatccggatcatcggcagatggagtctgatgtccggcatctgatggacgaaatgatgagtatgcccgcagtggtgggttttttctgggtaattgaatggaccgaagatcacctgttccatgcgcatgtggctttctggctggatggcaaccggacccagaaaccctttttctggatggagaaggctggggcttgctggcgtgcaatcacggaacatgacggctgttactatcgttgtgagtataaaccgaactatgaggcggatatcaatataccggttcgttacagcgatcaaggaagcatttctaacatgtgcgatgtactggaatacatgaccaaaattgaacagaaaaacgtactgttaatgtacggatgcaacgaagtacccgagcgaccattgacaggacgacccaggaataacaatacttcaatctaa

SEQ ID NO: 198253 - DNA, 2442 bp, Klebsiella oxytoca
atggctggcgtgaacaaaacgcacctgactgaaacggatatcatcagcaaatttatcctgcctgcggttaaggatgctggctgggatgatttggcgcagattcgtcaggaagtgaagctgcgagatggcaagattgtagtccgtggcaaactggcgtcacgtatcaaagttaagtctgccgatatcgtgctgtaccacaaacctaacttgccattagcagttatcgaagccaaggctaacaagcacgccatcagtaaagggatgcagcagggactggactacgcaagcctgctcgatgttccctttgtatttgcctccaacggtgatggattcatcttccacgataaaaccaatccgcagcagctcgaatccgaaattgccctcagtgacttcccaacacctgaacaactctggcaaaaatactgtgcctggaaagggttcactcaggagcagttacccgttatcagtcaggactattttgacgacggtagcgggaaagctcctcgttactatcagatgcaggcgattaaccgaacggtggatgccgtatcggcaggtaagaaccgtattctgctggtcatggccacgggtacgggcaaaacgtataccgcgttccagataatctggaggctgtggaaagctaaaaacaaaaaacgcattctattcttggcggaccgcaacatcctggttgatcaaactaaacgtaacgactttcagcctttcggtaatgcgatgactaaagttaccgggcgcaccatcgatccggcttatgaggtgcatctggcgctgtaccaggccattaccggaccagaagaacaccagaaagcctataaacaggtggcgcctgatttcttcgacctgattgtcattgacgaatgccaccgtggcagcgcttctgaagattcagcctggcgagagattctggagtatttcggcagcgccactcaggtcggtctgacggcaacgccaaaagaaacggaagacgtctccaatatcgattacttcggtgagccggtttacacctattcgctgaaagagggtattgaagacggtttcctcgcaccttacaaagtcgtgcgcgttgatatcgacgttgatgtccagggctggcggcccgtcaaaggtcaactggataaatacggcgaagagattgaagaccgtatctacaatctgaaagattttgatcggacgctggtgattgatgagcgcaccatgctggtggcgcagaccatcaccgattacctgaaacgtaccaacccgatggataaaaccatcgttttctgcaacgacatcgatcacgccgatcgaatgcgccatgcgctggtggtgctcaaccccgagcaggtgttgaagaacgaaaagtacgtgatgaaaatcaccggcgacgatgatatcggcaaggcgcaactggataactttattaaccctaaaaaagcttaccctgttattgcgacaacgtcggagttgatgaccaccggcgttgatgcgcagacctgtaagctggtggtactggatcaaaacattcagtctatgaccaagtttaaacagatcattgggcgcggcacgcgcatcaacgaaaaacacggcaagctgtggttcaccattctcgatttcaaaaaagcgaccgagctgtttgccgacccacgctttgatggcctgccagaaaaagtgctggtggtaaaacccggtgatatttctgacaaagattcagacttcaatgaacaactggatgcggaaaataactcggatggcggtgataatgatgccagtgaagcgcgagaagacgtcgctgactatcaggtcaatcgtgacaggcaggcgggcaacggtgagttccatgttgacgatgaaaacaaagtccgcaaattctatgtgaatggcgtggatgtaaaagtgctggctaagcgcgttcagtattacgattctgatggcaaactggtgaccgaatccttccaggattacacccgtaaaacgatgctcaaagatagcgaatacgcctcactggatagcttcgtgcgcaaatggcaggatgcaccacgcaaacaggtgatcatcgaagaactggagcaacttgggattctgtgggacgtgctggccgaagaggtgggtaaagatctcgacccgtttgatttgctctgtcatgtggtgtacggtcagccgccgttaacccgtcaggaacgcgtggccaatgtgcgtaagcgcaattacttcactaaatacgccgagccagcacagcaggtgcttaacacgttgttggataaatacgccgatgaaggcgtgcaggaaattgaggatgttcaggtacttaaactgaagccattcgatacgctgggacgtccgatcgaaatcatcaaaacacgctttggtgacaaaaaggcgtatgagcaagccgtcaatgaactggaaaacgaaatctaccagttaccgccacgctcagcctga

SEQ ID NO: 198254 - DNA, 1764 bp, Klebsiella oxytoca
atgaccgttggtaagctgatctccgaccatatcgatatctggtcctctgcgctgcaaacccgttccactgcggggcgcggcagtaatggcaaaatcgacctgtatggcattaagaaactgcgcgagctgattctggaactggcggtgcgcggcaagctggtgccgcaggacccgaatgatgagccggcgtctgagctgttaaagcgtattgccgcagagaaagcggaactggtaaagcaggggaagataaaaaagcagaagccgctaccggaaattagcgaggatgagaagccgtttgagttgccggaggggtgggagtgggtcagattgggaaccttaggatatacccaaaccggaggcacaccttcaaaatctaatgctgaatattatgggaatgatatcccctttataaaacccgcggatattactgcacaaggagtcatatacgataatgaagggctctcaattaaaggggcagaaaccttaggccgtgtcgctccaagtggctctattttaatggtttgtattggtaccattgggaaatgtcaggttataaatcgaacatgttcatttaaccagcaaataaattccattactcctttctctgatatatgtgattttatctatcttgatgtttcatcctcttattttcaatcactagcgtgggattattcatcaagtacaactatagctattctgaataaagggaaatgggagtcgttgttagttcctatagcaccactttcagaacaggctcggatagtgaccaatgttaaaaaactgatgtctctctgtgaccaactggaacagcaatctctgaccagtctggacgcgcatcagcaattggttgaaaccctgctgtcaacgctgaccgatagcccaaatgccgaagaactcgccgaaaactgggcgcgaatcagccagcatttcgacacgctgtttaacaccgaagcgagtatcgaggcgcttaagcaaaccattctgcaactggctgttatgggtaaactggtgccgcaagatcctgacgacgaaccggcttctgaactgcttaaacgtattgagcaggaaaaagcgcaattggtaaaagaagggaaaattaaaaaacaaaaaccgttgccgccagtgagtgatgaggaaaaaccgtttgagctgccggcagggtggaaatggtgtcgtttaggtgatttagcaattggctcagaggccgggtggagcccgcaatgcgaacctcacccaagaaatggcgatgactggggggtcttaaaaatcagctctgtcacttggggagagtttaatcctgaggaaaacaaggcgctaccagtaaaattagagcctagacaaaagtatgaagttaaagggaaagatttccttttatcaagagctaatacctccgagttggttgcccgctctgtagttgtacctcaaacggtgcctaaacatttaatgctaagtgataaaattatacgtttccaattttccgatctgctggatgtgaactatatcaatattgtgaataattctatgctttcaagagaatattacggaatggtagctggtggtacgagtgcgtcaatgaagaatgttacacgaaaccaagtttctctattacctgttgcattgcctcctaacaatgaacaaaagaaaataatctcagttacagaaagtgttttagcgtttgccgacactcttaaaaatctgattgtaataagtgaagatattaaaaagaatttaactgactctattgtttttcattttgaaaattaa

SEQ ID NO: 198255 - DNA, 1902 bp, Klebsiella oxytoca
gtgcgcataaaatcaatttatatttcgcgatacaaaaacattcatgatttccagatggattttgatgataataacggtatcgacgtttttgttggcaaaaatgcaagcggaaaatccaatttttttgaagctatcattgagatttttcatcatattgatcagtttgggcaagagaacaatacaattaattttgaatattgtattttttacgaaattgatggggttgtgactaaaattgaatgggcaaaggagcagttgttcatcaatggtgaggatggtcaacggaaattaggaaaaatccctttccctgacaatataattgtatattacactggacataatactactgtgcctaccttaattggtaattacaaatcattatttcagagaaagattaaaggtgctgatttatccgattcacgcaagtttattgggattggacctgattataaaaatctgcttctatctcttatcatatcgcagcatcaagacaatcctgctagaaattatattctaaataaactttcagttgacaaaataggtctgacaaaaccgggcaccaaagaagttactgaacctgtcattaggttaaagttagaacgccctgattatgctaagggtaaaagagattttaatattcagcttaatgatgaaacggatcggtattggagtgcagtcggaattaccaaagaatttcttgattctttaacacaatgcatatggaataatactgatcaaatatccgttaatgaaggatactttcaaggtgaagatcattacatactatatatatccataaagaaattacaagaagaatttaaaaatcgctggggtgaactttttcagcagtttgataacctaaaagttttaggaatgctttctgatataactgtacctttacgattggattctgatattgaaggtgatattagttcatttagtgatgggcaatttcagtcggtttatatttacgcagtctcggagtttttcaaaaataaaaactgtgtaacattgcttgatgaacctgatgcctttttacatccagaatggcagcatcaatttattaatcaagttaaagaaattaacacggtgatgttatgtaaaaaccacattttagtgactactcacagtgcctcaactatagcatccttagagcaaaaatatgtttccgtgatatattctgataaccacgaagtgaaattttgtaagcgagacaaaggtcaggttattcgtgatctatctgctggagttatttctttttcagaaactgaagcccgtttggcattgaatcagtttctcaaaacatcatcgggtaatgtactttttactgaaggtatgactgatgaaataattctcaccattgcatgggaaagattaaatccagggcggggttgtccatttggcattcaaaatgcttttgatcgtactttcttgagaaatttattttctcgtgatgatttaaagttgaattttcctaaccgaaaaatgtttgccttatttgacttcgacgatgcatataatgattggaaaggacttaaaggtcaggatttggttatagatccacattctggattagctaaaaaattaaattatgaataccattacgccttgttgcttccagttccaaaggatactgaaattaaaaaacaagttattgacaataaaaaccaggcgtggggtggaaatggaggttcacatttatccattgagttattgttttataaaaaaaatttacttggagaatggtttgcaaaacaaccattctctgctggtagtgaaatcatagagtttgttggcgacaaggctgagtttgctaataaggtggttccgacattacctacagagagttttgaaatatttagaccactattcgatttcattgagagcaaatgccatgcttag

SEQ ID NO: 198256 - DNA, 1098 bp, Klebsiella oxytoca
atgccagttcatcatgcaatctggcggataggggagaatccccaaccgctgcccatcagcaagctcactagcgagcaactgctggagaagatgattttaaacgatccctccattctctctgaccagtggatgattattgggcatcaggaaaatacactcgataaaggacgtatcgatctgctggcaattgcaccagatgcttcgctgatcctgattgagctaaaacgcgatcgcacgccgcgtgaagtcgttgcccaagcactggattacgcctcatgggtggatgatttaagtgccgagggtctgtcacagatttacgatagattctctggtggtggaaatttggacgatgcatttagacaacgcttcaacgccgagctggaagacgattccatcaacaagtcacatcaaattattattgttgcagcggagctggatccctccaccgaacgcatcgtcgactatctgagtaagaacggcatctcgattaacgttctgttctttagagtattccagcacggtgacgaacagttcttaagtcgcgcctggcttatcgatccgagcgaaacgcaaaccaatgccgcacaggccaccgcaacaagtgccaatgcgaaggaaccctggaacggtgagttttatgtctcgtttggcgattcaaacagtcgcgtttgggaagaggcgcgccgctacagctttattagcgcggggggcgggagctggtacagtcagacgttaaaacagcttcaacctagcaaccgcgtctgggtgaaaattccggcaacaggttacgtcggcgtcggtattgtacagagcgccgttgaaccagctagtagcttcaccatcaacactgacgacggtgaaaagctggcgatggatgtacttaagtacagcgatctctatcaccggaatgcggatgatcccgacaaatccgagtattttgtccccgtgaagtggctggaaacccgcagtgagcaagaggcagtgaacgaggtcggattcttcggtaatcaaaatacagtctgcaaacctacaactccaaaatggcggcatactattgaaaaattaaagcgctatttcagaaattgggatataaattag

SEQ ID NO: 198257 - DNA, 819 bp, Klebsiella oxytoca
atggtcattccagaagatggactcttagaggtagcttggtacttttcaaagtttggcaaaaaaaatcctccatctttacttagagttgaaaaatggaaagatgctgccgctcttttttatcctcgatttggtgaaggtaagacttcagaagagttttataatagccttaaaaatcatcgggatcgttttgattcatggctcagttctactcgaacaggatggcggaataaagatggaactccacgaaacttgcctgtggcctcaaaaatagtcatgcaacgaatgaacatgttgccgaactcgattattgaaaaattgattatatcttatttatcgataaatcctttcgagaaagtccagcaagatttagcaccgatacttcaagataaaagcattgatgatacaaccagagaacagttaatttcagccagacttggccaaggttttttcaggaaagaatgccttaaactttatcctgcatgtccgctaactgatataacctttgaaccattactgagagcaagccacataaaaccttggtctgcatgccacaacggcactgaacggctcgatccttttaatggaattatattagctgcacatgttgatgtgctatttgatcaaggatggatatctttctccaacgatggtctggttttattaagtaatgatattgatagggccttaattaaaaagcttcaactacctgaaaagattaaaccattccatagcaaatcagttgagtatctggaatggcatcgcgagaaaatcctgagaaaaaagaaacatcccagaaaaaggataaaaacaaatgaataa

SEQ ID NO: 198258 - DNA, 657 bp, Klebsiella oxytoca
atgctcattaatttattaaagtcacaccctgatgttagggaaaagtattgtgacacaatagtttcatgtgatggtaatagaatatctaaagccagaatagatgttttaatgtctaaatatgcagcaacgttatttactgagtttgatacaattgattcagttaataagcaatttgctaagctttgttatcatagaagtgctattttttctccaggtcatttgcctttcctatcattaggcacagtagtgaaaagtacatttggtaatggatgctattatatttgcattcaacaaagatgtgattctgtaagaataagtgatggtgagtgtcgtcgtttcttatttatttctcttgaacaagtagaagatggtggttttaatttcttaaccccagatggggttaagttgaaaataaataaatctacatactcattaagaactgtaaaatttaatggtactcaaggtgtagctcttgctaaagtagctgataataaaaaatactttgagcctacttattacagtcaagaacatccagagagatttgaatttatagtagaacttaaggaactttatgcgcaacagatagtagaggaatatagttcaagtctttcaagagttggtctcgatgagccggagtgggtaaggcgattaaattga

SEQ ID NO: 198259 - DNA, 525 bp, Klebsiella oxytoca
ttgattcagtcatgggtggagaatgccgatggcgcgaaggatggtcgctttgtcatcaccccgccgctgttcgccatgcagggaaaaaaagagaataccctgcgcatcattgatgccaccagcaaccagctgccgcaggatcgggagacgctgttctggatgaacgtcaaagcgatcccgtcgatggataaatcaaagctcagcgacaacactctccagctggcgatcatcagccgcatcaagctctattaccgcccggcaaagctggcgctgccgccggatcaggctgccgaaaagctgaaatttcgccgcggcgcaggcacacttacgttgatcaaccccaccccctactatctgacggtcaccgaactcaacgccggtacccgggtgctggaaaatgcgctggttccgccgatgggtgaagccagcgttaaattacccgccgatgcaggtcgcgagattacataccggacgattaacgactacggcgcgctgaccccgcggatgcagggcgctacgcaataa

SEQ ID NO: 198260 - DNA, 336 bp, Klebsiella oxytoca
atgctctttggattccgttcatccttttatccagtgtttgtaaatgtaattgataatgcaatttattggctaaatgaaagtaatgttgacgataaaaccatacggttacatgcagatgaacatggcgctgtttatatttccaacaacggtttgcagattgatgaacgcgatagagatagaatatttggcctaggattttccagaaaaaataatggccgtggaatgggattgcacatcagcaatgaagttcttgaaacaataggatatcatttgactttggatgagcctagagatggttcaacagtgacgttcaaaatttccatggtggaagaataa

SEQ ID NO: 198261 - DNA, 276 bp, Klebsiella oxytoca
atgcagcgcgtgggcgagcgggatccggtggcggagctggcgctgagccgctatgagatgcggctggcgaagtcgttggctcacgtggttaacatcctcgatccggacgttattgtgcttggcggcggaatgagcaacgttgaccgtctctaccagacggtgccgaatctgctaaaaccatgggtattcggcggtgaatgcgagacgccgattcgccgggcggcgcacggggactccagcggcgtgcgcggcgcggcctggctgtggccgctgtaa

SEQ ID NO: 198262 - DNA, 336 bp, Klebsiella oxytoca
gtggttatcgatctcttcgcccgtaatgtggtcggctggtcgatgaaacccactctctcacgcgaactggcgctcgacgcgctgatgatggcggtctggcgccgaaaaccagacagcgaggttatcgtacatagcgatcagggcagccagtacggcagtgacgactggcagcgcttctaccgggccaataacctggcgccgagcatgagccggcgtggcaactgctgggataatgcggtggccgaatcgttcttcagttcgctgaaaaaagaacggatcagaaaacgcatatataaaaccagggatctggcccgggcggatcttcgattacattga

SEQ ID NO: 198263 - DNA, 426 bp, Klebsiella oxytoca; identical to SEQ ID NO: 129404

SEQ ID NO: 198264 - DNA, 303 bp, Klebsiella oxytoca
gtgaatccaaaattattaaaagcacttgaacatttatgtattgtgaataacgtgtctgcaggaatgcttgcacatcctttagatgagagtcgtaccaaggaaatgcttaaatttttgaaaagtgaaggagtaccgctggatagagatgctatttactcttgggcgatggaaaaagactggcaaccgaaaagcgcaaaagagctggcagacttggcagggaagatcgatgaaggtaagcgagtcgtgatcaagtatcctggccgacttagcgataaaattatttctgaaattaaggctatgtaa

SEQ ID NO: 198265 - DNA, 1800 bp, Klebsiella oxytoca
atgacacaagctcatgatccagtagatgaatatttgaatttctacaactctcttgacaaaccagggtttgctgttttggtccgtggtgagtggggctcggggaagacacataagataaaaaacctctttcatgaaaacatgtattacgttagtctttttgggctcaccagccaaaaagaaatatactcgtctgtttttttatctatgtttcctttaaaatctaaagcaaaaaattttgcaagctggttaaaggattccttagatggttctgaagctttgacatttggcgctggtaaccttttatcaggaatttcagatgcattcattaaagaggaagtagcaaatgataaagtcatcgtattcgatgatttagaaagggcagatgtagatataaatgaaatactaggagttattaataaatatgttgaacaccacaagtgtaaagtaattgtcattgctcatgatgaaaaaataaatcaaaaattccatgaaactaaagaaaaaatatttggtcaagtgctacaagtaacacccgacatagataatgcactacattttttttcctcaaactgcgcttcaccagatgcagcaagcgaaattctcccttatattctggatgttttcatcgcttctaaatgccaatccttgcgtatacttaagcatgttttaaatgactctcttagattatattgttgcctaagcactaaacatttgggatataaagagtctattaaaaaattatttactgttttctgcgcattttccatcagttttcgctctggaattattaacaaacaggacatgtacaatagagttttttcattcgcaaattcattaacgaaaaaaagtcatgaagaaaaatcccgctatgatgaaatgaaagagagattcaaatcagaagcatttaaggtcgaatttgaaagtagcattcttagtgataagattttagaagacacaatttgcaatggccactttaacaaagctgaaattatcaatcatttaaacaacagtttatatttttctttaccagaagatattccaagctggaaagttttgataaacttcgatgaaatagacgatcaaaccattgcgaaaacaataaaaaagctagaaagtgaagaaaaaggattattaattacagacgagggtgatatcctccatactttttctatgaaatgtttgatggccatttcaggagaaatacccagcaaaccgtcaaccattcttgaagaaacaaaaaaatacatcgacgcgctcttaaacagtaaaaaactaatcccaatgaataaagattttagagtgaattactcatccgacgataattctcatggctatggatattggataaaagatgagtaccgagctgaatttgaagaaataaaaaaacacttaaaaaaatgcaaagaaacagctttaaacaggcaatatccagaaatagcggaggaaatacttttaaatttaaagaatgatattgataattttaaaatacaaatatcacgtaactctaataagctaggtgcctatgcacaaatacctgtattagcagaaatagcgtcaaatctttttgtagataaatggcttgaactacctgtatctaattggataaaagtcagagaagcactggaatataggtatgatacaggaatgttaagaaatgtattaaaactcgaagttgaatggattaatgccgtaaatacagaattggaatgcagggcaaaccgacatacaggtcttagtaagcttagaatcttacgacttgtaccacgaatcgacctaccaaaaaatgttgcactagattag

SEQ ID NO: 198266 - DNA, 183 bp, Klebsiella oxytoca
atgcaagtcctgtttgtggacattaaaatggggcagattttggggcaaaatgtcgtttggggcacgatttggggcgttcaaatgtccgcatttgtccgtatttgtccaaatgtcaatcttgctatctcattgaaagtattgcagatcattgaatttgctaaactatttttttgcatgccataa

SEQ ID NO: 198267 - DNA, 1914 bp, Klebsiella oxytoca
gtggcaacagaaatcaggggtcaaagaaaatataaagatttccttttagagcagcccgtagtatttaatgaaaagatcatcttattaacagggaaaaatggatcaggaaaaacacgttttctagaaagtattaaaaatcagtgctccactacatacatagacacaaaccaagttagcctaactgacataattcttatccaagatgctggcattaatttaaaatcaaaggaacagtacaatgatgcaaatcatagaaaacatattgaaacctgccttcaactatttgatcaatataaaactcacatagatagcccggatggtatccaagagccagaaccattgaggaggtctacttcagatatcgattatgaatcattacgtcagatatgtaaccttatttcctataagacaggaaaaagaatttcagaccttactcatgatgatataattctcaatttcgaacttccgattaaaaatgcacttggaatacctaacgtttctgaaattatcaatacatatataaaaagacgtaacacaaacaattacaatatgtggttgaatacaaatcagaaaaaacccactccatattggagtgatgatcagttcattaaaaaatacggagccgaaccctggattataattaatgaaatactttctgaagtttttgatgggaaatttgaattctctcccccagatgaaacctcacatagctacaactatcaagctaatcttgttcaaagaagcaatggcatttcagtagaagttgagaacttgtcttctggtgagaaaatactactttggcttgcgctaacgctcttcaacactcaatataatttttccagaattgttaacactccaaaaatagttttaatcgatgagccagacgcatttttacaccctaaaatggttttaaaaatgcataacatcctagactcttttgtgaaatattttaatgcaactgtaattattacaactcactccccaacatctgtagcactagcaccaaatgaaagtatttatctggttgataataacgtagtacaaaaaattgaaaaagatagcgctatcactgaactgttagatggagtaactcaaatatcactgaacccgaacaatcgccgtcaagtttttgtggaaagtcaatacgatgcagatgtttatcagatattgttttcaaaactgatgcatcgtacagaaaagattgatcctaaaatatcactaacttttattagttccggcgcaaaaaccccaagacaacagctgatcgacaaagcaatgcagatttttaaaattcaagatgcagatttattaaatgattttgtggtgtctgttaacggtgtcggtgattgctctaaagtaattgggcaggtagaagcgttagttgagaatgataatgataccgtcagaggtatcatagattgggatttaaagaataatgctacagaatatgttaaagtctttgccgaaaactatgcatactcaattgaaaatgtaacactagatcctatttgcattcttcttttgttacatattgataaaccagaatccatgaccatggaaaaaatatgtggggagaacgtaaactggactaaatggatttgcgacgaaaaattactgcaagcatcacttgatctttttataatgcacgttttagaaagacctaacaataaagacagagccttagattatgtttccggaattacattaaattcagactcggagtatttagaaaaaaacggacatcaattggaagcattagtcaaatcaaaatataaggggctggaaagtttctgcagaaagaaaaaggaaggtgagctaaaatctgccatagtaaacaaatcaatgataacatatactgattgcaagtttattccaagtatatatattgaggttttttcccaagtacagaaatag

SEQ ID NO: 198268 - DNA, 681 bp, Klebsiella oxytoca
atggcggctaacgccttatccgggctaccggcggtctgcggtcccgtagcccgggcaaggcgctttgcgccgcccccgggggaagcgtgcaggatgttgcagaattttcccggaggcgatgctgcgcatttgtccgggctacgcgtccccggcggtctgcggtcccgtagcccgggcaggcgctttgcgccgcccccgggagaagcgtgcaggatgttgcagaattttcccggaggcgatgctgcgcatctgtccgggctacgcgtccccggcggtctgcggtcccgtagcccgggcaggcgctttgcaccgcccccgggggaaacgtgcaggatgttgcagaattttcccggaggcgatgctgcgcatctgtccgggctacgcgtccccggcggtctgcggtcccgtagcccgggcaggcgctttgcgccgcccccgggggaaacgtgcaggatgttgcagaattttcccggaggcgatgctgcgcatctgtccgggctacgcgtccccggcggtctgcggtcccgtagcccgggcaggcgctttgcgccgcccccgggggaaacgtgcaggatgttgcagaattttcccggaggcgatgctgcgcatctgtccgggctgctcttccccggcgggaaaacccatcaaccctacgccgaattaatatgttccttgcagtaa

SEQ ID NO: 198269 - DNA, 1860 bp, Klebsiella oxytoca
atgtcttatttttttgacacagcagtaaatatcgaaggcaataccaaacttagagctccgcagatcgaagcctatataaaaataaaagatttcttcagcgatgaagaaaataaagaggctttagttgtcttgcctacaggtacaggaaagagtggtcttatctcaatagctccgtttggtgttgcacaaaaaaaagttttaattattacccctggacttatcacaaaagatagcataagaaaaacccaagaagttctctctgataatttctgggtaaacttcgatattgtatttagcagtaaagatatacccattgttaatgaatattctaccgagttatcagacgaacatcttttaagtagccacattgtttactctaatatacaaaaggttgcatcaactcgcgataatgcattaatcaatagagttccttctgatttctttgatttaattatcattgatgaggctcatcatgcacctgctcagagctggcgtgatacgctccgttatttctctaatgcgaaaatacttcatgtaacaggaacaccttatcggggagataatcaggaaattccgggagtaagaatccatgaaacacctttatctgaagttatgagagataaatatgtaaaatggttaagaaaagaaacagtcaatgcgcatgagttatttttttcaactccagagcaacccggcataaaattatctaaagagcaaatactaatgctcaaagataaagaatggattgaaaaaagcatcgcattatctaaagagtgctctttagatgttatagaccatagtattagtaaactcagagagcttaaagaggcctcgccaaacgttcctcacaaaattttatctgtgggttgtagtatcgctcatgctgaagacttacttacttggtataaagacagaggcatgacttctgtaatagtacatagtgaaatggaacaaagtgaattagctgatgcattaatgaaagttgaacatcatcagtgtgatgttgtcatttccgttaatatgttaatggaaggctatgaccataaatacttaactgttcttgctatatttaggccatatagaagccttaatgcttttgctcaagttgtcggtcgtattttacgagttattcctgaatctgaaatcacacatttcgaaattgataataatggcatagtgatatttcatgaggaaataggcctaaatgtgatgtgggagaatttccagaatgaggtagaaaaagctcgtagagcaactgtacgcgagtatacgtttactgatagagactatgtcgaaagaggcaacgaattagcaggagtcgaaagtgaaagtgcttatgtcagcgataaagattcttacttaaacgacattgacttcaatgcgttattcgaacaaaaacgccttgagataagcgattcggtaaatcagcaaatagaaaaaattagactggctggcctagaccttccagaggatacattagaagagttacgccagaaattagctgaaaaagaagttcagaaagctgctgaatacattgatcctgagttaattgagaaaagacctcaccaagcaagaaaattaatgagggatattctgaaaacacgcactcaagacgcggtatctaatctactgattgataatggtattggtgagaaaagctcagagctttatgcgatttttagccgttacatgccatatttaaagacaaatgaggctaatgatgctatattggttcgatatgtttttataaagctagccaaagcttatggcccagttgataagcgagataacaaagcccttctccagtcgattaatgatttagataaggttctcgcagaagttgagaggatgattaaatga

SEQ ID NO: 198270 - DNA, 423 bp, Klebsiella oxytoca
atgacaaactatactcaaatcatgaaagagattaataaaataatttctttttgcatggtaaaaggggtgcagcctcatgagttagttacatctatttttgagcgtgaatatcaacacatcgaaacttataagaaaggtgagctagttcatttcattttaacttattcagacattcatgatgatggtgtcaatttaattaaaatgaaatatgtctataacgataaacaacaattactatcgattgctcaaaaaattgattcctcaagctataagatccaatgggatcgcagtgaaaagcttgatgcactgctcagtaacctggcatcgcagttgcctaagaacagttcgattatcagtcaacttagagaggcaattcctgatgattttaaaactattttttatccagttttaaaagttgcctga

SEQ ID NO: 198271 - DNA, 399 bp, Klebsiella oxytoca
atgaatttcttcaccggtactcagccacacggacagggctccgcgcaggtaatgcgccgaacggtcgagcgcatggcaggtcaggagtgcgggctgctggctgagacccatcagctccggggcgagctctgtcccgtgcgcctgcataaagtcattcagccggttgcgaatacggatgcgctgcaccgcttcatgggagcggatatagcgtccggcggcctgatttatctcccattttttgacatcgataatgtcgcgcagtgtctacattctgcccggtatacggtcattcccgaccagcacctgtacccagtattcctgctcggcggacgcgagttcggctttatggttcaaccaagcggtttcgttcttctgacagacctcaaaggcctactatag

SEQ ID NO: 198272 - DNA, 213 bp, Klebsiella oxytoca
atgcatcaggtggttaccttcctgaccaggaaagtgagcgacttctccgtcacgccagcggataagccggtgctctccctgaccagcttcccggccgtcgcgcttccgcatatggaccacgacgccgccagcacgcccggtcagcgtaaggtctggcaggagaaaatccgtcagcgcaagacggacctgaaagcgcgggggctgctgccatga

SEQ ID NO: 198273 - DNA, 981 bp, Klebsiella oxytoca
atgacattacctaaatattcaagtaatattgtatggcgagattataaaattgacacccctacttttcgccttagtccaattgaaaagccggatatgtcaccatttctattccatatgacaggaaagaaagcggtgacgtctattttagcccctgactttgatggcgtcaataaaaacaccggctttatccgtgcatctattcctgaaaaacaaggcgaggaaagaaattacgatgcagaagttgtttgtttaactgagtcccctacattttgcttagatttttttcgttatcgcagtttcagaagatggaaagaagatcaattgttcggtataggattggataaaagtgatctggctcaattaggcgccagaccttgtatttatgcagatgagcaactaacgagagatctgatagcaattaagcatattattgaaaatgaagagataagagatagaaatcttagtgatagactacgttctatgataagcagggcttatcctctaataatgccattattggaaaataaattcaatcaagggtttatgtgggaaagagaatggagatatgaaaataacaaggatagagggttaattttcccctacgctgcaataaaaattatatgctgccctgaggatgaagaatatgagattcgacagattttagggcggtatgttgaaaacataacctttgtgagatcttggaaagaatataatgaggtcacaaattttctgaaaaatgcaagaatgacaatgcatactccgaaaaaaatagcttacgatagtgatgaggagtatttaaatgctttagatgagcaattgttaaatcacagaaatgtattcaatcaaatagatggctttaaagattttattgatgcaatcgaaagaaaagggtctactacaatcgaagctctccaagaattacaacaaacgatggactctatgattcagcagattcaaaatattcgagataaactcaaatga

SEQ ID NO: 198274 - DNA, 435 bp, Klebsiella oxytoca; identical to SEQ ID NO: 180801

SEQ ID NO: 198275 - DNA, 660 bp, Klebsiella oxytoca
atgttgagagttatcgacacagaaacgaccagtctggaaggaagtgtactggagattgccagcgtggatatcgtcgacggcgttatttgcaacccgatgagcgactttgttaagcccactgaggcgataagcttcgaggctatggctattcaccacatcactgaagatatggtcgctgacgcccctctgattagcgaagttatcggccgttacctgggcgctgatgcgtatgttgctcacaacgcaaaattcgataagtccaagttacctcagattgacgccccctggatctgcacgctgaagttggctcgcatccagtatccggaatttgagagccacggtaaccagtacatgcgttatcggctgggccttaagcctgagttgcctgaaggcctttatgcacaccgcgcgctgtatgactgctatgtcacagccgaactgctgctgtatatgggccgcctggctaagtggacgatgggagaaatgcgcaccatctcaaacagcccgtcactgatgaaagcgatccgcttcggtaagcacaaaggactgtccttcgaagagatagccaaagttgaccctggatatctccgttggttgtccagcaacagtgacgacgaagacatcctgttcaccatcaaacactggttgaaaggagcctga

SEQ ID NO: 198276 - DNA, 144 bp, Klebsiella oxytoca
atggtaagtcagaacgcaatgctggcgctggccatggtgattctcgcctatgacctgcagccagtagacctcgaaagcgccgctaaacagctggctgaatttgatgcagtcaacgacgcacacacggagacaaaagaatgttga

SEQ ID NO: 198277 - DNA, 171 bp, Klebsiella oxytoca
atgaaaataaaactccggtttctgaatgttatcgtgacgccgcgctccaaaaaatcatcaggcgatgatttcagcgcatgcacctgtcaacaaacacaacaatcaagttttatcagcgactgtctgattgccaacaatcgtaatgacggactgtttttctcgggtgaataa

SEQ ID NO: 198278 - DNA, 1434 bp, Klebsiella oxytoca
atggcgactatcgtacaaagtaatatgaagcttaaaggtaatgtgaaattaccttcagttaatgcccctcttcctgatggtgctaattttttcgctgacttttctactggccgttatgtggttaagcacgccagtggtaacgtcatccgttcagcatccctgacggatattctctcattcacccgtgcttcgactgcgacccgagtaggtgagacgggcctgattgaatacctgcaggctaatgagccgtcaatcaattatcacccgatcaccggcgagctgctgggagtatctactgagttctccagcactaaccgcatcgcctggagtgaagacttcaccaaaacagccagctggactcctgccggggtatcgctgactcagggtgatgcggtatcccctgacgggaacatgacagccaccaaactgatagaggctactgactctgctgcagccgcaagaacgctgctggcaatcacgaccagcgacgcagtggctgcatcaccatacactttcagcatcttcgccaaagccaacaccgccggggtgattcagctggcggcgcagggggctgttgccgcgactgcattcgcaaactttgaccttaaaaacggcaaaattggtaaggtgtcgcctggctcagcgacagtgggtgtgcttcaggtgagcatggagccataccgcaacgggtggtaccggattgcaataaccatcacgccgaatgccgcggcctcaccaaaatttactgttgccctggttaatgatgacagcagcgccggtgccgttccgtcatacctgccaacgacgcccaaatcagtatggatttggggggctcagcctgagcgaggggatgggtactcatcgtacattcctgcggcaggcgcggaggcaacccgcgcgagtgtaatgtgcaccacgccatccaccacgcagtttatttctgcgcagggcggtaccatcctggttgacgtcgttcaccctcatagcctgcagacgttaagcggaaaatacaactctctcgcctgtgcagttgtgctggataacaccgcagtgggcccgcacattcggtttgcatatcgcccgccggcatcgggtacggctattggaacgcctgagggtgcagcgcttggtgtggtaccggactcatcagggacagctcagaatctggaaatacccagtctttcgactgttccggatagcgagcagtcgtgcattttttcattcgatgcggcggcgctgaccacccgactgtttgacggatataactggtatgaacgtagcgtgacggcaacgcctccggcgctgaatcgccttaccattggccgctcataccttgttgcaaacaactacttcaacggttttataaggaaggtcatctactggccaaccgcgttgagcaaagaggagatggaggaagctctctcttatcagtag

SEQ ID NO: 198279 - DNA, 2511 bp, Klebsiella oxytoca
atggaaaatatatttaaaatgacagggggtgtccttaatcgctataaactagatattccttcctgtccttatccattggatgtggaacgttttgatggtttagaacaaatgagtgctctatatcattacaccattcgttttaccagttcacatccggagcttacggctgaaatgatgttaagtaaaaccgctacgctgagcataggggtgggagaactatttaattctactgtcggtaaaattgttcatggcgtggtgacaaatttccgacgcctgatcggttcacgcgatcaggttacgtatgaaattattctggaaccctttatatccttactggataagcagtttcgtactcaccgtttcttcgtcaacaaatcagtgccggaagtggtagcgcaaattcttggcgagcatggtttgaaagggtgggaatatgaattcaagcttaaacaaacctacccaaaacgggaacagataaaccagtaccaggaaagtgaccttgagtttattgaacgcctgctggcagaggtggggattttttacttcttcaccctgcagcctgacactcagaccgaagtggtgcacttcgcggacaagcagagtgcctggacgtttggtaagaaactgccgctgaacagcccgtcaggggcgaatgacaatgcggccgactcggtgtggggcgtacaagtctggcataacgtggtggagcgttcggtcaccgccagtgactacaaccaccgcgaagcccagagcgtcctgatgtccgtaccggctgacatgacccgcggcgacggcgaggggaacacctacggtgatgtgtaccattatcgcccgcgtcaccttgaacgtggcgacaaaattacaccgccggcagaaaccggtaacttctgggcgcgtctggagcatgaacgcttcctgtccacccagaccacggtgaccggcagcagcaccgaccacacccttggaccggcgcaggtactgactattaccgaaatggctatcccgccaacactgccccgtgaaacggagaacggtgttgttattatccgcactggctactacgccagccgtaagaatgccctaaaagtggcatgggtagcgataccctactacgaaaaccgttgctggcgccctgcggctaaaaagcgcccggtggtcagcggcaccctgacggcacgagtgaccagcgccaaagataacgatatctacgcctggcaggatgcctcgggcatgtatcgggtgaaatttgatgctgaccgcgatgacaagcgtcagggcatggaaagtatgccggtgcgttttgccaaaccttacggcggagacaaatacggcttccacttcccgctgatacagggcacggaagttgctattgcattccacgaaggcgatccggatcgcccgtatatagctcacgccctgcatgactcccgtcacgtcgatcacgtcactgaagccaacagcacgcgcaatgtcatccgtaccgctggcctgaacaagctgcggatggaggataagcgcggcgaggaacacatcaagctcagtacagagtatggcggaaagacccaactcaatttagggcacaatgtagacgcttccaggaaacttcgcggcgaaggtgctgagcttcgtactgaccgacatgtttccattcgcggtggtgctggtgtgtttattacggcagataatcagccaaaagcacagggagaaatgcttgatatgaattcggcagtcgcccagttacagagtgcgttacagctggttaccgcactggcacaaagtgccggagcttccggcgcactggacgcggatatcccttcgcaacagcagcttgcccagacactgaatcagctcaaagaagctggattattattgtctgcgcccgcggggattggggccactacgcctaaaaatattcaacttgccgcgggccacacccttacagccaccgcaggtgaaaatgcggatatgacgattttcaaacgattgaccgttgcggcgggtgaagcaatcagcctgtttgcccagaaaatgggcatgaagatcattgctgcgcggggcaaggtagatattcaggcacagtctgatgctatgagacttcaggccgatcagcaaatgatcattaatagtgctaatggtgaaattgtactgaatgcgacacagggaattaccctgaccagtaaaggcggtgcttatatcaaaatcaaagatggatctgtggaaattggagcgcccggaaaaatcgatctgaaaagtacaaatgtcctgtgggggggaggtgcctctcttgaacaggcgctgaaacctgcaacagtaaaagatccgcagtatcaattccctttgagcggtgggtttcaggtagtggacaaggtcactcaaaaacccaaaccctgggtggcttatcgtatagaaacgcgtgagggaaaaattgttcgtggcaggaccgatgaaaatggctatacgcaaaaacactatggtattgaaccacagaatattaagctattttttgaataa

SEQ ID NO: 198280 - DNA, 2328 bp, Klebsiella oxytoca
atggatactaaagcgaatgctgaatgtcagttaaaaaaatctgaaaataacattactcaagtctgtcacgaatcaggggtgctctatttccgccctgaaactgaagaaattattgtcgttcctgcgcaggacgcgggcgattttgaaacgcactgtcttgagatgttggggtgtgttgatgaattccatcaagcaaatcgtgcttattctaccgcagtagaaaaatatggtcagcaaagacagcaagctggtgtggatattgattccctgactgcggaagttgttgccgcagaaaacacgctggaaaaaaagcgtgaggcgttgctggaaaaactcaaagagggagaaacaagcaatatgggatatcaggatgtggtggagctgctcccgttactcgatacccgcagaagggggccagggaatcagcggctgggtcggcgttatgcctatgcccgccagagctattattctgaacgttctggtgggcgttctcaggccggggctaaaaagaagtggcgtactgtctcgctgaagaataaggacaccgcaaccggaaaagagagtatctatgctgttgacagtcacggtcgccgaaagattgataccaaaaaactgaaagagcagctaagcaaagagatattaccaaaattaaaaatagaacttaaagattatgttaatctggacgattataatctggacgaaacattatttgactgggcaaaaagctggaatggtagcctgagtggttcgcatacttttgataacggtattgagctgtcgggagcagcacagtttatgcgcttcatttctaatgttggcgcagaggcggaatttaacccgaatgagggggggctgaaatttaagggggaggcaaaagcatctgtagcgatcgcatcaggtattggtcgcgccgacttttatattccggaccgactgggctgggatttacgttatattccaggagaggaaagtgaggccggtaagacggggcaggtgttaacggggttgaatatgggggtggtgcggatttatattgaaaaccaactcattggttttgtcggtgcttccgcacagatagaagctcagcttcaggtcatggttcaagataatgagcagcaggtcgttgctggtcagcggcagggacgaattcctcgctttcaggagcggcagggaggcaatagtagtcagttttataaacaaatgaaaaaagaggatgaaggcgtaactattgcagcggaggcctttgctggcgccagtgcagaatactcgctaaagggctctgttcagtggctaaagcccactcctccgccatctgcggatagtataattatcacaaaaacgacaggggagtttaccgactttgctaccatcggtgccagcattggtggtctggcggggattggtgcgggtgccaaattcttatgtacctttattaatggtaaattctgctttaaggttgccgccagcttgtgctgcggagtcggagcaaaaggggcgtttctgtgcgaggttgggggaaaagccttgctggagtttggtagctggctggcctatcagctatttgcgctggattatcgtttttttgatctggtggttaaggaggcttttgaaacctttacccgaatatgtgtgatgcagatagcggatttaacgaaaaatgtctatcaggaatacaatgagattaaagaaagtattgattccattgtgattaaatttgaaaattttgtaacaagtttaattgatgagaataaaaaaaatattgatgcttccaaaaaacgcaaccagttagcaaaaaatattatagctaatccggaaaaactattaacctatacgcctgaggcgaaaggtattttattgtatttgctgacccggcacggtaagtgggatcatgccgatatggataaccgcggcagcctgctgctggatatctactctgagcgtaaagaggcggtgattcgggtgctgtgcagcattcagaccaggcgtgagtggcttaaggtgatgtgtcaccgcagcccggatggtgccgatctggcgcaggtaggttcggaacagcaggtagcggcggagcaggagcggcagttgcgtgaattcctccaggagggttttaaccgcgacctcgagatggatcgcagggccgctgaactcgcggcgcttgagctatcggaaatctatcaccgcctgaaaacggggcaggaactctcctggggctatgcgctggcgatgaatgatactttctggtatagcctgaatcgggcacctaacccccactttccacagcgctgtgagtttggtccctgtgaagccaccatgacgcaaatggtttaa

SEQ ID NO: 198281 - DNA, 987 bp, Klebsiella oxytoca
atgaaacaatatgggagctggttgctggcaccgttgctgctggcagcctgtgataacacctcgtccgtaaaggcggcaccggcttccaggcagagtgcgcagcacagtgctgaattgcaaaatatgatccgtcaggtcaaaaataatctggtatttgtggcggggggggactttctgatgggtgactttggtaaggaatacggcccagagaaaattcagcttgatactaaaaaagacagtaagccactgcatcgggtgaccttaaccagttactctatcggtaaatttaaaaccaccaatcaggaatatcagctttatctaaagctgaacaacttacaattaaaaaaatcagataattttttgattcaaaaagactgggatgcccttaacaagcttcctgatacgcctgcacatatggactggttcgatgcagagaaatattgcagctggctgggtaaggtgagtggtcttccctttgctctgccgacggaagcccagtgggagtacgcggctcgcagccgaggacagttttttattgttgggaccaatagtggtgtactggagatgaagggcgttaatcgtggaattaatatttccggagtgctggaccgtgaggattttgcggtaaaaatggggataaagagcggaacgatgaccgcaatgccagtagatcgttatcctcccaacccattggggctctacgatgtggcgggtaatggttacgactgggttaatgactggtacgatcctgattattataagagctctcctgccgaagaccccagagggccgaaaaagccgatatataagaattatgaaggaatttatgatactgaggcaaagtatcaaaaggtgctgcgtggagcgggaacctctggtcccttaaagggaataacaatagcgagagctaaacgtagtccggatactaaaactattagtgatacaacagtccgttgcgtagttaacagcccgcaaaaggtaaaatag

SEQ ID NO: 198282 - DNA, 309 bp, Klebsiella oxytoca
atgtgccaccgcactccggatggctccggcctcgcgctggatggagaggaagagatagtggtacaagaacaggagcggcagttacgtgagttcctgcaggaaggttttaatcgtgatgacgatatgaatcgtaaagccgctgaactactggtgatgcaaatatttaatcgcttaaaaactgagcaggagctctccaggggctatgcattggcgatgaataacaccgactggtataacctgaaccgtgcaccaaatcctcattttccgcagcgttgtgagtttggcccctgtgaagcaactatgacgtaa

SEQ ID NO: 198283 - DNA, 969 bp, Klebsiella oxytoca
atgaataaatatggaatctggttactgactccgttactgctgagtgcctgtgatgataccacctcagcaacatcaacggtaatgtctgaactgagtcaacaacataatactgaactgcagaatatgatccacctagtaaaaagtaatctggtatttgtaaaaggtggcgattttctgatgggcgacttcggcgcaaaatacggtccggagaagatccagcttgatactgaaaaggatagtaagccactgcataaagtcacgttaaccagttactccataagtaaatttaaaactactaatcaggaatatcagctttatcttaaactgaataacttgcagttagaaaaaacagccaattcactgacgcagaaacgagtcgatgctcttaataaactgcctgatacgccagcgcatatggactggtacgatgcggaaaaatattgtacctggctgggtaagattagtggtctgccatttgcgctgccaacagaagcccagtgggaatatgcagcccgtagtcgggggcaattttttattgttggaactaatagcggtgagctggaaatgaatggcgttaatcgtggaattaatatttccggagcactggatcgcgaggattttgcaaaaaaaatgggattgtctggtggtagcatgattgctttacctgtcgatagttatccacctaacccgttggggctctacgatatggcgggtaatggctttgaatggatcaatgactggtacgatccggattattacaaaaattctctggctgttgatccccggggaccggaaaaaccggtgtttaaagatgatgagggcaattacaccaaagtgctgcgcggggctggctattcagggcctttaaatgggttaaccattgctaggtttaatagaaaaccagaaacagatgtttttatttcgacaacagtccgttgcgtagttaacagcccgcaaaaggtaaaatag

SEQ ID NO: 198284 - DNA, 1191 bp, Klebsiella oxytoca
atgcccgttgaattaaaaaaaataccagagaaaataccgcttcctgaaccgccttcagcattccgatggcttattgccatcgtgctgatatccgtactggggggaatactggcgctttatttgtggccggagaaaatgtccacgcattccgcatggttctggttttgcatttttgccataccgctgtctgctggattggcctgttatgcctttcggctacgcgcttatgaaaatgaacgtgatcgcgtgaactactggaatcatcttcatcaggagcagtatgatatacaagtgaagagaggacggcacccggcaggcgttttggggaaagcgtatatcacccccattgcccgtaataaactggcttccgcccttataaaccatggtagccagttacaatcaacttattttgcccatcttcagcaggcactgactacggcccgacttgagccttccacctcgcatttctcaaaggaaagctacagtacaaggttaatcggatatatcacccagcttcttcgcatgctggagccggatttgtcggtgctaccctcagacaaattgtctgttcgtctccgtcacgacggctctctggataatgcgcaaatctcacagatttggcaggcgatatttccggcgtcatatcccgtggattcacttgtggtagagcaagaaggcgatggcatgatgtggctggatgccttgctagaccagaatgaggcggcgctgacgctttctgttgaaatcaacctgtttattgatcccctggattatcagtctgaatcggtatcggcactgttgctggcctctccgacatggcttgctcaacatgatgttaaacctgaggccgtcattcatcgtcccgtaatcgccacggaggatgcctgtaccctagaagatatgttgcgttggggaaagctgtctgtggatgaaacccacacgctctggcgatggctggtcgataaagaggctatgacgaggttaattcagcagtcagaaaggcttggttatttcccgggacaggacgaaggctatatgccggatgatttatttggtaaccccggagcggcattgggaaatattgcattgctctgtgcctgtgagtacgccataacatccggtaaaccacagtgggtaatgatgaccgataaaaccacgcatcaggtaattgtgcgtcaggaagagtgttga

SEQ ID NO: 198285 - DNA, 2154 bp, Klebsiella oxytoca
atgataaagaaaaaacggataagcacctggctcactgttgcaattattattatcgtgagtgctggattcatctggttaaacaatccgttcgtacgccttgccgggcaagaaaaaaaattgatggcatcacttattgtggtctctatctgcctggggattttgctgtttgatgcgctgtttgtgcggttatgggactggctggtctctttaagttttattcagagatttaaagtcctgacagggatgaaaccagaacagccagagtatgaacagaataacaaccgacgttatgaggttgttaaagaaatccgtaccgagatgcgccatctctatggtcggcgctggggacgtaaaacacgcatcctgctggtcactggcactgtatctgacgtggagcaactgacccctggcctgacgggccagctctggcaggaagatcgcggcacgctgttactgtggggcggtgacctcagtacgccagccgacagtgcctggcttaccgcgctgcgcaaactgcgccgtctcccggtagatgggctggtgtgggccacttcagcctttgaccagctctcagcgccagggctggagcagccgctgccggcaccttcagacagcaccatggattccctgtctcacgccatcagcgtacgtatggaagcgcttggctggcagctcccgctgtatgtctggtccctgcacccgcgtgccggtaaaccggaaggacgcattacgcaggcaaccggctgtttgttacctgccggttgccgtaccgaagggctggcagagcaactgtccgccctgacgccagatttgacttcacaggggctgcagcagacctgcggtgaagtgaaacataacttcctgctgacgcttgccgaccagctcattcgtgagccggaaagcgtgaccgcaccgctgtcggtgatactcaatccgtaccgtccgcttctactggccggcgtggtgttcagtcagccttcagccggtgccgaacgtgccgtgccgcaccactggggcatggataagcgctgggatgccctgccggagtctgtccggacactccctgccggactacgtccgtacaagcccggcattccgtggcgcagggtgatggcgtctgttgttgctcttacgatggtcggctgggctgcgtggatgggcatcgcgtatgtcaccaaccgcagccagattgacagcgctaatgtccaggcggcacttgccgcccgacagaatcagcccctggagcagcgcctgcacgcgctgtctgaactgcaaaaaacgctgtcccgtctgcagtaccgctctgagtttggcgtgccgtggtacgagcaggccggactaagccagaacaatgcgttgctggacgcactctggccacgttaccaggacagcgcattgccgctgctgcgggatgccgccgctgaccatctgcagagacaacttaatgcctttaatgtgttgccagcgggcagcccgctgcgtgagcagatggcaaaaaacacttatgaccagctcaaactctacctgatgctggcgcgtccggaacatatggacgcggcctggttcggctctgcattgctgaatgactggccgatgcgtgacggtgtaaaaaacggcgtctggctggggatggcgccttctctgctgtcgttttatggcgtgcagctggttgcgcaccctgaatggaaactgcgtgctgatgaaaatctggtcagccaggcgcgttccctgctggttcgtctgatgggcgtacgcaacagcgaatcgaccctgtaccagaagatgctcactcaggtggcgcacctctatgtcgatatgcgcctggaagacatgaccggcgataccgatgcatcccgtctgttcagcaccacggaagtcgtgcccgggatgtttacgcgtcaggcctgggagcaggccgtgcagcccgctatcgagaaggtggtgaaggcacgccgggacgaactagactgggtgctggctgacagcaagcgtcagatgaataaacaggacgagacctcaccggaagcgctgaaacatcacctgacggaacgttactttgccgacttcagcggggcatggcttgagttcctcaacagcctgcgctggaaccaggcgaccacgctgtcggattccattgaccagttgtccgtttaa

SEQ ID NO: 198286 - DNA, 195 bp, Klebsiella oxytoca
atggctaaaatgataattaaaaagccgctgaaaaagcatattaacgcttgtcatcctcagctgaaaaaggctgaggaaatgaataaaaaaaacgagaaaataacgatggcaaacgtttgtctgattatgatggaaggggctaagtttcacgaaaaattagcattcagcgtaacgcgagaaatgcctgggcaatga

SEQ ID NO: 198287 - DNA, 1188 bp, Klebsiella oxytoca
atgccactcaccgacacaaaaataagaagcgcaaagccgcaagagaagccttaccagcttcaggacgggcaggggctttaccttgacgttcgcccttctggtgcaaaaatctggcgctatcgtttctggctgaccccgaaaaaagacgggcgttacacaattggtgagtatccaggggtatctctcgcggatgccaggagagaaagagagtgggcgagagaacaagttaaacagggcagaaatccaaccgtagtaaaagacacagagaagatggttgtctttggcgatgctgccaatacgttttcatcggtagccaatgactggtatgaaaggaagtgcatttcgtgggctgaaaagacgatggaagtgaatcgtggatacctcgacaagcacatactgccctacatcggcaagatacccatcaaggatgtgaaggctgcgcatattctttcgataatgcgatcgcttgagaaagaaggtaatgcatattcggcggggaaggtcaggcagatttgctcatcagtgttctgctatggcgtcgcaacgctaagggctgaagttgacccggcggccgcacttaaaggtgcagtgatacaaaagccaactactcacgcgcgccctgtttcgactgaagagataaagcaactctttgcatcgctcaggcattacagaagcccgacgatggtcattgcgattaaaatgctgattatgacattcgttcgtcagcaggaactcaggaatgcgcgctgggaagatatcaactttgaaaaagctgaatggaacatcccggctgagataatgaagaaaagacgcgatcaccgcgtccctctctgctcgcatgttatcgcattgcttgaagaactcaaaggtctgaccggccagaatcagttccttttcccgagcccatcaaaacccgggcaggtcattgctaaaacgtcgattaaccgtgctatagagtatcagggattcacgagtggtgagataaccgggcacgatttccgcgccacggcatctacgatactgcacgaggagggattccggccggaggttatagaggcgcaactagcccatcagcagaagaacagagtcgccgccgcctataaccatgccgagtatatgaaggagagaaaggagatgatgcagtggtggggagattttattgctggcctgaacgtggacatgaagtga

SEQ ID NO: 198288 - DNA, 219 bp, Klebsiella oxytoca
atgagctcagaaattattgacgccgcacaggactacatcgacaaattcactcaggccggagtagaccgttgccgcattaaccacaacgcagtatcagcaacacactgcattgattgcggtgatggcattccagagctgcgccgggtgaaggtgccaggatgtcagcgatgtgccagctgtcagggtgattttgagttgttgagtaggagaaaagtatga

SEQ ID NO: 198289 - DNA, 225 bp, Klebsiella oxytoca
atggaatggataaagtgtagcgagatgatgccgccttttggagtgtacctggttatgtatgaatttggatgtcctggcgggactctaaagcatgctgtggcgcgttatataagttttgatagaaatccaccaaacaaagatattgtttcagattgggtttgcggtgttaagggtgtacacaacatcactcactggatgccactccctcccccaccaaccgaataa

SEQ ID NO: 198290 - DNA, 186 bp, Klebsiella oxytoca
atggaaatactccatatcgaatataacaatggcacctcagaatctatcgaaaacgtacattgcgttattgaacattatgatgacgaaatcagttatttcatcggagccggattcactagatatcacgcgctggatgttagattttttagcgtagaggaggttgggcatggaatggataaagtgtag

SEQ ID NO: 198291 - DNA, 720 bp, Klebsiella oxytoca
atggacataaaagacatcaggcggaacaacctccgctaccaacaaaacttagcgatcagaaatggtctatctaaagctgacttcgcagaaaaggtcggcacatctgcgtccaccctaagccagatcctcggggataaagccgttagaaatcttggagatgagctagctcgcaaaatagagcaaaatttagggttattgcatggctggttagaccaacctcatccagagttagatgaagctgaaggtcgtggcgaagccaggattatcggtggaattgaaccctgggataaccagacatcactggacgatgatgaagttgagattccgttcctgaaggaagttcagttggctgcaggggcgggtagcgcttttagagaagatcacaatggatataagttgagatttgctaagtctacacttcgaaaacttaacatacagtttagtgatgctgtatgcgtagaggttataggaaatagcatggagcctgtcttaccaaacggctccacagtcggcgtcgatacaggatgcaaagaaattaaagacgggaagatgtacgctatagactatggagatttgctgagagttaaggttctttatgcaatgccaggtggcatgattcgcatccggagctacaacagcgaagagcacccagaagaacttagaccggctaaggatatccgagtgataggccgcgttttctggtcctcagtcacctactaa

SEQ ID NO: 198292 - DNA, 273 bp, Klebsiella oxytoca
atggaaaccaaccaaaagcagtttgagcagatgaatgatctgcttcgctggcggaaacaggcttccagagaggattgggaaaagctggcaatgcttgcaaataccacccctggaaatcttgaccagctggcttatggataccgaggcgcgtcggcaaaaaaggcaagtgatatcgccaatgcgtcccttaacttcagattccctaagcctgtaaccaaagaagcaatagccttcccgcccgttcggaaggtctcaagtaacaaagcagcatag

SEQ ID NO: 198293 - DNA, 261 bp, Klebsiella oxytoca
atgaaagaagctacggtaatcatgcactttgttctggcttcgataggcatgctttacatcatgtgcaaggctgtagagtggattgtgtccatagtccttaaacaatggtgcaagcgccgcaaggagtcagtaaagcagcgggcggttaacgatttgtatgacgccttcgaactcgggaaaatcaccccgggtgaaacagtaaaaatcactaccaaagacagcctggtaatcatgatgtatcgggagaaaacggaggtgtaa

SEQ ID NO: 198294 - DNA, 414 bp, Klebsiella oxytoca
atgaaagaaaacgatatcgcaggtattttgacctcgacacggactatcgccctggtgggggcaagtgacaaacctgaccgcccaagctatcgggtgatgaagtatcttctggagcaggggtatcacgtcattcccgtttcccctaaggttgcgggtaccacgctgctggggcaaaaagggtatgccacgcttgctgacgtgccggaaaaagtggatatggtcgatgttttccgtaactcagaagcggcctggggcgtcgcccaggaggcagtggctatcggtgcgaaaacgctatggctacagttgggggtaatcaatgaacaggcggctgttctcgcccgagacgccggtctaaacgtggtgatggatcgctgtccggcgatagagatcccgcgattaggattagcccgttaa

SEQ ID NO: 198295 - DNA, 474 bp, Klebsiella oxytoca
atgtggaatgaaatgatggaactaacaacacgtaccttgccagcacgcaagcatattgcgctggttgctcacgatcactgtaaagatatgctgatgaagtgggtcgagcgccaccagccattgctggcgcaacacacgctctcggcgacaggaacgaccggaaatctggtgtcacgcgcaaccgggctggaggtgcatgcgatgctgagtggtcccatgggcggcgaccagcaggtgggtgcgctgatttcagaaggtaaaatcgatgtattgatttttttctgggatccgctaaatgccgtgccgcacgacccggatgttaaagcgttattacgtttggcgacggtatggaatattcccgtcgccaccaatgtctcaaccgccgactttattatccagtccccgcacttcagcgaccccgttgatatcctgatccctgattatcagcgctaccttgcagagcgtctgaaataa

SEQ ID NO: 198296 - DNA, 2034 bp, Klebsiella oxytoca
ttgggcaagcgtatggctcagcatccttatgacagggtgcaacttcttaatgccggagtaaaggtttccggtgatagccatgaatatcttatacctttcaatcagttattatcaattcattgcaagcgtgggctggtttggggggagctggagtttaccctaccgggcgagaaagttgtgcgtttgcacggtaccgaatggagtgaaacccagcgtttttaccatcatctgaacacgctctggcagcagtggagcgcggaaatgagcgatattgccgctgatgtacttcgccagcagctggcggaagtggcgcgttccagcgcggaaggtaaatggttgacgcgtcagcaggtaagcgatattcagcgcaaaatacgccatgcgctgagcggattaccagtgccgacagtccgtcttgatgcttttgataactgccgcgagctatggcggcaatgccagagttggttgagtaatacggaaaaagccaggctcgagcataaccaaacttttacggaatccatgctggagcaataccgcggattttttgccgcagtggaatcatcgccgttgaatccggctcaggcacgcgcagtcgtaaacggcgagcgttcgttattagttctggcgggtgccggaagcggtaaaacttccgtgttagtggcgcgcgcaggctggttattgacccgtggcgaggcggcggctgagcaaattctgctactggcgtttggtcggcaagctgcgcaggagatggatgagcgcatccgcgagcgcctgggcactgaagagatctctgcgcgtacttttcactcccttgccctgcacattatccagcagggcagtaaaaaagccccgacgatcagcaagctggagagcgacagcgctgcacggcaaaaacttttagtacagagctggcagcagcagtgccaggagaaaaaagcgcaggcgaaaggctggcgattgtggctggaggaggaaatggggtggcagatccctgaaggggatttctggcaggacaaaaagctgcagcgtcgtgttgccagccgccttgaccgctgggttagcttgatgcgtatgcatggcggctcgcaggctgagatgattgccggggcccctgaagaggtacgcgacctttttggcaagcgcgttaagctgatggcccctctgctaaaagcgtggaaaacggcgttaaaagatgaaaacgccgtcgatttctccggcctgattcatcaggcgatcaatattctggataaagggcggttcgtcagcccgtggaagcatattctggtggatgagtttcaggatatctccccgcagcgggcatccctactcgccgcgttacgtcggcaaaacacgcagacgacgctgtttgccgttggcgatgactggcaggccatctaccgtttcagcggtgctcagctctctttaacaacggcctttaatcactattttggcgaaggggattgctgtgcgctggatacaacgtaccgatttaatagccggataggcgagatagccaacgggtttatccagcaaaatccgcaccagttaacgaaaccactaaacagcctggtcgcaggggacaaaaaagcggtgacgttattggcggaggacaaactcgacgatctgcttgataaaatgagcggctatgtcaaacgagagcagcggattttattgctggcgcgctatcatcatttgaagccggcggcgctggagaaagccgccacgcgctggccgcatctgcagctcgattttatgactattcatgccagcaaaggacaacaagctgattacgtcataattcttggccttcaggagggggatgatgcgtttcctgcaccggcgcgtgagtcgattatggagcaggcgctcttaccgcagccggaggattttcccgatgccgaagagaggcgtttgctgtatgtcgccatcacccgcgcccgcctgcgcgtatggctgttgtttaataaagagcaaccttcgccgtttgttgaaatgctagaggcgctggatgtcccggtagcaagaaagccatga

SEQ ID NO: 198297 - DNA, 447 bp, Klebsiella oxytoca
atgcgtaccgttctgaatattttaaactttatccttggcggattcgccaccacgctcggctggcttctggcgacgctggtcagcattgtgctgatctttaccctgcctctcacccgctcctgctgggagataacaaaactctctctttttccctatgggaatgaggccgttcatgtcgacgaactcgatcctcagggaaagaatagcctgctaaacgcgggtgggacactattgaatattttatggtttattttctttggctggtggctgtgtctgatgcatatcttttgtggtatcgcccaatgcctgactatcattggcatcccggttggcatcgccaattttaaaatcgccgctattgctttatggccagtaggccgacgagtcgtctccgtcgagaccgctcgcgccgcgcgtgaagccaatgcgcgtcgccgctttcagtaa

SEQ ID NO: 198298 - DNA, 2136 bp, Klebsiella oxytoca
atgctcacccccctgctacgccgctatacatggaacagtgcctggttatataacatcaggatatttatcgcactctgcggcacgaccgcatttccctggtggcttggcgaagtaaaactcacgattcctctaacactcggggtggtggcagcggcgctgaccgaccttgatgaccgcctgacaggacgtctgcgtaatctggccattaccctcgtgtgcttttttattgcttcagcctcagtggaactcctttttccctggccgtggttatttgcggcgggattaaccgtttcaactatcggttttattttgctcggcggcctgggccaacgctatgccaccatcgcctttggtgctttgttaatcgccatctataccatgctgggcgttacgctttacagccactggtatctccagccgctgtttttgctggctggcgcggtgtggtacaacttacttaccctctccggacatctgattttccctatccgccctcttcaggacaatctggcacgcagctacgagcagttagctcgctatctggagcttaaatcgcgcctgttcgatccggatattgaagatgaaagccaggctccgctgtatgacctggcgatagccaatggccagcttgtggccacgctgaatcagaccaaagtttccctgctgactcgcctgcgcggcgatcgcgggcagcgcggaacgcgtcgcactttgcagtattacttcgtggcgcaggacatccacgaacgcgcaagctcatcgcatattcaataccaaacgctgcgcgatcattttcgctacagtgacgtgatgttccgcttccagcgtatgctgtcaatgcaggcgcaggcctgccagaaactgtctcgttctatcctgctacgcgaaccctaccttcatgatactcactttgagcgcgcttttatgcatcttgacgccgcgctcgatcgcgtaaaagccagcggcgcgccggcagaacagattaaggcgttgggatttttgcttaataacttacgcgccattgacgcccaactggcgacaattgaatccgtccagacgactgtacagtccagtcacaatacggaaaacctgttagccgacgatcaacctggcagtttcagcgatatctggctgcgcctgcgcagtaatatgaccccagagtcagctctgtttcgccatgcggttcgaatgtcattagtcctgtgcgcaggttatgcatttatccagttaaccggactgaaccacggttactggatattgctgaccagcctgttcgtatgccagccaaactataacgccactcgtcaccggctggcgctaaggataatcggtacgctcatcggcgtagcgattggcctgccggtactgcttctcgtcccttccgtcgaaggccagctgcttttaattgtcctgaccggcgtgctgttcttcgcattccgtaatgtgcagtacgcccatgcgaccatgttcattaccctcctggttttgctgtgctttaacctcctgggggaaggtttcgaagtcgccctaccgcgtatatttgatacgctgatcggctgcgctatcgcctgggccgcagtcagctttatttggccagactggaagttccgcaacctgccccgagtacttgaacaagcaatcaatgccaactgccgatatttagatgccatactcgagcaatatcatcaggggcgcgacaaccgtcttgcctatcgtattgcgcgaagagcggcgcacagcagggacggtgagctggcatccgttgtatcaaacttatcaacggaacccagagcgggctcgcaaatgcgggaaaccgcttttcggttgttatgcctgaaccacacttttaccagctatatctccgccctgggcgcgcacagggaaaagctgacaacgccagatatcctggcgctgctggacgatgccgtttgttatgttgatgacgcgctgcaccactcaccggccgatgaacagcgggtacagcaagcgttaacaagcctgcaaacccggatacagcatcttgaccctcgtgccgatagcaaagagccgttagtgcttcaacaaatcgggctgctactggcgctgctgccagagatttgccggctacagcaacaggttgagattcaacccgaatag

SEQ ID NO: 198299 - DNA, 624 bp, Klebsiella oxytoca
atgaagaaagttatatgtcttaggatccatcagtttcgggcatgtttgtctccattaggaaaaataagctgtcggcccttatttggtggctatagtctggcgatagataataccgtgtttgccatgatggctgagggggaaatctatcttcgggtttgcgagcagagcgcggagtaccgcgtggcgcataaaaacccgctgttgaagatgcagaagaatggtcgtctggtcgcgctgaagtattatcatatagatgaggaactttggcgcgatagcaaaatgctttttcatttatcggcgctgtcattacagagcgcgcgtcatgaaaaacatcggcagcgacattccggaagattaaaaaatttgccaaatatcagttttcatatggagctacagttgattaattcaggcattacggatgaattaatgctgcgtaagattggggccaaagaagcctggttgaggttacgaaaaataaataaagcgctaacggtgaatattctttattccttacagggggctattgaaggcgtccatgcggccacgctcccgacgcagcagcgtcaggagcttgagacgtgggcaacggaacaaatgcgggagagtgagagctattcgggttga

SEQ ID NO: 198300 - DNA, 381 bp, Klebsiella oxytoca
atgatgacgcagctactattgcttcctttattacaacagcttggccagcaatcgcgctggcagctctggctgacgccacaacagaagctgagccgcgaatgggtgcagtcgtccggtttgccgctgtcgaaggtgatgcagatcagccagctctcccccgctaacaccctggaatccatggttcgctcactgcgcaccggaaattatagcgtcgttattggctggctatcagaagaactgagcattgaggaacatgaacgcctggttgccgctgcagaagagggtcacgcgatgggctttatcatgcgtccggtaagaaataccgctcagccaggcagacaactttctgggctaaaaattcactcaaacctgtatcattaa

SEQ ID NO: 198301 - DNA, 1071 bp, Klebsiella oxytoca
atgaaaaagacagctatcgcgattgcagtggcactggctggcttcgctaccgtagcgcaggccgctccgaaagataacacctggtacgcaggtgctaaactgggctggtcccagtatcacgacaccggtttctacggtaacggtttccagggcaacaacggcccgacccgtaacgatcagctgggtgctggtgcgtttggtggttaccaggttaacccgtacctcggttttgaaatgggttacgactggctgggccgtatggcttacaaaggcagcgttgacaacggcgctttcaaagctcagggcgttcagctgactgctaaactgggttacccgatcactgacgatctggatatctatacccgtctgggtggtatggtttggcgcgctgactccaaaggtaactacgcttctactggcgtttcccgtagcgaacacgacactggtgtctccccggtattcgcgggcggcttagagtgggctgttactcgtgacatcgcaacccgtctggaataccagtgggttaacaacatcggcgacgctggcaccgttggtacccgtcctgataacggcatgctgagcctgggcgtatcctaccgcttcggtcaggacgacgttgctccggttgtagctccggcgccggctccggctccagaagtgactaccaagcacttcaccctgaagtctgacgttctgttcaacttcaacaaatctactctgaaaccagaaggccagcaggctctggatcagctgtacacccagctgagcaacatggatccgaaagacggttccgcagttgttctgggctacaccgaccgtatcggttctgatgcctacaaccagcagctgtctgagaaacgtgctcagtccgttgttgattacctggtatccaaaggtatcccggctagcaaaatctctgctcgcggtatgggcgaatccaacccggttactggcaacacctgtgacaacgtgaaagctcgcgcagctctgatcgactgcctggcgccggaccgtcgcgtagaaatcgaagttaaaggctacaaagacgttgtaactcagccgcaggcttaa

SEQ ID NO: 198302 - DNA, 453 bp, Klebsiella oxytoca
atgaaatatcaacaactggaaaatcttgaaagcggctggaaatggacttatctggtaaaaaagcaccgggaaggtgagcttattacccgctacattgaagccagcgctgcgcaagccgccgtcgatttattactgacgctcgaaaatgaacccgtgctggtgaatacctggattgagcagcatatcaatccggcgctggtgaaccgcatgaagcagactatccgcgcccgacgtaagcgtcattttaacgcggagcatcagcatacgcgtaaaaagtctatcgacctggagttcatggtctggcagcgtctggcaggtctggcgcaaagacggggtaaaacgctgtctgaaaccattgtgcagttgattgaggatgctgagcataaagagaagtatgccagcaagatgtccagcctgaagcatgatttgcaggtactgttaggtaaagagtag

SEQ ID NO: 198303 - DNA, 1758 bp, Klebsiella oxytoca
ttgaccattacgaaacttacccgaaacgacctcgctcctgatacggaaagttatcaggcgctgtttgcacaagccgacttagctcacgcagaggcatccctctcaggcgaactgcaaccccgactcttctatggcctggagcagctcctggtcactccagccatttcgccgtttatgctggttaaaattccggaagagccggagtacctgcagtggctggctaacgaaacccgtactttacaccaaccggcacaaacgctctgtggcgttcgctatcaggttgatggcggaaaaatctcgctctcccctgcgcaaacgactgaagataatttcgccagcgttgcgccggttgaagccgcggactggatcgaagcagagcagctttttggctgcgtgcgccagtttaatggtgaaatcacgttacaacccggtctggtccatcgcgctaacggcggggtattaattctctccctccgtgcattactggcacagcccctgctgtggatgcggctgaaaaatatggtaacccgccagcgttttgactggttatcattcgatgagtctcgccctcttccggtcagcattccctctatgcccctgagtttgaaagttatcctggtcggcgagcgggaatctcttgctgattttcaggagatggaacccgagctttctgcgcaggctatctacagcgaatatgaagataatctgcaaatcgctgatgccgatacgctgaagcagtggtgccagtgggtctggcaaaatgctcaactgctcgaactcccggggctgtcagctaacgcctggccgctgctgatccaggaaggtgcgcgttatacaggcgaccaggaaaccttgccgctgtgcgtgctctggattgctcgccagcttcgcgaagccgccgcgttctgtgaaggtgaagagattagcgctgaagagatgcaaaccatgctggagcgtcgtttgtggcgcgaaggctaccttgctgaacgcatccaggatgaaatactgcaggagcaaatcctgatcgagaccgaaggcgaatgcgtcggacaaatcaacgcactctccgtcattgagtttccgggccatccgcgtgcgtttggcgagccttcacgtattagctgcgtcgtacatatcggcgacggcgaatttattgacgttgagcgtaaggccgagctcggtggcaacattcatgcaaaaggcatgatgatcatgcaggcgtttctgatgtccgagctggagctcgaacaacagctccccttcaccgcctctctgaccttcgagcagtcctacagcgaagtggatggcgatagcgcctccatggccgaactgtgcgcactgatcagctcgctggccaatgtgccgattaatcagagcatcgccattaccggttctgtcgatcagtttggtcgcgtacagccggttggcgggcttaacgagaaaattgagggcttctttgctatttgccagcagcgtgggctgaccggtaaacagggagtcatcattccctccgccaacgttcgtcacctgagcctggcgcaggaactgcaacaggccgttgcggatgagcagttctttatctgggcagtcgatgacgtgacggaagcgctgcccattctgacccagctactctgggacggagaaggacaaacgttacggcaaactattcaggaacgaattgcgcaggcgacacagcaagagagtcgtcatcgctttccgtggccgctacgctggttaggcggttcaggttcgaactga

SEQ ID NO: 198304 - DNA, 519 bp, Klebsiella oxytoca; identical to SEQ ID NO: 189683

SEQ ID NO: 198305 - DNA, 564 bp, Klebsiella oxytoca
atgaagaaatggctaatagcggcggcggtatgcgcgctgacggcatgcagcagcggcggtgagagtaaaacttactatcagcttcccgtggcgcaggctggcgcgcaaagcgccgcccaccaaagcaaaaacttgctttgggtcgagcaggtgagcattccggattatcttgccggtaacggggtggtctatcagaccaccgatgttcagtatgtgattgcgaataacaatctgtgggcgagcccgctcgatcaacagctgaaaacgacgctggtggcgaaccttagcaaccagcttccgggttgggtggttgcctctcaaccgctgggtagcgagcaggatacgctgaacgtgtccgtcagcggttttcacggccgttacgatggccgggtcatcgtcagcggcgagtggctgctgaagcatcaggggcagttgattaagcggccgttccatattgagcttaagcaacaagaggatggctacgacgcgatggtgaaaacgctcgctcaggcctggacccaggaagcgacggcgattgccagcgagattaaccgcttgccataa

SEQ ID NO: 198306 - DNA, 1638 bp, Klebsiella oxytoca
atggaaaataagagcggagaagcgaaagtgcaaaaggtgaagaactggtcaccggtgtggatcttcccgatagtcacggcgctgattggcgcatggattctcttttatcactatagccaccaggggccggaagtgaccctgataaccactaacgcagaaggtattgaagggggcaaaacccggataaaaagtcgcagcgttgacgtcggcgtgattgaaagcgcgacgctcacggacgacctgacccacgtggagattaaagcgcggctgaattcaggtatggaaaaactgctgcaccaggattcggttttttgggtggttaaaccgcaggtcggccgtgaaggaattagcggtctgggaacgctgttatccggcgcctatatcgaactgcagccgggtagcaaaggctctgttcctgcgcagtatccgctgctggattcaccgccgctggcctcccctgatgctaaaggtattcgcatcctgctggaaagcagcaaagcggggcagctttcacccggcgatccggtgcttttccgcggctaccgcgtaggttcagttgaaaccagcaccttcgatgcgcaaaaacgcaatattacctatcagctgtttattagcgcgcctaacgatcggctggtcaccaataacgtgcgcttctggaaagatagcggtattgcggtggatctgactgctgcgggtatgcgcgttgagatgggatcgctgtcgacgctgtttggcggcggcgtcagctttgatattcccgaagggctaccgttaggtgagccggtggcgaataaaacagaatatcatctgtttgacgatcaacgcagcatccaggattcggtgtttacccagcatattgactacgtgatgttctttaaagattcgattcgcggtttgcagcccggcgcgccggttgaattccgcggtatccgtctggggaccgtcggcaaggtgccgttctttatcccaggcctgaagcagaacatcaacgacgattaccgtatcccggtagaagtgcgaattgagccggaacgtctgatcaatcagttaggcgccgatcctgacattcgtaagcatatcgatgatctaatgaatcgcgggctgcgcggttcgcttaaaaccggaaacctggtgaccggtgcgctgtatatcgatctcgacttctacccgaaagcccctccgcgcggcaagatgcaggagtttggcggttatccgattattccaaccgtgagcggtggtctggcgcagatccagcagcgcctgatggacgcgctggataaaattaacaatctgccaattaacccgctgctggagcaggcaaccagtacgctggcgcaaagtgaaaaaacgatgcagcacgtacaggcgacgctggacagtctgaacaagataacgtcaagtcagtcgatgcagcagctaccgggcgatatgcagaatacgttgcgcgagcttaatcgtagtatgcagggcttccagccgggatctgcggcatacaataagatggttgcggatatgcagcgtctcgatcaggttcttcgtgaactgcagccggtactgaaaacgctcaatgataagagcaatgcgctggtatttgaggcgaaggataaaaaagatccgcagccgaagggagcgaaataa

SEQ ID NO: 198307 - DNA, 1269 bp, Klebsiella oxytoca
atgtgcgatcatcatcatgctgcgcggcatatcctgtgtcgacaatgtgatctgctggtggctttgccgcagctggagcatcgccagaaagctacgtgtccgcgttgcggaacgacattgacaacgtcatgggacgcgccccggcagcgtcccacagcctacgcgctggtcgcgttgttcatgctgctgctggccaatctgttccccttcatctatatgaaggttggggggatcagcagtgaaatcgagctgctggaaattccgaacgtgctgtttagcgaggattacgccagcctcggtaccttctttttacttttcgtccagctggtgccggctttctgcctggtcaccatactgctgctggtcaatcgggtgagcatgccttccaggctaaaggcgtttctggcgcggatcctgtttcaccttaaaacctgggggatggcggaaatctttctcgccggggtgctggtcagcttcgttaagctgatggcctacggcgatatcggcatcggcctgagcttcgttccctggtgtatgttctgcctgttacagctgaggacgttccagtgcgtggatcgccgctggttatgggatgacattgcaccaatgccggcgattacacagccgctgaaagtcggcgtctccggcctgcgtcaggggctacgctcgtgctcatgctgcacggcggttttgcccgtcgatgaggccgtttgtccgcgctgtcggacaaggggaaccgcccggcgtaaaaacagcctgcagtggacgctggcgctgttggtgacttcgctgatcctctatatgcccgccaatattctgccgatcatgattaccgacctgctgggcgataaaatgccttccacgattatggcgggggtgatcctgctatggagcgaaggatcgtatccggtggcgatggtgatctttattgccagtattatggtgccgacgttaaaaatgatcgccattggctggctatgctggaacgccagcggcaagggagcgcgcgactcggagcgcatgcatctgatttatgaagtcgtcgagtttgttggccgctggtcaatgattgatgtgtttgttatcgcagtcctctccgctctggtacgcatcggtggattaatgaatatctatccggcgataggagcagtgatgtttgcgctggtcgtagtaatgacaatgttttcggccatgacctttgacccgcgtttattgtgggatcgtgagccagattcaagccatgaggaaagactgcagcatggaaaataa

SEQ ID NO: 198308 - DNA, 1908 bp, Klebsiella oxytoca
atgtctttaattagtatgcacggcgcctggctctctttcagcgatgcgccgctgctggataatgctgaactgcatatcgaagataacgaacgcgtctgcctggtagggcgcaacggtgcgggtaaatcgaccctgatgaagatcctcaatcgtgaacagggtcttgatgacgggcgcattatctatgaactggatctggttgtggcgcgtctacagcaggatccgccgcgtaacgtgaccggaaccgtctatgactttgtggcggaaggtattgctgaacaagcggcatacctcaagggttatcacgatgtttcgcagctggtgatgaccgacccgagcgacaagaatctgaacgaactggcacgccttcaggaacagctggataatttagggctgtggcagctcgatagccgcattaatgaagtgctggaacagctgaatctggatcctaacgccgagctttcctcgctgtccggcggctggctacgtaaagcggccctcggccgcgcgctggtcagcgggccgcgcgtgctgctgctcgatgaaccgaccaaccacctcgatattgaaactatcgactggctggaaggtttcctgaagatgttcaaaggcaccattatttttatttcgcacgaccgttcctttattcgcaacatggcgacgcgaattgtcgatctcgatcgcggtaagctggtgacctatccggggaactacgatcagtatctgctggataaagaagaagcgctgcgcgtggaagagttacagaacgcggagttcgatcgcaagctggcgcaggaagaagtgtggatccgtcaggggatcaaagcgcgtcgcacccgtaacgaagggcgcgtgcgggcgttgaaagccatgcgccgcgagcgcggtgagcgccgtgaagtgatgggcagcgcgaagatgcaggtggaagaggccgcgcgttctggcaagattgtgttcgaaatggagaacgtcaactaccaggttgatggcaaggtgctggttaaagacttcaccgcccaaatccagcgcggcgacaaaattgcgctgattggcccgaacggctgcggcaaaactacgctgctgaagctgatgctcggtcagctgcaggcggatagtggacgtattcatgtgggtaccaagctggaagtggcttacttcgaccagcaccgcgcggaacttgatccggataaaacggtgatggacaacctcgcggaaggtaaacaggaagtgatggtgaacggcaagccgcgccacgtcctgggctatctgcaggactttatgttccatccgaaacgcgcgatgacgccagtgcgggcactgtcgggcggggagcgtaaccgcctgctgctggcgcgcctgttcctcaagcccagcaacctgttgatactcgatgaaccgacaaacgatctggatgtcgaaaccctggagctgctggaagagcttgtcgacggttatcagggaaccgtgatgctggttagccacgaccgtcagtttgtggataacacggtaacggagtgttggatcttcgaaggcgcggggcaaattggccaatacgtgggcggctatcatgacgcccgcggtcagcaggcgcagtatctggcgaaaaaacagccggtttctaaaaagacagttgaagttgctcaaccgaaagcagaaagtgtcaaacgcgctgccagcaaactaagctataacctgcagcgcgagctggaacagctgccgcaaaaactggaagaactggaagcccagctgcagaatttgcaggagcaggttgccgacccttctttctttggtcagtcgcatgaccatacgcagcaggtgctcgcacagctgagtgaagcggagcaggcgctggaaaccgcctttgaacgctgggaatatctcgaaggtttaaaaaacggcgcataa

SEQ ID NO: 198309 - DNA, 2106 bp, Klebsiella oxytoca
atgaattctctgtttgccagtacggctcgtgggctagaagagctgttaaaaactgaactggaagggctgggcgcggtggactgccagttggtccagggcggggtccattttcagggagatacgcggctgctgtatcaaagcctgatgtggagccggctggcttcgcggattatgctgccgctggggcagtgcagcgtatacagcgacctggatctgtaccttggcgtacaggccattccatggaccgagattttcactcaggatgccacttttgccgtgcactttagcgggctgaacgaagagatccgcaacagccagtacggggcgttgaaggtgaaagacgccatcgtcgacagctttacgcgtaagaatctgccgcgtcccaacgtcgatcgcgaaaatcccgatctgcgtattaacgtctggctgaataaagagaccgcgcatatctccctggatcttagcggcgaggggctgcacctgcgcggctaccgcgacggtaccggtatggcgccaatcaaagaaaacctggctgcggcgatagtgatgcgttccggctgggctgccggtacgccgctgctcgatcccatgtgcggttccggtacgctgctcattgaagcggcgatgctcgctaccgatcgtgcgccgggtttacaccgcggccattggggtttcggcggctgggcgcagcatgacgatgctatctggaaagaggtgaagtccgaagcgcaaacccgcgcccgtcaggggctggcggcgtatgagtcgcgcttttacggttccgacgttgacgcccgcgtcatcgaacgcgcgcagcgcaacgcccgccgagccggtattggcgaactgattaccttcgaagtgaaagacgttgcccagcttagcaacccactgccgaagggcccttacggcacggtgataagcaacccgccgtacggcgagcgtctggagagtgaaccggcgctgattgccctgcatagcctgctggggcggatcatgaaaaatcagtttggcggctggaacctgtcgctgtttagcgcctcgccggatctgctgagctgcctgcagctgcgcgctgataagcagttcaaagcgaaaaatggaccgctcgactgcgtccagaagaactatcatcttgcggaaaacgaaggcggcaaaaccgcgatgctggcggaagatttcgccaaccgtctgcgaaagaacctgaaaaaatatgagaagtgggcgcgtcaggaaggcattgaatgctatcgcctgtatgatgccgacctcccggagtacaacgtcgctatcgaccgctacgccgactgggtggtggtgcaggagtatgcgccgccgaaaaccgttgacgcgcacaaggcccgccagcgcctgtttgatattatcgccgccaccattgccgtactggggattgcgccgaacaagctggtgctgaaaacccgcgaacggcagaaagggaaaaaccagtatcagaaaatgggtgaaaaaggtgagttcattgaggtgcaggagtataacgcacgtctgtgggtaaacctgaccgactacctggataccgggctgttcctcgaccaccgtattgctcgccgcatgctgggccagatgagcaaaggcaaagatttcctcaaccttttctcctacaccggtagcgccagcgtccacgccggccttggcggcgcgcgttccacgacgacggtcgatatgtcccgtacctacctcgaatgggctgaacgtaacctgcgcctcaatggcttaaccggccgcgcgcatcgcctgatgcaggctgatgtgctgggctggctgcgggagaccaccgaacagtttgatctgatctttatcgatccgccaaccttctccaactcaaagcgtatggatgatgcgtttgacgttcagcgcgaccatttgcgcctgatgaccgatttaaaacgtctgctgcgtaaaggcggcacgattatgttctcgaacaacaaacgcggtttccgtatggatcatgacgggctggcgcagctgggcctgaaggcgcaggagatcacgcaaaaaacgctgtctcaggattttgcccgcaaccgtcagattcacaactgctggctgattaccgcagcctga

SEQ ID NO: 198310 - DNA, 1110 bp, Klebsiella oxytoca
atggtaaccctttcgcgacttttcattcatcccgtcaaatcgatgcggggaatggggctcagccacgcttatgcagacagcagcgggctggccttcgatcgtatatttatggtgacggaaaccgatggcaccttcattaccgcccgtcagtttccgcaaatggtcaaatttattcccgcgccgctccatgatggtctgcatctgaccgcgccggacggcagcagcgcgatggtgcgcttcagcgatttctccatacagcaggagccgaccgaagtctggggcaaccattttaccgccctgattgccccggaccgggtgaaccagtggctaagcgggttcttcaaccgcagcgttcagctccgctggctggggccagcgcttagccgcagggtaaaacgtcacgatgccgtccccctctcttttgccgacggttttccctatctgctggccaatgaggcctcgctgcgcgatttgcaaaatcgctgtccggccagcgtaagcatagaacaatttcgcccaaatctgctggtgaccggcgcggccgcctgggaagaagatacgtggaaagtggtgcgcattggcgaggtcatttttgatgtcgtcaaaccgtgcagccgctgcgtattgaccaccgtcagcccggagcgcgggcaaaagcatccttccggggagcccttaagcacgctgcagcgtttccgcacggctctggataacggcgatgtcgattttggccagaacctgatcgcgcgaaatagcggcgtaatccgcgtgggcgatgcgttagaagttctggcccgcggcccggcgaaggcctacggcgcaggcgagagtgatactacgccggcacctgaagcgcaggagaacgcgacggtggaaatagcgtggcagggagtgagttttaccggtaataatcagcaaatcttgctggagcagctggaacaacagggaattcgtattccttactcctgccgggctgggatttgcggcagctgccgcatccggctggaagaaggagaagtcagcgcgctgaagaaaaacgcggtcgccgcagatggcaccattttatgctgtagctgcgtgccgaaaaccgcggtgaggctggcgccttaa

SEQ ID NO: 198311 - DNA, 543 bp, Klebsiella oxytoca
atgcggatcaaacctgacgataactggcgctggtattacgatgaagagcatgaccgcatgatgctcgatctggctaatggtatgttattcagatcgcgttttgctcgccgcatgttgacgcccgacgccttcgcgccttccggattttgcgttgatgacgcagcgctctatttttcatttgaagaaaagtgccgcgatctcgaattatcaaaagaacagcgcgctgaattagtactcaatgcgctggtcgctattcgttttctcaagccgcaaatgccgaaaagctggcatttcaacacgcatgaagagagctggcagcccggcgttggcgatgccgccagcgcatggctcagcgataccggccagcaggtgaatctgctggtggttgagcccggagaaaacgccgcgctgtgcctgttagcccagcccggtctgacgcttgccgggcgggtgatgcagctcggcgacgtgattaaaattatgaacgacaggctgcagccagcgccaggcatcgccagctacagcctgggtcaggcggtttaa

SEQ ID NO: 198312 - DNA, 1011 bp, Klebsiella oxytoca
atgtactaccccttcgttcgtaaagccctttttcagctcgatcctgagcgcgctcatgaagtcacttttcaacaattacgccgtgtttcgggtaccccgctggaaatgttggttcgccagaaggtgccgacaaagccggtaacctgtatggggctcacatttaagaacccgctgggcctggccgccgggctggataaaaacggcgagtgcattgatgcgctcggggcgatgggttttggttccattgaaattggtaccgtgacgccacgtccacagccgggcaacgataagccaaggatcttccgcctggtcgatgccgaaggtttgatcaaccgcatgggctttaataaccacggtgttgataacctcgtggagaacgtaaaaaaggcgcattttgacggcattctgggtattaatattggcaagaataaagatacaccggtagaacaaggcaaagatgattatctgatttgtatggaaaaaatctatgcttatgccggctatatcgccattaatatctcctcgccgaataccccaggcttgcgtactttacaatacggagatgcgctggacgatttgctttctggtattaaaaataagcaacgcgagctacaagagaaacatcaaaaatatgttcctgtggccgtaaagatcgctccggatctttccgtcgaagaattgatccaggtagcggacagtttagtccggcataatatagatggcgtcattgccaccaataccactctggatcgatcgctggtgcaggggatgaaacattgtgatgaaaccggtggccttagcggacgtccattgcagctgaagagtacggaaattatccgcatgctgtctgcggaattaaatggccgcctgccaattatcggagtcggcggtattgactcggtgattgccgcccgggaaaagatagccgccggagcgacgctggtgcagatttattccggatttatttttaaaggcccgccgctgattaaagaaattgttacccatatctaa

SEQ ID NO: 198313 - DNA, 576 bp, Klebsiella oxytoca
atgcgagtcatcacacttgcgggcagcccgcgctacccttcccgctccagcgcgcttctggaatacgccagagagacgctctcggcggcggatatcgaggtctgccactggcatctgcagaatttcgctccggaagacctgctctacgctcgctttgataacccagccctccatgcgttaaatgaacagcttgccggcgccgatgggctgatcatcgcgacgcccgtgtataaggcctctttttccggcgcgttaaagacgcttctggacctgctgccggagcgcgcgctggagggcaaaatcgttctgccgctggctaccggcggaaccatcgcccatatgctggcggtggattacgccttaaaaccggtactcaacgcgctgaaagcccaggagatcctccacggcgttttcgctgacgatagccaggtcacggattatcagcataaaccgcagtttaccccgaatctgcagggccgcctcgaccaggcgctggaaaccttctggcaggcgctgcatcgccccagcagccgcgcgccggcgctgaaaaccttacagcgggttgagcacgtttaa

SEQ ID NO: 198314 - DNA, 792 bp, Klebsiella oxytoca
atggcgacgctttcgcaaaaactcctgatccgcatagccccctggcttttgccggttggcagcgtgattgtatggcaattcgcctcttccgttggttggctctctacccgtattttgccgtcaccggaaggggtgctcaaagccttctggacgctctccgccagcggtgagctttggcaacatctggccatcagctcatggcgggcgcttattggtttcagcatcggcggttccattggcctggttctcgggcttatcagcggcctgtcgcgctggggcgaacgcctgctggacacctccattcagatgctgcgcaacgtgccgcacctcgcgctgattccgctggtgattttatggttcggcatcgatgaaagcgccaaaattttcctcgtggcgctggggacgatgttcccgatttatatcaatacctggcacggtattcgaaacattgacaggggtctggtggagatggcccgcagctatggcttatcgggttttgctctgttccgtcacgtgatcctgccgggcgccctgccctccattatggtcggcatccggtttgcgctcggcctgatgtggttaacgctgatcgtggctgaaaccatctcggctaacgccggtatcggctatctggcgatgaacgcccgcgaatttctgcagaccgatgtcgtggtcgtcgccattattctttacgctattctcggcaaactggccgacttcagcgcacagcttcttgaacgcgtctggctgcgctggaatccggcttaccaccttcaggaggccaacgcatga

SEQ ID NO: 198315 - DNA, 774 bp, Klebsiella oxytoca
atgacaaccgcgcgtcttaatccggggatcccgctgctgctaaacggcgtaagcaagcgttacggcagcaaaacgattctgaatgaactcgatctgcatattcccaccgggcaatttgtcgcggtggtcggacgcagcggcggcggtaaaagcaccctgctgcggctgctcgccgggctggaaaaacccaacgccgggcagctgctggcgggttcgacgccgctggcgcaaatccaggaggatacccggatgatgttccaggattcccgcctgctgccgtggaaaacggtgatcgacaatgtcggcctcgggctgaaggggcagtggcgcgaggcggcgctcaaggcgctggcgagcgtcggccttgaagaccgcgccggtgaatggcccgcggcgctttccggcgggcaaaagcagcgcgtggcgctggctcgcgcgttaattcatcgccccggattattactgcttgatgaaccgctgggcgcgctggacgccctcactcgcctggagatgcaggatctgattgtttcgctgtggcaggagcacggatttaccgttctgctggtcacccacgacgtcagcgaggcggtggcgatggccgatcgcgttttgctgattgaagaggggaagataggactggatctgctggtggacattccccgtccgcgacgcacgggttcagcgaagctggccgaactggaagcggaagtactgaatcgggtgatgcagcgcggcaagaacgaatcctcgccacgcttagtgagccacggttaa

SEQ ID NO: 198316 - DNA, 2616 bp, Klebsiella oxytoca
atgacacaacagccccaagccaaataccgccacgactaccgtgagccggagtatctgattagcgatatcgatttgacctttgacctggatgccgcgaaaaccgttgtgacggctgagagcaaggtctcccgccacgcggctacgtctgatgtgccattgcgtctggatggcgaagacctgacgttggtctctctgcggattgatggtcagccgtggagcgactacaaggaagaaaataaccagctggtgattagcgggttgccggaacatttcactctgaccatcgtcaatgaaatcagcccggcggcgaataccgcgctggaagggctatatcagtccggcgaagcgctgtgtacccagtgcgaggcggaaggcttccgccacattacctggtatccggaccgcccggacgttctggcgcgcttcaccaccaaaatcatcgccgataaagcaaaatacccgtttctgctctccaacggtaaccgcgtggcccagggcgagctggaaaatggccgtcactggatccagtggcaggacccgttcccaaaaccgtgctacctgtttgcgctggtggccggtgattttgacgtcctgcgcgataccttcaaaacccgttcggggcgtgaagtggcgctggagctctacgttgaccgcggtaaccttgaccgcgcgccgtgggcgatgacttcgctgcaaaattccatgaagtgggacgaaacccgctttggtctcgagtacgacctcgacatctatatgattgtcgccgtcgacttcttcaacatgggcgccatggagaacaaaggccttaacgtctttaactccaaatacgtactggcgcgtaccgataccgcgaccgataaagattacctggatatcgagcgcgtgattggtcatgaatatttccataactggaccggcaatcgcgtgacctgccgcgactggttccagctcagcctgaaagaagggctgaccgttttccgcgatcaggaattcagctccgacctcggctcgcgtgcggtgaaccgcattaataacgtacgcaccatgcgcggcctgcagtttgccgaagacgccagcccgatggcgcatccgattcgcccggatagcgtgattgagatgaacaacttctataccctgacggtgtatgagaagggagcggaagtgatccgcatgctgcataccctgctgggggaagagaatttccagaaaggcatgcagctctattttgagcgccacgacggcagcgccgcgacctgcgacgactttgtccaggcgatggaagacgcttccaacgtcgatctgtctcacttccgccgctggtatagccagtccggtacgccgattgtcaccgtccatgatgactacaacccggaaacggagcagtacacgctgaccatcagccagcgcacgccgccgaccgctgagcaggcggagaagctgccgctgcatattccgttcgacatcgagctgtacgataacgaaggcaaggtaatcccgctgcagaagggcggtcacccggtgcatcacgtgctgaacgtcacccaggcggagcagacttttgttttcgacaacgtttacttccagccggtcccggcactgctttgcgagttttccgcgccggtgaagctggagtacaaatggagcgatcagcagctgaccttcctgatgcgccacgcgcggaatgatttctcccgctgggacgcggcgcagagcctgctggcgacctatatcaaactcaacgtcaaccgtcaccagcaggggcagccgctgtctctgccgattcacgtcgccgatgcgttccgcgcgattctgctggatgagaagatcgatccggcgctggcggcggagatcctgacgctgccttcagcgaatgaaatggcggagctgtttgcgattatcgatccgcttgccatcgcggcggtgcgcgaagcgctgacccgcacgctggcgaaagagctggctgacgagttcctggcggtttacaacgccaacaagctcgacggctaccgcgttgagcatgccgatatcggtaagcgttctctgcgtaatacctgcctgcgctacctggcgtttggcgataccgagctggcggataaactgattagcgcgcagtatcaccatgcggacaatatgaccgacgcgctggcggcgctggcggcggccgtagcggcccagctgccgtgccgcgatgcgttgatgcaggagtatgacgacaagtggcaccaggacggactggtcatggataaatggtttatcctgcagtccaccagcccggcggataacgtcctggagacggttcgcggcctgttgcatcatcgctcgttcagcatgggtaacccgaaccgcgtccgttctctgatcggcgcctttgccggcagcaacccggcggcgttccatgcagaagacggcagcggctatcagttcctggtcgagatgctgactgagctgaacagccgcaacccgcaggtggcttcgcgtctgattgagccgctgattcgtctgaaacgctatgacgagaaacgtcaggcgctgatgcgcggggcgctggagcagctgaagggtctggagaatctttccggggatctgttcgagaaaatcagtaaagcgctggcgtaa

SEQ ID NO: 198317 - DNA, 1203 bp, Klebsiella oxytoca
atgacccaattcacttctcctgtactgcactcgttgcttgatacggatgcctacaagctgcacatgcagcaggctgtcttccaccgctacaatgatgtacaggttgcggcggagttccgctgccgcggggacgatctgctcggcatctacgccgatgcgattcgcgagcaggttgagacgatgcgcgacctgagactgcaggacgatgaatatcactggttgtcgagcctgcccttctttgcgccagactatctcgagtggctacgcggcttccgctacgacccgcgccaggtcacggtcatcaatgacaacggcaagctgaatattcgcctttccggcccctggcttgaagttattatgtgggaagttccgctgctggcggtgataagcgagctggtacatcgctatcgctcgccggaaatcagcgtcgatctcgcgctggacacccttgagcataagctgactgactttaaccgcctcactgctgatatcgatatgtcgggcttccgcctgatggatttcggtacccgccgccgcttctcccgcgaggtgcagcaggcgattgttcagcgtcttcagcaagaatcctggttcaccggtaccagcaattacgatctggcgcggcgtttgaatttgaccccaatggggacccaggctcacgaatggttccaggcgcatcagcagatcagcccgaacctggcgagcagccagcgcgcggctctcgctgcctggctggaagagtatcccgatcggctggggattgcgctgaccgactgcattacgatggacgcttttctgcgcgatttcgggccggagtttgcgacccgctatcaggggctgcgccacgactccggcgacccggtggaatggggcgagaaggctatcgcccactacaaaaagctgggcatcgacccgctgagcaaagtgctggtattttccgataatctcgacctgacaaaagcggttgatctctatcgccacttctcatcgcgggtgaatctgagcttcggtatcggcacgcgtttaacctgcgatattcctcaggtgaagccgctcaatattgttatcaagctggtggagtgcaacggtaaaccggtggcgaaactttcggatagcccgggtaaaacgatttgtcacgataaagctttcgtccgcgcgctgcgcaaagccttcgatctaccgccggttaaaaaagccagctag

SEQ ID NO: 198318 - DNA, 1401 bp, Klebsiella oxytoca
atgagcgttgtgcctgtagccgacgtactccagggccgcgttgccgttgacagcgaagtcaccgtgcgcggatgggtgcgtacccgccgagattctaaagctggcttttctttcctcgccgtctatgacggttcctgctttgatcctgtacaggccgttattagtaattctcttcccaattacaatcaggaagtgctgcgcctgaccaccggctgctcggtcgtggtgaccggtaaagtcgtggcatctcagggccagggccagagctttgaaatccaggccagccacgtggaagtcagcggctgggtggaagatccggatacttatccgatggcggctaaacgccatagcatcgagtacctgcgtgaagttgcccacctgcgcccgcgcaccaacctgattggcgcggtggcgcgcgttcgccataccctggcgcaggcgctgcaccgtttcttcgacgagcagggcttcttctgggtttcgactccgctgattaccgcttccgacactgaaggcgccggcgagatgttccgcgtgtcaacgctggatctggaaaacctgccgcgcaacgaacagggcaaagtcgatttcgataaagacttcttcggcaaagagtcgttcctgaccgtttccggccagctgaacggcgaaacctacgcctgcgcgctgtccaaaatctacacctttggcccaaccttccgtgcggaaaactccaacaccagccgccacctggcggagttctggatgctggagccggaagtcgcctttgctaacctgaacgatgtggcaggtctggcggaagcgatgctgaagtacgtcttcaaagccgttctcgaagagcgcgcagacgacatgcagttctttgccgaacgcgttgataaagacgctatcgaccgcctgcagcgtttcgtttccgctgattttgcccaggttgattacactgacgcggtcaccattctggaaaactgcggtaagtcgttcgaaaacccggtctactggggcgtggatctctcctccgagcacgaacgctatctggcggaagagcactttaaagctccgatggtggtgaaaaactacccgaaagacatcaaggcgttctatatgcgccttaacgaagacggtaaaaccgtcgccgcaatggacgttctggcgccgggcatcggtgaaattatcggtggctcccagcgtgaagagcgactggacgtgcttgacgcgcgtatggcggaaatgggtcttaataaagaagactactggtggtatcgcgacctgcgccgttacggcaccgtaccgcactccggtttcggtctgggctttgagcgtcttatcgcctacgtaaccggcgtgcagaacgttcgcgacgtcattccgttcccgcggaccccgcgtaacgcgactttctga

SEQ ID NO: 198319 - DNA, 1086 bp, Klebsiella oxytoca
atgatgaagcgcaaaattctggcagcggtaattcctgccctgctggtagccggtgcagctaacgctgcagaaatctataacaaaaacggcaacaaactggacttctacggaaaaatggttggcgagcacgtctggaccaccaacggcgacaccagcagcgatgataccacctacgcccgtatcggtctgaaaggcgaaacccagatcaacgatcagctggtcggctacggtcagtgggaatacaacatggatgcgtccaatgttgaaggtaaacagaccaccaaaactcgtctggctttcgcaggcttaaaagccggtgaatacggttcattcgactacggtcgtaactacggcgccatctacgacgttgaagcggcaaccgatatgctggttgaatggggcggcgacggctggagctacaccgacaacttcatgaccgcgcgtaccaacggcgtagccacctaccgtaactctgacttcttcggtctggttgacggcctgagcttcgcgctgcagtaccagggtaaaaacgacgcttctagccgtgatgttaagaaacaaaacggcgacggcttcagcaccgcggcaacctacgcgtttgacaacggcattgcgctgtctgcaggctatgcgaactccaaccgtagcggcgatcagaaagctgaccgtcagggcgaaaaagctgaagcatgggcaacctccgctaagtatgacgcgaacaacgtctatgctgcggtcatgtactcccagacttacaacatgacgccggaaaacgaaggcaactacttcgctaacaaaactcagaacttcgaagccgttgttcagtatcagttcgacttcggcctgcgtccgtccatcggctacgtacagactaaaggtaaagacctgcgctcccgcgctggcttctccggcggcgatgctgacctggttaaatacgtcgaagtgggtacctggtactacttcaacaaaaacatgaacgtctacgctgcgtataaattcaaccagctgaacgacaacgattacaccaaagccgctggcgttgcgaccgacgatcaggccgcagtgggtatcgtttaccagttctaa

SEQ ID NO: 198320 - DNA, 1191 bp, Klebsiella oxytoca
atgtttgagaacattaccgccgcccctgccgacccaattctgggcctggccgatctgtttcgtgccgatgaccgcccaacaaaaattaatcttggaattggtgtttataaagatgaaacgggtaaaacaccggtcctgactagcgtgaaaaaagcagagcagtatctgctggaaaatgaaaccactaaaaattatctgggtatcgatggtattccggaatttggccgctgcacccaggagcttctgttcgggaaaggaagcgcaattatcaatgataaacgcgcccgcaccgcgcaaacgcccggcggtacaggtggcctgcgcgtcgccgccgattttctggcgaagaacaccgacgttaaacgtatttgggtgagcaaccccagctggccgaaccataaaagcgtgttcaattcagccgggctggaagttcgcgaatatacctactacgatgccgctaaccacaaactcgacttcgacgggctgctggccagcctgaccgaagcgcaggccggcgacgtggttctgttccacggctgctgccataacccaaccggtatcgatccgacgctggaacagtggcaacagctggcgcagctctccgtagagaaaggctggctgccgctgtttgactttgcctaccagggctttgcccgcggcctggaagaagatgctgaaggcctgcgcgctttcgccgctctgcataaagagctgctggttgccagctcctactcgaaaaacttcggcctgtacaacgagcgcgtgggcgcctgtacgctggtcgccgctgaccaggaagcggtagaccgcgctttcagccagatgaagtcggttatccgcgcgaactactcaaacccgcccgctcacggcgcctcggtagtggcgaccattctcagcaatgacgcgctgcgcgccatctgggagcaagagttgaccgacatgcgtcaacgcatccagcgtatgcgtctgctgttcgttaataccctgcaggaaaaaggcgccagccgcgatttctctttcatcattcagcaaaacgggatgttctcgttcagcggcctgaccaaagagcaggtactgcgtctgcgtgaagagttcggaatttacgcggtggcgtccggacgtataaacgtcgccggtatgacgcccgacaacatggcgccgctgtgcgaagcgattgttgccgtactgtaa

SEQ ID NO: 198321 - DNA, 648 bp, Klebsiella oxytoca
atgaactatcgtattattccggttaccgcgttcgcgcagaactgttctttaatctggtgtgaacaaaccaaactggcggcgctggtcgatcccggcggtgatgctgagcgaatcaaacaggaagtcgcggcggcaggcgttagcctgatgcagattctgctcacgcacggtcatctcgatcacgttggtgcggcggcggagctggcacaacattatggcgtgccgattattgggccggaaaaagaagatgagttctggctggaaggattaccggcgcagagccggatgttcggtctggaagattgccagccgctgcagccggatcgctggctgaacgaaggcgatacggtcagcgtggggaatatttccctgcaggtgctgcactgcccaggccatacgccggggcacgtggtcttcttcgatcctgcttcccgactgttgatttctggcgatgtgatttttaaaggcggagtagggcgtagcgacttccctcgcggcgaccatagccaactgatcgatgcgattaagcgcaagctgttgccgctgggcgatgacgtgtcgtttattccgggtcatggaccgatgtcgacccttggctatgagcgtctgcacaacccattcctgcaggatgaaatgccggtctggtga

SEQ ID NO: 198322 - DNA, 552 bp, Klebsiella oxytoca
atggacaaatttgacgctaatcgccgcaaactgctggcgttaggtggagcggcgctcggtgctgctgccattctgcctgcgccggcatttgccaccctctcgaccccccgaccgcgtattttgacgctgaacaacctgcataccggtgaatcactcaaggcggagtttttcgatggcagaggctatattcaggatgaattagcaagacttaatcattttttccgtgattatcgcgcgaataagattaagtccatcgatcccggtttgttcgatcaactctatcgtttgcagggattacttggtaccaacaagcctgtccagcttatttccggttatcgttctgttgataccaataatgagcttcgcgcgcgtagccggggtgtggcaaaacacagctaccacactaaaggccaggccatggattttcatattgaaggcatttcgttaagcaatgttcgcaaagccgcgttatctatgcgcacaggtggtgtaggatactacccacgtagcaactttgtgcatattgataccgggccagtacggcactggtaa

SEQ ID NO: 198323 - DNA, 1794 bp, Klebsiella oxytoca
atgttgctaaagaaacggtatggtcgtcaattgtctgcgctcagcctgagcctggcgtttgcatttgctccactgttcaatgtccaggctgaagagcctgaagtggtaccatcggatagctctgccaccatcagcgagctctcttccgcgctaagccaaagcgcaaaccaatccgcggcggtcgcccaaatggccggcgagcaggcgctttctgccgatgcggcagcgaagagccgcgccgggattcaggcggtactgccgtccggttatcaacccgtatttatgaatccgctggtatcgctgtatgcggccagggatatgaaaccgatgtgggataaccgcgaggcggtgcaggcgtttcaacagcagctggctgaggttgctatcgccggttttcagccgcagttcaccacctgggttgagctgttgaccgacccggcagtgaacggtctggcgcgggatgtcgttctgtctgacgccatgatgggctatctgcattttattagcggtattccgactcagggcaaccgctggctgtatggcacgaaaccgtatgccatgtcgacgccgcctctgtcggtgattaaccagtggcaggtggcgctggataacggttcgctgccgcagtttattgcgggtctggctccgcagcatccgcagtatgccgcaatgcatcaggcgctattagctcaggttgccgattcccgtccctggccgcagctcaccggtaagacgtcgctgcgcccgggggaatggagcaacgatgccggcgcgctgcgcgaaattttacagcgcaccggtatgctggatgacgcggcaaaaatttcgttgcccggcgatgaggtggtgagtccgtccgccgggaaaaaggccaaaagcagcggccgtggcgtttacgatcgccagttagtggagggcgttaagcgcttccaggcgtggcagggactgggcgcagacggcgtgattggtcaggcgacccgcgactggctcaacgtttctcctgcgcagcgcgccggcgtgctggcattgaatatccagcgtttgcgcctgctgccgggtaatctggcgaccggaattatggtgaatattcccgccttttcgctggtctattaccaggacggtagccaggtgctggcatcgcgggttatcgttggccgtccggaccgcaaaacccctatgatgagcagtgcgctgaacaacgttgtggtcaacccgccgtggaacgttccgccgacgctggcgcgcaacgatattctgccgaaggtgcgcaataacccaggctatcttgagcagcacggctatacgatgatgcgcggctggaatagcaaagagactattgacccgtatcaggtggactgggaaacgataaccgcatcgaatctgccgttccgcttccagcaggctcccggcgcgcgcaattcgctggggcgctataaattcaatatgccaagttcagatgcgatatatttgcacgatacgcccaatcacaatctgttccagcgtgatggacgcgcgctgagttccgggtgcgtgcgcgtgaataaagcctcagaactggccaatatgctgcttcaggatgctggctggaatgatgcgcgtatttcagatgcgcttaaacaggggaatacccgctacgttaatattcgccagaatatcccggttaatctctattatttgaccgcgttcgtcggcgctgatggacgtacacaatatcgaacagatatttacaattacgatctcaccgcgcgatccagcgcacaaattctacctaaagctgaacaattaatcagataa

SEQ ID NO: 198324 - DNA, 4449 bp, Klebsiella oxytoca
atgattgaacgcggtaagtttcgctcgctgacgctggttaactggaacggtttttttgcccgtacttttgatctcgatgaattagtgaccacgctttccggtggtaacggtgccggtaaatccacgaccatggccgccttcgtcaccgcactgatcccggacctgacgctgctgcactttcgtaacaccacggaagcgggggcgaccagcggctcgcgcgataaaggcctgcacggtaagctgcgcgctggcgtctgctactccgtgctggacgtgatcaactcccgccaccagcgcgtggtggtcggcgttcgtctacagcaggtcgccggtcgcgatcgtaaggtcgatatcaagccttttgcgatccagggcctgccaacctccatccagccaactcagctgctgaccgaaacccttaacgagcgccaggcgcgcgtggtgacgctcaacgagctgaaagataagctcgaagcgatggaaggggtgcagttcaagcagtttaactctattaccgagtatcactcgctgatgttcgacctgggcgtggtggctcgccgcctgcgttcggcttcggaccgtagcaaatactatcgcctgatcgaagcctcgctgtacggcggtatttcgagcaccattacccgctcgctgcgcgactacctgttgccggaaaacggcggcgtgcgtaaggcgttccaggatatggaagcggcgctgcgtgaaaaccgcatgacgctggaagctatccgcgtgacgcagtcggaccgcgacctgttcaagcatctgatcagcgaagccaccaactacgttgccgccgactatatgcgtcacgctaacgagcgacgcattcatctcgacaaggcgctggagtatcgtcgcgatctgttcacctcccgcgctcagctcgcggcggaacagtataagcacgtcgatatggcccgcgagctgcaggaacataacggcgcggaaggcgatctggaagccgattatcaggccgccagcgaccatctgaacctggtgcagaccgctctgcgccagcaggaaaaaatcgagcgctatgaagcggatcttgatgaactgcagattcgcctcgaagaacaaaatgaagtcgtcgcggaagcggttgaccagcaggaagagaacgaagcccgcgccgaagccgccgagctggaagtggatgagctgaaaaaccagcttgccgactaccagcaggcgctggacgtgcagcagactcgcgcgattcagtacacccaggcgctgcaggcgctggagcgggcaaaagccctctgccatctgccggatttaacgccggagagcgccgacgagtggctggaaactttccaggcgaaagagcaggaagcgacggagaaaatgctgtcgctggaacagaagatgagcgtggcgcaaaccgcgcacagccagtttgaacaggcttaccagctggtggcggagatcaacggcccgctggcgcgtaatgaagcctggaacgtggcgcgcgagctgctgcgcgaaggcgttaatcaacgtcatcaggccgaacaggcgcacgggctgcgcagtcgtctgacggagcttgaacagcgtctgcgtgaacagcaggatgccgaacgccagctcaatgagttctgtaagcgccagggcaaacgctacgatatcgacgagctggaagccctgcaccaggagctggaagcccgcatcgcatcccttgccgacagcgtttccaccgccagcgaacggcggatgaccctgcgtcaggagctggaacagctacagtcgcggacgcaaacgctgatgcgccgcgcgcccatctggctggcggcgcagaacagcctcaatcagctgtgcgagcagagcggcgagcagtttgagtcaagccaggacgtcaccgaatatctccagcagctgctggagcgtgaacgcgaagctatcgtggagcgcgatgaagtcggggcccgcaagcgcgctatcgacgatgaaattgagcgtcttagccagccgggcggttcggaagatcagcgcctgaacgcgctggcggaacgttttggcggcgtactgctgtcggaaatctacgatgacgtgagtctcgatgatgcgccgtattactccgcgctctacggtccttcccgccacgccattgtggtaccggatctgtcgctgattgccgatcagctggaaggtctcgaagattgtcccgaagatctctacctgatcgagggcgatccgcagtcgttcgatgacagcgtattcagcgtcgatgagctggaaaaggcggtggtcgttaagattgccgatcgtcagtggcgctattcacgcttcccgacgctgccgctgtttggccgcgccgcgcgtgaaagccgcgttgaaacgctgcacgccgagcgcgaaagcctgtccgagcgctttgcgaccctgtcgtttgatgtgcagaaaacccagcgcctccatcaggcgttcagccgctttatcggtaaccatcttgcggtagcctttgaggacgacccggaagaagaaatccgtaaactgaatacgcgtcgcggcgaactggagcgggcgctgaccgcccatgagagcgataaccagcagaaccgggtgcagtatgagcaggcaaaagagggcgtatccgcactcaaccgcctgctgccgtgtctgaatttgctggccgatgactcgctggccgatcgcgtggatgagatccaggaacgcctggacgaagcgcaggaagccgcgcgcttcgtccagcagcatgggaatcagctggcaaaactggagccgatcgtttccgtgcttcaaagcgacccggagcagtttgaacagctgaaagaagattacgcatattcgcagcagactcagcgcgacgcgcgtcagcaggcatttgcgctgaccgaagtggtgcagcgtcgcgcccactttagctactccgattccgcagagatgctgagcggtaatagcgatctgaacgagaagctgcgccagcgtctggagcaggctgaggcggagcgcgcccgtacccgtgaagcgctgcgtacccacgccgcgcagctcaaccagtacaaccaggtgctggcatcgctgaaaagttcctacgacaccaagaaagagctgctcaacgacctgcataaagagcttcaggacattggcgtgcgcgccgacgccggcgccgaagagcgcgctcgtctgcgccgcgatgagcttcatgctcagctcagcaacaaccgcgcgcggcggaaccagctcgaaaaagcattgaccttctgcgaagcggaaatggataacctgacccgcaggctgcgcaagctggagcgcgattactgcgaaatgcgcgaacaggtggtcagcgctaaagccggctggtgtgcggtcatgcgcctggtgaaagacaacggcgtggagcgtcgcctgcatcgtcgcgagctggcctacctttcggcagatgaactgcgctcgatgtcggataaggcgctcggcgcgctgcgtctggcggtctcggataacgaacacctgcgcgatgtactgcgtatttctgaagatccgaaacgcccggagcgtaaaatccagttctttgtcgccgtttatcagcatctgcgcgagcgtattcgccaggatatcatccgcaccgacgatccggtggaagcgattgagcagatggagatcgaactcagccgtctgacggaagagctgaccaaccgcgagcagaagctggccatcagctcccgcagcgtggccaatattatccgcaagactatccagcgcgagcaaaaccgtattcgtatgctcaaccaggggctgcagagcgtctccttcggccaggtcaacagcgtgcgtctgaacgtcaacgtgcgggaaacccactcgatgctgctggacgtgctgtcagaacagcatgaacagcatcaggacctgtttaacagcaatcgtctgaccttctcggaagcgctggcgaagctgtatcagcgcctcaatccgcagattgatatggggcagcgtacgccgcagaccatcggtgaagagctgctggactaccgcaactatctggagatggaagtggaagttaaccgtggttccgacggctggctgcgcgcggaatccggtgcgctatcgaccggtgaggctatcggtaccgggatgtcgattctggtgatggtagtacagagctgggaagatgaatccatgcgcctgcgcggtaaggacatttcgccgtgtcgtctgctgttccttgatgaagcggcgcgtctggatgctcgctctatcgcgacgctgttcgagctctgcgatcgtctggagatgcagctgattattgcggcgccggaaaatatcagcccggaaaaaggtaccacctataagctggtgcgtaaggtcgtgaataatcacgagcacgtgcacgtcgtcgggctgcgtggcttcgcaccgcagctgcccgaaacgctgccgggaacggcaaatgcttcatag

SEQ ID NO: 198325 - DNA, 705 bp, Klebsiella oxytoca
atgtcatcgacaaatattgaacaagtgatgccggttaaactggcgcaagcgttggctaatccgttatttccggcgctggatagcgccctgcgcgcgggccgtcatatcggccttgacgagctggataatcacgcatttttaatggattttcaggattacctggaagagttttatgctcgctacaacgtcgagctgattcgcgcgccggaggggtttttctatctgcgcccgcggtcgaccacgctgatcccgcgctcggtgctctccgagctggatatgatggtgggtaaaattctctgctatctctacctcagcccggagcgtctggccaacgagggcatcttcactcagcaggagctttacgacgagctgctgaccctcgcagacgaagccaagctgctcaagctggtcaataaccgttctaccgggtccgacctagaccgccagaagctgcaggaaaaaatgcgcgcttcgctcaaccgcctgcgccgcctcggcatggtgtggtttatgggccatgacagcagcaaattccgcattaccgaatcggtgtttcgcttcggcgccgacgtgcgcgccggtgacgatccgcgcgaagcccagctgcgtatgatccgcgacggtgaagcgatggcgctggaaaatcgcctgcagcttaatgatgagaatgaagagaatcagccggatagcggggaggaagagtaa

SEQ ID NO: 198326 - DNA, 1323 bp, Klebsiella oxytoca
atgagtgaattttcccagacagtccccgaactggttgcctgggccaggaaaaatgatttttctatttcgctgccggtcgacagactctcttttctgctggcgattgccacgctgaacggcgagcggatggaaggggaaatgaccgagggagaactggtggatgcgttccgccacgtgagtgatgcgtttgagcagaccagcgaaaccatcagccagcgcgccaataatgccattaacgatatggtgcgccagcgtctgctgaaccgctttaccagcgaaatcaccgagggtaacgctatttatcgcctgacgccgctgggcattgggatcaccgactactatattcgccagcgcgagttctccaccctgcgactgtcgatgcagctctccatcgttgccggcgaactcaagcgcgccgccgactcggcagaagagggcggcgatgagttccactggcatcgtaacgttttcgctccgctgaagtactcggtagcggaaatctttgacagcattgacctgactcagcggatcatggatgagcagcagcagctggtgaaagatgatattgcccagctgctgaacaaagactggcgggcggcgatctccagctgcgagctgctgctgtcggaaacgtccggcaccctgcgggaactgcaggataccctggacgcggcgggcgataagctgcaggcaaacctgctgcgtatccaggattcgaccatggcgcgcgacgatctgaattttatcgatcgtctggtgttcgatctgcaaagcaagctggaccgtatcgtcagctgggggcagcaggcgattgacctgtggatcggctacgatcgccacgtgcataaatttatccgtaccgccattgatatggataaaaaccgcgtcttcgcacagcgtctgcgtcagtcggtgcaaacctacttcgacgccccctgggcgctcacccatgcgaatgccgatcgtctgcttgatatgcgcgatgaagagatggcgctgcatgatgaagaggttaccggggaacttccaacggatctggagtacgaagagtttaacgaaattcgcgaacagctggcggcgctgattgaaggacagctggtggtctataaagagaagggactgccgctggatcttggcctggtggtacgcgaatatctgtcgcagtatccgcgcgcgcgccactttgacgtcgcgcgtattgtggtcgaccaggcggtacgtttgggcgtagcgcaagcagatttcaccggactgccggcaaaatggcagccgattaatgattacggagccaaggtacaggcgcatgtcatcgacaaatattga

SEQ ID NO: 198327 - DNA, 780 bp, Klebsiella oxytoca
gtgcaggatcgtaatttcgatgatattgctgaaaagttttcgcgcaatatatacggcaccaccaaaggccagctgcggcaggcgatcctctggcaggatctgcaaccgctgctggaccggctggggcctgggccattgcgagttcttgacgcgggcggcggcgaagggcagacggcgatcaaagtggcggaaatggggcatcacgtcacgttatgcgatctctctggtgaaatggtggctcgtgcccggcaggcggctgccgataaaggtgtgatcgacaacatgcattttgtacaatgcgcggctcaggatattgagcagcatttggaaagtccggtcgatctgatactgtttcatgcggtgctggagtggatagccgaaccacaggcgatgttgcgtaccctgtggtcgatgctgcgccccggcggcgcgttgtcgctgatgttctacaatgctaacggtctgttgatgcacaatatggtcgccggaaatctcgactatgtgcaaatcggcatgccgaaaaagaaaaaacgcacgctgtcgccggactatccgcgcgatccgcagcaggtttacggctggctggaagagattggctggcagattaccggcaagaccggcgtgcgggtgtttcatgattatctgcgtgaaaaacaccaacagcacgataaatttgcggcgctgctggagctggaaacgcgctactgtcgccaggagccgtatattagcttaggccgttatattcacgtcaccgcgcttaagccgcagatgcaaggataa

SEQ ID NO: 198328 - DNA, 780 bp, Klebsiella oxytoca
atgctttttacgctgaaaaaggttttaggcggtatgatgctgccgcttcccctgctgctgctgctcattgcgttcggcatagccctgctgtggtttagccgtttccagcgcaccggcaagctctgcgtcagcctcggctggctgctgttgctgctgttgagcctgcaaccggtcgccgatagcctgctcaagccaattgaagataagtacccgacgtggcgaggtgaaaagcgcgtgcagtacgtggtcgtgcttggcggaggctacacctggaacccggactgggcgcccagttccaatctcatcaataatagcctgccgcggctgacggaggggatccgcctgtggtatgaaaatccgggctcgaaactcatctttaccggcgcagcggcaaaaacaaatccggtcagtacggcagaagccggggccagagtggcagagagcctgggcataccgcgcagcgaaatccttgtcctggataaacccaaagataccgaagaggaagccgctgcggtgaagatggcgataggcgatgcgcccttcctgctggtcacctccgcgtctcatctgccgcgggcgatgattttctttcgccgcgccgggctaactcccctgcccgcgccggccaaccagctggcgattgagtcaccgcttaacccgtgggagcgggctattccttcgcccgtctggctcatgcatagcgatcgggtgggttacgaaacgttaggccgcatctggcagtggctaaaaggttcttcaggcgagccagggcaggattga

SEQ ID NO: 198329 - DNA, 894 bp, Klebsiella oxytoca
atggaacagttgcgtaccgagctgagccacctgctgggtgaaaaactaagccgcgtggagtgcgtcagcgagaaaccgtcgtcggcgctgtggtcgctatatgatgcgcagggaaacccaatgccgctgctggcgcgcagctttacgacgccaggcgtggcgcgtcagctggcgtggaagatatcaaccctggcgcgaagcggcaccgtccgtatgccggttgtctacggcgtgatgacgcacgacgagcatccgggtcccgatgtactgctgattgaacgactgcgcggcgtctcggttgaagcccccgcccgcacgccggagcgctgggagcagctgcaggagcagatcgtggaagcgctgctggcctggcatcgtcaggatagcggcggctgcgtagggatggtcgatagcactcaggaaaacctctggccatactggtaccgccagcgcgtggaggtgctatggagtacgctgaatctttatcaggataccggcctgacgatgcaggacaaacgcatcttgttccgcacgcgcgaatgccttatggatttgtttaaaggtttcaatgataactgcgtgctggtacacggtagcttcacgctgcgcagcatgcttaaagatccgcgcagcgatcagctgctggcgatggtggggccgggcatgatgctctgggcgccgcgggaatacgagcttttccgtctggccgagagcgctcaggaagaggagctgctgtggcactatctgcgccgggcgccggtggcggaagcgtttctctggcgacgctggctgtatctgctgtgggacgaagtggataatctggtgaataccggacgctttgaccgcgtccggtttgacctggcggcaaagtcaatcctgccctggctcgcctga

SEQ ID NO: 198330 - DNA, 747 bp, Klebsiella oxytoca
atgagtttcgtggttattatccccgcgcgcttcgcttctacccgcctgccagggaaaccgctccaggatatcaacggcaagccgatgattgtccatgttctggaacgcgctcgcgaatccggggctgagcggattatcgttgctaccgaccatccagacgtggcccgcgcggtggaagccgccggcggtgaagtctgcatgacccgtgaagatcatcagtcaggcaccgaacgcctggccgaggtggttgaaaaatgcgccttcagcgatgacaccatcattgtgaatattcagggcgatgagccgatgatcccgcccgcgatcgtgcgccaggtagccgagaatctggctgccagcaccagtggtatggcaaccttagcggtgccaatccacgatgcggaagaggcgtttaatccgaatgcggtgaaggtcgtcatggatgctgagggctacgcgctctatttttcccgcgccaccattccgtgggatcgcgatcgtttcgctaaatcccgcgaggctatcggtgattcgctgctgcgtcatatcggtatttatggctatcgcgccggttttattcgtcgctatgtgagctgggcgccgagcccgctggagcaaatagagatgctcgagcagctgcgcgtgctgtggtatggcgagaaaatccatgtcgcggtggcggaagtggttcccggtacaggtgtcgatacgccggaagatctggagcgcgttcgcgcggagctgcgttaa

SEQ ID NO: 198331 - DNA, 183 bp, Klebsiella oxytoca
atggatcaccgtttacttgaaattatcgcctgtccggtttgtaacggtaagctatattacagccaggataagcaagaactgatctgcaaacttgatcgcctggcttttccgctgcgtgaaggcattcccgtactactggaaaccgaagcccgcccgcttcctgtagaagagagccagtcatga

SEQ ID NO: 198332 - DNA, 1230 bp, Klebsiella oxytoca
atgccggtattgtccctctcgcttaaagaagcccgccatcttcaccttgccgctcaggggctgctaaaaaagccccgtcgccgcgcaaagcccggggatattctgcagaccattaagcagatgtccctgctgcaaatcgataccatcaatgttgttgcgcgcagtccttatctggtgctgttcagccgcctcggccactatccgcagcgctggctggacgaggcgctccgcgccggcgagctgatggagtactgggcgcacgaagcctgctttttaccgcgcagcgacttttcactggtgcgtcaccgcatgctgacgccggataaaatgggctggaaatatcacaaagcgtggatgaccgaacacgccgtgggcattcaggcgctgttggcgcatatagccgaaaatggcccggttcgctcagccgacttcgagcatccgcgcaaaggcgccagcggatggtgggagtggaaaccgcataagcgccatcttgaaggcttattcacagccggtgaagtgatggttatcgagcggcgtaattttcagcgcgtttacgatctgacgcagcgggtcatgccggactgggacgatgagcgcgatgggctctctcaggagcaggctgaagccatgatgttacgtaatagtgctcgcagcctggggatttttcgcgcgcagtggctggcggattattatcgtctgcgtcagcccccgctgccgctactgctggcgagctggcaggaggaggggctggtggtgccggttaacgttgaagcgctgggcgaaatgtggctccaccgtgatgcactggcgctgctggaatcttcacccggcggtaggctcgccgccagccgcagcgcggtgctttcgcctttcgatccggtagtctgggatcgcaaacgagcggaacagctgtttaactttacctatcgcctggagtgctacacgcccgcgccgaaacggcagtatggctatttcgtattaccgctgctgcaccaggggagactggttggcagaatggatagcaaaatgcaccgcaaaaccggcgttctggaaattatcgccctgtggctggaggagggcgtcaaggtgacgtcgggtctggagagcgggctaaaacgcgccattgatgattttgccctctggcaggacgccacgcgggtgagctgcgggaagctgccggcggaactttttgccgggcggcaacagggttgggaaattgacgctgcctga

SEQ ID NO: 198333 - DNA, 981 bp, Klebsiella oxytoca
atgattgcacgcatctggtccggtgagtcgcccttatggcggctgctgcttccgctctcctggctctatggcctggtgagcgggttgatacggctgagctataaactcggttggcaaaaagcctggcgagcgccggtgccggtggtggtggtgggtaatctgaccgcgggcggtaatggtaaaacgccggttgtcgtctggctggtggaacagctccagcagcgcggtattcgcgttggcgtcgtttcacgcggctacggcggtaaagcggcgagctatccgctgctgctgaatacggctacccccacagcggaagcgggcgatgagccggtgctgatttaccagcgtaccggcgcgccggttgccgtctcgccggtacgcagcgatgcggtacaggccctgctcgccgcccacgatctgcagcttatcgtcacagacgatggcctgcagcactataagctggcgcgcgacaaagaaattgtggtgattgacggcgtgcgccgttttggcaacggctggtggctgcctgccggccccatgcgcgagcgcgcttcgcgtttacgcagcgtggatgcggttatcgttaacggcggtctcgcccgtccgggagagatcccgatgcagcttcgccccgggcaggcggtaaatctgctgaccggtgaacgccgggatgcggcggcgttggacaacgtggtggcgatggccggaatcggtcacccgccgcgcttcttcgccacccttgaaagctgcggcgtcagtccggtaaaaaccgtcgccttagccgatcatcaggcattggcgcagagcgcagtcgccgcgctggcgacgccgcagcaaaccctgctgatgaccgaaaaagatgcggtgaagtgccgcgaatttgctcaggcaaactggtggtatcttccggtcgacgcgataatgactgaccaacgcgcgcagcggttgctcacggacttagttaccctggcgcaacactaa

SEQ ID NO: 198334 - DNA, 1749 bp, Klebsiella oxytoca
atgcagaacgataaagatctctccacgtggcagaccttccgccgactctggccgattatagcgccgtttaaacccgggttaatcgtggcagcggtagcgttagtgcttaacgcggctagtgataccttcatgctatcgcttcttaaaccgttattggatgatggttttggtaaaacggatcgctcggtgctgatatggatgccgctggtggtgatcgggttgatggttctgcgcggcattaccagctacgtttcgagctattgtatctcttgggtttccggcaaggtcgtgatgacgatgcgccgtcgtttattcagccacatgatggggatgccggttgccttctttgacaaacagtccaccgggacgctgctatcgcgtattacctatgattccgagcaggtcgcgtcttcttcctccagcgcgctgattaccgtcgtgcgcgaaggcgcgtcgattattggcctcttcgcgatgatgttttattacagctggcagctgtcattgattctgatcgtgctggcgccgatcgtgtctattgcgattcgcgtggtctcgaagcgttttcgtaatatcagcaagaatatgcagaacaccatgggccaggtgacgaccagcgcagagcagatgctgaaagggcataaagaagtgctgatgtttggcggtcaggccgtcgaaaccaaacgttttgataaagtcagcaataaaatgcgcctgcaggggatgaaaatggtctccgcgtcgtcaatttctgacccgattattcagctgatcgcctctctggccctggctttcgtgctctatgctgccagcttcccgagcgtaatggagacgctgacggcgggtaccatcaccgttgtcttctcttcaatgatcgcgctgatgcgtccgctgaaatcactgactaacgtcaacgcgcagttccagcgcgggatggccgcttgccagacgcttttcgctatccttgactccgagcaggagaaagatgaaggcacgcgggttatcgaacgcgcgaagggcaacctcgaatttaaaaacgtcaccttcagatacccgggacgtgaagtcgccgcgctgcgcaatatagacttgaatattccggaagggaaaaccgtggcgctggtagggcgctcgggttcgggtaaatcgaccatcgccagcctgattacgcgtttctacgatgtcgatgatgggcagatcttactggacggccacgacctgcgtgaatacaccctgagctccctgcgcgatcaggttgcgctggtgtcgcaaaacgttcatctctttaacgataccgtagcgaataacatcgcctacgcgcgtactgaagagtacagccgcgagcagatagaagaagccgctcgtatggcttatgccatggactttatcaacaaaatggacaatggcctggatacgattatcggggaaaacggcgttatgctttccggcggtcagcgccagcgtatcgctatcgctcgcgccctgctgcgtaacagcccgatactgatcctcgacgaagccacgtcggcgctggataccgaatcggaacgcgctattcaggcggcgctggacgaactgcagaaaaaccgcacctcgctggtgattgcccaccgtctgtcgacgattgagcaggccgacgagatcgtggtggtggaagatggccagatcgttgaacgcggcagccataccgatctgcttgagcacaagggcgtttacgcccagctgcataagatgcagttcggcgcatga

SEQ ID NO: 198335 - DNA, 2256 bp, Klebsiella oxytoca
atgcgtttaccacaacttgccggctgtgtgattctcggtattctgccgctgctctggctgccagtactgcccgggcggtgggttatctgggggctcatggccctggcgctactcattgcgcaatgtcgacgcagacctgcgcaatatgcggcattgataacgctgttttttgtctggggagccctcagcgcaggcgaggtactgtggccgacggagaggttaacggacaggaatcgccaggttgacgttgagctaaccgcaacggacgggcagacaacgcatcaggggaagattatccgtctggatgggcgacggctgtttcctgcgccagggattagcctctacggcagctacctgccagaaacgccctgcgcaggtcaggtttgggcaatgacgctgcgcgcgcgtccggtacacggacagctcaacgatggcgggtttgatagccagcgtcatgcattgtcgcagcatcgtccgttaaccggacgctttatcaccgctgacgttcgggtgcggacctgtagtttgcgggcgcgttatcttgcttcgctgaatcaaacgctgaacgcgttgccgtggcaatcggtgattctagggttaggcatgggggagcgtctggcgataccgcgcgagataaagaccctgatgcaggaaaccgggacatcgcacctgatggcgatttctggcttacatatcgcgctaggggcttcattgggctggttgctgctcagaggtgtgcagttttttctcccgtgccgctggcttggctggcgggcgccgctgctcgttggcctggcgagcgcgattttttacgccgggctgaccggtatgcagccacccgcgttgcgcacctgcgtcgcgctggccgccggctgcgcgctgcggctatccggaaaacgctggtcgccatggcagctatgggtctgctgcattggcgcaatactgtttgccgatccgctggcggtgttgtccgaaagcctctggctttccgcgtttgccgttgcggcgcttatcttctggtatcagctggcgccgatgccgggcggcaaaaggagcgggctactgcgtcaaagcctcgcgttatgtcatctgcagatcggtttaatgtttttacttgctcctctacagatcgcactttttcacggcatcagcctgacgtccgtgctggccaacttgattgccgtgccgctggtgacctttgtcgttgccccgctaattctgaccgcgatgtttttacacctctgcgcgccgtttatcattgagatggcggtctggcaatcggcggaccgtgttctggccgcgctattctggttcttacgacagctaccgcccggctggctggcgctggatgcgcgctggcttgggataagcttgctgccgtggctggcgttaatcgtctggcgttttcatgcgtggcgcacgttgcccgcgttttgtttagcatttctcgggctattgagctggcccttctggcggagcacggctgctaacgaatggcgagtcaccatgctggatgtcgggcaggggctggcaatggtgattgaacgcgagggcgcggcgcttctctatgataccggcctggcctggcccgagggagacagcggtcagcagatcattattccctggctacgctggcatcatttgcagcttgaaggcgtcgttctcagccacgagcatctcgatcaccgcggcgggctaaattcggtgttaaaggcgtggccccggatatgggtgcgaagccctttaggctgggcgggtcatttagcctgccagcgcggagaaacctggcagtggcggggtttaacctttcgcgcgctctggccgctgcccggagcgacagcgcaggggaataatcgctcgtgcgtggtgcgtattgatgacggtaaacatagtattctgctgaccggggatatcgaaacgcccgcggaacgggcgatgattagccgctactggcaacatcttacgtctacacttatccaggtcccccaccacggcagtaatacctcgtcgggaatcgccctgctgcgtagcgttggcggagaagctgcgctggcttccgcttcgcgctataacgcgtggcgcatgccatcaaccaaagtgattcagcgctaccgaaaacagagttatcagtggttcgacacgccgcatcaggggcaaattacggtggttttttctccggatagctggcaaatccatggcttacgggatcaagttttaccgcgatggtatcatcagtggtttggcgggaaggcgtag

SEQ ID NO: 198336 - DNA, 288 bp, Klebsiella oxytoca; identical to SEQ ID NO: 189651

SEQ ID NO: 198337 - DNA, 1674 bp, Klebsiella oxytoca
atgactgaatcttttgctcaactatttgaagaatccttaaaaacaatcgaaacccgtccgggttccatcgttcgtggtgttgttgttgctatcgacaaagacgtagtactggttgacgccggtctgaaatctgagtctgccattccggcagagcagttcaaaaacgcccagggcgagctggaaatccaggttggtgacgaagttgacgttgctctggatgcagtagaagacggcttcggtgaaaccctgctgtcccgtgagaaagctaaacgtcacgaagcttggatcacgctggaaaaagcttacgaagacgctgaaactgtagtcggtattatcaacggcaaagttaaaggtggcttcactgttgagctgaatggtattcgtgcgttcctgccgggctccctggtagacgttcgtccggtgcgcgatacgctgcacctggaaggcaaagagcttgaattcaaagtcatcaagctggaccagaaacgtaacaacgttgttgtttctcgtcgtgccgttatcgaatccgaaaacagcgcagagcgcgatcagctgctggaaaacctgcaggaaggcatggaagttaaaggtatcgttaagaacctcactgactacggtgcattcgtcgatctgggcggcgttgacggcctgctgcacattaccgatatggcatggaaacgcgttaagcatccgagcgaaatcgtaaacgttggcgacgaaatcactgttaaagtgctgaagttcgaccgcgaacgtactcgtgtatctcttggcctgaaacagctgggcgaagatccgtgggtagctatcgctaagcgttatccggaaggtaccaaactgaccggtcgcgtgaccaacctgaccgactacggctgcttcgttgaaatcgaagaaggcgttgaaggcctggttcacgtttccgaaatggactggaccaacaaaaacatccacccgtccaaagttgttaacgttggcgatgtagtggaagttatggttctggatatcgacgaagaacgtcgccgtatctccctgggcctgaagcagtgcaaaaacaacccatggcagcagttcgcggaaacccacaacaagggcgaccgtgttgaaggtaaaatcaagtctatcactgacttcggtatcttcatcggcctggacggcggcatcgatggcctggttcacctgtctgacatctcctggaacgttgcaggcgaagaagcagttcgtgaatacaaaaaaggcgacgaaatcgcagcagttgttctgcaggttgacgcagagcgcgagcgtatctctctgggcgttaaacagctcgcagaagatccgttcaacaactgggttgcactgaacaagaaaggcgcaatcgtaaacggtaaagtcactgcagttgacgctaaaggcgcaaccgtagagctggctgacggcgttgaaggttacctgcgcgcttctgaagcttcccgtgaccgcgttgaagatgcaactctggttctgagcgttggcgacgacgttgaagctaaattcaccggcgttgatcgtaaaaaccgcgcaatcagcctgtctgttcgtgcgaaagacgaagctgacgagaaagatgcaatcgcaactgttaacaaacaggaagatgcaaacttctccaacaacgcaatggctgaagctttcaaagcagctaaaggcgagtaa

SEQ ID NO: 198338 - DNA, 684 bp, Klebsiella oxytoca
atgacggcaacagttccggtaatcaccattgatgggcctggcggtgcgggcaaaggcaccttatgcaaggcaatggcagaaacgctgggctggcatctgctcgactctggggcgatttatcgcgtgcttgctctcgctgcgctacatcatcatgtggatgttgaatccgaagaggcgctggtgccgctggctgcgcacctggatgttcgttttgtctccactaacggtagcctggaagtggtgctggagggggaggacgttagcgctgagattcgcactcaggatgttgccaacacggcctctaaagtggcggcttttccccgcgtgcgtgaagcgttgctgcgccgccagcgggcctttcgcgaattgccaggcctgatcgccgacggacgcgatatgggcaccgtcgtattccctgatgcgcaggtgaaaattttccttgacgcctccgcggaggaacgtgctcatcgccgcatgcttcagttgcaggagaagggctttagtgttaactttgatcgccttttatccgagataaaagagcgcgacgatcgcgatcgcaatcgtacagtcgcgccgctgatcccggctgccgatgctttagttcttgattcaacagaactaaacattgagcaagtgattgaaaaagcgctacactatgcgcgcgaaaaactggcttccgcttaa

SEQ ID NO: 198339 - DNA, 1284 bp, Klebsiella oxytoca
atggaatccctgacgttacaacccatcgcacgcgtagatggcacgattaacctgcccgggtccaagagtgtctctaaccgtgccttgctgctggcggctttggcccgcggcacgacggtgctgaccaacctgctggatagcgacgatgtacgccacatgctgaatgccctgagcgcgctgggagttcattacaccctgtcttccgatcgtacccgctgtgaagtcaccggcaacggcggccctctgcaggcggctgaagcattagaactgttcctcggtaatgccggaacggcgatgcgtccgctggcggcggcgttatgtttaggccgtaacgatattgtgctgaccggcgagccgcgaatgaaagagcggccgattggccacctggttgacgcgctgcgtcagggcggggcgcagattgattacctggagcaggaaaactacccgccgctgcgcctgcgcggcggtttcagcggcggccaggttgaagtggacggcagcgtttccagccagtttctgaccgcgctcctgatgaccgccccgctggcgcctcaggataccgtcatcgcgattaaaggcgatctggtttccaaaccttatattgatattacgctgcacctgatgaaaacctttggcgttgaggttgaaaatcagtcttaccagcgttttatcgtacgcggcaatcaacactaccgctcgccgggcgactacctggttgaaggcgatgcctcctcggcatcctacttcctcgccgccggcgcgattaagggcggaacggtgaaagtcaccggtatcggccgcaacagcgtccagggcgatatccgttttgccgatgtgctggaaaaaatgggcgcaaccatcacctggggcgatgacttcattgcctgcacccatggtgaactgaacgccatcgatatggatatgaatcatattccggatgcggcgatgaccatcgccacggcggccctgttcgcgaagggcaccacgacgctgcgcaacatctataactggcgtgtcaaagagaccgatcgtctgtttgcgatggccacggagctgcgtaaagtgggggcagaggtggaagagggggaggattacatccgcattactccgcccgcgaagctccagtttgctgagatcggcacctataatgaccaccgtatggcaatgtgcttctcgctggtggcgctttccgatacgccggtcaccatccttgacccgaagtgtacggcgaaaacgttcccggactactttgagcagctggcgcgaatcagtacgctggcctga

SEQ ID NO: 198340 - DNA, 1089 bp, Klebsiella oxytoca
atggctcaggtctataacttcagttcaggcccggcaatgctgccggcggaagtactcaaactggcacaaaaggaactgtgcgactggaacggtttggggacgtcggtgatggaaatcagccaccgtggtaaagagttcattaaggtggctgaagaagcggaacaggattttcgctccctgctcaatattccttccaactataaagttttattctgccacggcggcggtcgcggacagtttgccggtatcccgctgaacctgcttggcgataaaaccgttgccgactacgtcgatgccggctactgggcggccagcgcggtaaaagaagcgcataaatactgcacgccgaacgtgatcgacgccaaaatcaccgttgacggcctgcgcgcggttaagccgatgagcgaatggcagctgacccctggcgcggcctatctgcactactgcccgaacgaaaccattgacggtattgccattgaagaagcgccaaactttggcgacgatgtggtcgtcacggcggatttgtcttcgacgattttatcccgtgaaattgacgtcagccgctatggcgtgatctacgcgggcgcgcagaaaaacatcggtcccgcaggtctgacgctgattattgtgcgcgaagatctgctgggtaaagccagcgtagcctgcccgtcgattcttgattactccatcctgtccgccaatgactccatgtttaacacgccgccgacgtttgcctggtacctgtcaggtctggtgtttaaatggctgaaagagcagggcggcgttgccgctatggataaaatcaaccagcagaaagccgacctgctttatagcaccatcgataacagcggtttctatcgcaacgatgtcgctgcggcgaaccgctcgcgcatgaacgtgccgttccagctggcggacagcgcgcttgataaactgttcctcgaagagtcctttgccgcaggtttgcatgcgctgaagggccaccgcgtcgtgggcggcatgcgtgcttccatttataacgccatgccgctggcgggcgtgaaggcgctgaccgactttatgcaggacttcgaacgccgtcacggttaa

SEQ ID NO: 198341 - DNA, 693 bp, Klebsiella oxytoca
atgaagacatttgactggcatcgtatggcactggataaagtgcccgtggaatttctggccgaggtggcattacggagcctctacaccttcgtactggtatttatttttctcaagataaccgggcggcggggcgttcgtcagatgtcactgttcgaagtgctcatcattttgaccctcggttcggccgcgggcgacgtcgcattctatgatgacgttccgatgctgccggtactggcggtttttatcactctggccctgctgtaccgattgattatgtggctgatggggcatagcgaaaaactggaggatctgctggagggtaagccgattattgttgtggaaaacggcgagctggcctgggagaaactgcaggcggaaaacatgaccgaatttgagttttttatggagctgcgaatcagcggggttgagcaactggggcaggtgcggctggctattctggaaaccaacgggcagatcagcctctatttctatgaggatgacgatgttaaagccggactctccattcttccttcccgctttaccgatcgttttaccacgataccccgggacgacgagtatgcctgcgttcgctgtagcgcaatccttacgctacgagccggggataaacaattatgccctcgctgcgcaaatgcagaatggtcgaaggtcagccgggcaaaaagagtcacctga

SEQ ID NO: 198342 - DNA, 1761 bp, Klebsiella oxytoca
atgactcaaacatttattcccggcaaagatgccgccctggaagattccatcgctcgcttccagcagaagttgcacgacctcggattcgatattgaagaggcctcatggctcaacccggttccgcacgtctggtcagtgcatatccgcgataaagagtgcgccctgtgcttcaccaacggcaaaggcgccaccaaaaaagccgcgctggcctccgcgctcggagagtactttgagcgtctctcgaccaactatttctttgccgacttctggctgggcgagactatcgccaacggtcccttcgttcactatccgaatgaaaaatggttcccgttaaccgacgatgacgaagtaccggaaggcctgctggatacccgcctgcgcgcgttctacgatcctgacgatcagttaaccgccagcatgctggtcgatctgcagtcagggaatgacgatcgcggcgtctgcggtctgccgttcacccgccagtctgatggtgaaacggtctatattccgatgaatattgtcggcaacctgtacgtttctaacgggatgtccgcgggcaacacccgcaacgaagcccgcgttcagggcctctcagaagtgttcgaacggcatattaaaaaccgcattatcgccgaaagcatcagcctgccggagatcccggcggaggtgatggcgcgctatccgggcgtagtcgaatcgatcaataagctggaggccgaaggtttcccgattttcgcttatgacggttcgctcggcggcaaatatccggttatctgcgtcgtgctgtttaacccggctaacggcacctgtttcgcctctttcggcgcgcatcccgatttcggcgtggcgctggaacgtaccgttaccgaactgctccagggtcgcagcctgaaagatctcgacgtcttcacgccgccaaccttcgatgatgaagaagtcgctgaacatgcgaaccttgaaacgcactttatcgattccagcggcctgatctcctgggatatgtttaagcaggatgccgactacccgttcgtggactggagcttctccggaaccacggaggaagagttcgccaccctgatggctatctttaaacaagaagataaagaagtttacatcgccgattacgaacacctgagcgtctacgcctgccgaatcattgtcccgggcatgtctgatatttatccggcggaagacctctggctggcgaataacagcatgggcgcgcctctgcgggaaacgattctttccctgccggaaagcgagtgggaaaaagaagattatctggcgcttatcgaacaaatggatgatgaaggccttgatgacttcacccgcgtgcgcgaactgctgggtctggcgaccggcaaagacaacggctggtatacgctgcgcattggcgagctgaaagctatgctcgcgctggcgggcggcgatctcgagcaggcgctaatctggaccgagtggacgatggagttcaacgcctccatctttagcgccgagcgcgctaattactaccgctgcctgcaaaccctgctgctgctgagccaggaagaggagcgccagccgctgcagtatctgaacgcttttgtacgcatgtatggcgccgatgccgtagaagccgccagcgccgcgctgagcggagaagcgcctttctacggcctgcaggcagtagacagcgacctgctcgcgttcccggctcatcagtcgctgctgaaagcctacgaaaagctgcagcgcgcaaaagcagcattctggggtaaataa

SEQ ID NO: 198343 - DNA, 858 bp, Klebsiella oxytoca
gtgaaagctgacaacccttttgatcttttactccctgctgccatggcgaaagtcgccgaagaagcgggtgtctataaagcgacaaaacatccgataaagacgttttatctggcgatcaccgcaggtgtcttcatctctatcgcttttgttttctatattaccgcgacaaccggcacggccgggatgccattcggggttgccaaactgattggaggcatctgcttctcactaggtttgattctctgcgttatttgcggtgccgacctgtttacctcaaccgttcttatcgttgtcgcgaaagccagcggaagaatcacatggggtcaactggcgaaaaactggctcaacgtctatgttggtaacctgattggttgcttactctttgtattgctgatgtggctttcaggcgaatatatgactgccaacggtcaatggggacttaacgttctgcaaaccgccgaccacaaaatgcaccatacttttgttgaagccgtgtgcctgggtatcctggcaaacctgatggtctgccttgcggtatggatgagctactccggccgcagcctgatggataaagccatgattatggttttaccggtggcaatgtttgttgccagcgggtttgagcatagtatcgcgaacatgtttatgatcccgctgggtatcgttatccgcgactttgcaagcccggaattctggaccgctgtcggttcaactccggaaagtttctctcacctgaccgtcatgaacttcatcactgataacctgattccggtaactatcgggaacatcatcggcggtggtctgctggttgggttgacatactgggtcatttacctgcgtggcgacgaccatcactaa

SEQ ID NO: 198344 - DNA, 2283 bp, Klebsiella oxytoca
atgtccgagcttaatgaaaagttagccacagcctgggaaggttttgcgaaaggtgactggcagaacgaagtcaacgtccgcgacttcatccagaaaaactataccccgtacgaaggtgacgagtccttcctggctggcgcaactgacgcgaccaccaagctgtgggacaccgtaatggaaggcgttaaacaggaaaaccgcactcacgcgcctgttgattttgatacttcccttgcatccaccatcacttctcatgacgctggctacatcgagaaaggtctcgagaaaatcgttggtctgcagactgaagctccgctgaaacgcgcgattatcccgttcggcggcatcaaaatggtagagggttcctgcaaagcgtacaatcgcgagctggacccgatgctgaagaaaatcttcactgaataccgcaaaactcacaaccagggcgtgtttgacgtttacaccaaagacatcctgaactgccgtaaatctggcgttctgaccggtctgccggatgcctatggccgtggtcgtatcatcggtgactaccgtcgcgttgcgctgtacggtatcgacttcctgatgaaagacaaatacgctcagttcgtctctctgcaagagaaactggaaaacggcgaagatctggaaggaactattcgtctgcgcgaagaaatctctgaacagcaccgtgcgctgggtcagatcaaagaaatggcggcaaaatacggctgcgatatctctggtccggcaaccaccgctcaggaagctatccagtggacctacttcggctacctggctgccgttaaatctcagaacggcgcggcaatgtccttcggtcgtacctccagcttcctggacatcttcatcgaacgtgacctgaaagccggtaaaatcaccgagcaagacgcacaggaaatgattgaccacctggtcatgaaactgcgtatggttcgtttcctgcgtacccctgaatatgatgaactgttctctggcgacccgatttgggcaaccgaatctatcggcggtatgggcgttgacggccgtactctggtcaccaaaaacagcttccgtttcctgaacaccctgtacaccatggggccgtctccggagccgaacatcaccattctgtggtctgaaaaactgccgctgagcttcaaaaaatacgccgcgaaagtgtccatcgatacctcttctctgcagtacgagaacgatgacctgatgcgtcctgacttcaacaacgatgactacgctatcgcttgctgcgtaagcccgatggttgttggtaagcaaatgcagttcttcggcgcgcgtgctaacctggcgaaaaccatgctgtacgcaatcaacggcggcgttgatgaaaaactgaaaatgcaggttggtcctaaatctgaaccgatcaaaggcgacgttctgaacttcgacgaagtgatggaccgcatggatcacttcatggactggctggctaaacagtacgtcactgcgctgaacatcatccactacatgcacgacaagtacagctacgaagcttccctgatggcgctgcacgaccgtgatgttatccgcaccatggcatgtggtatcgcaggtctgtccgttgcggctgactccctgtctgcaatcaaatatgcgaaagttaaaccgattcgtgacgaaaacggtctggctgtcgacttcgaaatcgaaggcgaatacccgcagtttggtaacaacgactctcgcgtcgatgatatggccgttgacctggttgaacgtttcatgaagaaaattcagaaactgcacacctaccgcaacgctatcccgactcagtccgttctgaccatcacctctaacgttgtgtatggtaagaaaaccggtaacacccctgacggtcgtcgcgctggcgctccgttcggaccaggtgctaacccgatgcacggccgtgaccagaaaggtgctgttgcctctctgacctccgttgcgaaactgccgtttgcttacgcgaaagatggtatttcttacaccttctctatcgtgccgaacgcgctgggtaaagacgacgaagttcgtaaaactaacctcgccggcctgatggatggttacttccaccacgaagcgtccatcgaaggcggtcagcatctgaacgtcaacgttatgaaccgcgaaatgctgctcgacgcgatggaaaacccggaaaaatatccgcagctgaccatccgcgtatccggctacgcagtacgttttaactccctgacgaaagagcagcagcaggacgttattactcgtaccttcactcagaccatgtaa

SEQ ID NO: 198345 - DNA, 831 bp, Klebsiella oxytoca
atggataacagccaaaacagactcgacatagcctttgagctgtgcatctacataggccccggatgggccaaattcggagatatcaccgcaatgtcaacaattggtcgcattcactcctttgaatcctgtggcaccgtcgatggcccggggatccgctttatcaccttcttccagggctgcctgatgcgctgcctctattgccacaaccgcgatacctgggatacccacggcggcaaagagattaccgttgaagagctgatgaaagaggtggtgacctatcgccactttatgaacgcttccggcggcggcgtgacggcatccggcggcgaggctatcctgcaggccgaatttgttcgcgactggttccgcgcctgtaagaaagaaggtattcatacctgtctcgataccaacggctttgtgcgccgctacgacccggttattgatgaactgctggaagtcaccgatctggtgatgctcgatctcaagcaaatgaatgatgaaattcaccagaatctggtaggcgtctctaaccatcggacgctggagtttgcccgttacctgtcaaacaaaaacatcaacgtctggatccgctacgttgtggttccgggctggtccgacgatgatgattccgcgcatcgcctgggtgagtttactcgtgacatgggcaacgttgagaaaatcgaactgctgccgtaccacgagctgggcaagcacaaatgggtagccatgggcgaagagtacaagctggacggcgtccatccgccaaagaaagagaccatggaacgcgtgaagggcattctggaacagtacggtcataaagtgatgtactaa

SEQ ID NO: 198346 - DNA, 858 bp, Klebsiella oxytoca
atgagccagatagacaataacttgttgataagcataagaaacggagcttcagggctaagcccgatactggagaaagttggccgttttattacggaaaatcctgactttgtgatgcgtcacacgatttcagaactggccgactccattgataccagtgaggggagtatcacccgtttttgtcgggcctttggttttaaaggtttctcggatttcagaaccgcgctggcgatggagcagggcgccgcgcgctcggaagaccacggtatcaacgagagcgaagagattgcgccggtgctggcgagcattcgcgacagtaatgccattgtcgataatcaggagctgaaagccgcggccgactggcttaacaccctgaacagcattgctatctatgccgtgggcacggcggtgccggtggcgttgttcctgcagatgaatttaatcaatatgggtaaggcggccagctttatcgatcgctcctatccggcggcgatgccgctgctggctgacagtcaaaaaaccggcatcatcgtcgttcacagcgaacaggcatcggcggatatgatgcaggccctgtcgctggcaaagcagcagggcgttaaaattttatcgctgacccgcgggacgtttgcgccgctggcccgtttatctgactggaatcttcaggcggcggtagctttacagggggaaggggagtcggggtttgcggaaatcgccggcgcaatgatggtggccgaccggatcctcagcgcgctggaagagcaggatgaacgctatgcggaataccgaaaagcgcatcagaagcgcattttctcgattgagagcgtggcgaataagctgtcggaatattttatgtcctga

SEQ ID NO: 198347 - DNA, 276 bp, Klebsiella oxytoca
atgaaaggtctcatagtctgtcgtaccggtatgggcagctccttaatgctcaaaatcaaagcacaaaaaatcatcgacaagcacggctggaatatcgagctggagcacgacgtcctctcagggttacgcacctggcgagatattgattttgtcatcactatgcgcgatctcaccgacgaagtcgaagccgccggattcagagcggtcggcatcaccgacctgatgaacagtgaagagatggagtctgcgctcaccgacatcgttcaaagcaactaa

SEQ ID NO: 198348 - DNA, 1266 bp, Klebsiella oxytoca
atggatttcctcagatttattgtattcgacattctgggcgtaaccccacttttagttggctttattgcattaatcggcctgttaatccaacgcaagccgattgaaaaagtcctttccggcaccttcaaaaccatcgtcggctttctggtttttgccggcggcgccggtctggcagtcacttccctgggtaactttcagaccttattcagcgatggatttggcctgaagggcgtcatgccgctggcagaagcgctaaccggactggcgcaaaccaaattcgccatgtgcgtgtcgctgatcatggtgattggttttggctggaacctgttttttgcccgcgtgacgccgtttaaatacatctttcttaccgggcaacataatctttatctctccgcgctgcttaccgtaacgctgaaagcgctgggctacagcgacatgacgaccatcattgtcggctccgtgctgctgggtctcgccgcctgcctctatccggccattgcgcaaccgtggatgcgaaaaattaccggtaatgatgagatcgcgatggggcactacgtcaccctggcctacgccgcctccggctggattggcgcaaaggtcggcgatccgaaacaatccaccgaaaagctgaatcttcccggctggctggggatctttaaagattacatcgtctcggtgtcgatctcggtgagcatcttctactacatcgccgcgctcgctgccggaaaagccgcggtcaccgcagcggcaggcgggatgcactggctggtttacccgctctttcagtctctgacctttaccgcttcgctgtacatcatcattaccggcgtacgcctgctgctgtcagaaattgttccggccttcctcggcatctcggagaagtttattcctaacgccaaacccgcgctcgactgcccggtggtcttcccctacgccccgaccgccaccgtgctggggtttatctcttcgtttgtcggcgggctggtggtgatgggctttctggcgatccttggccaaaccgtgattatcccggtagccattccctacttcttcattggcgcgaccgcagcggtatttggtaatgcctccggcggctggaaaggcgcgattgccggaagctttatcaccgggatcctgatcggcatcggcccggcgctgatttacccgattatggaatccgtcggtctttcaggcaccagcttcccggaaaccgacttcgtcgctctgggtctggtcgtgtactacatcggtaaaatgctgccctaa

SEQ ID NO: 198349 - DNA, 798 bp, Klebsiella oxytoca
atgaacattgatgaactgaaatcccacgcgcttgccgcccgccgcgagatcgtcaccatgatttacgagtccggaattggccatccgggcggggcgctgtcaataatcgacgtgcttacctggctctattaccaggaagtcgatctggccgcctccccccgctcgcgcgtggtgatgagtaaaggccacgccgtcgccgcgcagtacgccatgctgtatcaacaaggcaagatcgagcgcagcgagttcaatacgttccgacagatcaactcgcgcctgcaggggcacccgagcattaagtcgctgccggaagtcgatgcgacaaccggactgctgggtcaggggctgtcgattgcttttggtatggcggccgccaaaaagcggcgcaacgatccgcaccgggtatttgccatcgttggcgatggcgaaatgcatgaaggccaaatctgggaaaccttacagcaggccgggcatatgaaaatggataatctggtcgccatcatcgattacaacggcttctcttcccacgatccggtcaatgacgtcgttaatctcgagccgctggcggacaaaatccgcagctttggctggcatgtactggaactgcacaacggcaatgatatgcatcaggttgccgataccctgatgctatcccgtcacctgaaaggtaaacctgtcgccatcgtggcgcgcaccaccaaaggttccggcgtcagctatatggaaaacaacggcgactggcactcaaaaaccccgagcaaagaacaatttcagcaggcgatggaggagttacagtga

SEQ ID NO: 198350 - DNA, 912 bp, Klebsiella oxytoca
atgaaagcaccccgtgatgagatcgggcatgccctgattgcgctaaaagaaaagggctatcccattgttgttatcgacagcgatttagccagctctacccgtaccgaccagtttcaggccgtctatccggaggcctttttcgaaatgggcattgcggaaggttccgccatgagcttcgcggtcggccaggcgctggaaggctttatgcccttctatgttaactttgcgatgttcgtcaccggcaccgcctggacccagctgcggcaggcctgctatgccaaagccaacatcaaactcgtcggtagccaccccggtatggatgatggtccggacggcgcttcgcaccatgcgctggaggatttagcgctgacccgcgtccttccgggattaaccgtcctgaccccggcagatgcggaagaaatcgccgaggctttcgagcaggcggcaaaaataaagggacccgtttatattcgcgtggcgcgcgagccgatgccggttcgcgacaaaagcgtcgttccccgggtcagcgatatcgccgccatcgccgacagcggcacggattttgcgattctgtttgaaggaacggtactggaacaggctaccgacggctatgaaaagctgctcgccagcggcaaaaagggcaagcttattcacgttgcaaccgtcaaacccttcaaccagcaggcgttttatcggctggtcgaaggctgcccgcttatcgctacgcttgaaaatcacaccgtcaacggcggcctcggcggcctgatcgcggaaaccctggcgcaaaaggcacatccggcgcgccttacgcgtctgggaacgcaggacacatttaccgaatcgggtaatagcaggcagctaaaagcgaaatatggcatctcgggagacgcgctgtttaacgcgctacgctaa

SEQ ID NO: 198351 - DNA, 438 bp, Klebsiella oxytoca
atggaagagaggctattttccgcctgtcagttcaccagcgactgcctgagctggcgcagcgccgttcatctcgcctgccgtccgcttgaggagcagggaaaaatcaccgggggctatgccagggctattatcagcgccacggagcaggatggtccctggtatatattgagcccggcgtttgcgctaccgcacgcgcgtccggaagccggcgtgctgagcagaaacagcgcgctttcgctgctttgctgtagcgaggccgttgattttccggagcatcccggcattcggctgatagtcgtactggcggcggccgatagtgaacagcatatccagaccatccagcggttagtctgctggctggatgagggggagagacttcagcgatacagcacggtgcaaaaccgcgcacagtttattgcgcttcttgcgtcgcattaa

SEQ ID NO: 198352 - DNA, 1149 bp, Klebsiella oxytoca
atgaccatctacacccggccagtgcaaatgctgctctgtggcctgcttttgttgaccctggcgatagcggttttaaatacgctcgtcccgctttggctcgcccatgaaaatatgccgacctggcaggtcgggatggtgggctcgtcctattttaccggtaatctggtgggaacattgcttgccggatgggtaattaagcgtctgggctttaaccgcagctattacctggcatcggttatttttgccgtgggctgcgtgggtcttggtattacgctgggcttctggagctggttcagctggcgctttatcgccggcgtcggctgcgcgatgatttgggtggtggtggagagcgcgctggtctgtagcggcacttcgcggagccggggtcgcctgctggcggcgtatatgatgatttattacgtcggcacggtgctgggccagttaatggtcagcaagctgccgacggatctgatgagcgttctgccgtgggtgacggcgctggcgctggcggccattctgccgctgctgtttgctcgcgtggcgactcaggccgatgagccgcacgaaccggcgcgtatctggccaatgttaaggctgcgtcaggcccgccatggcgtcaacggctgcattatttccggcattgtgctcggttcgctgtatggcctgatgccgctgtggctcaaccaccagggcgttagcgattccggcatcggcttctggatggcggtgatggtgagcgcaggtatcgtggggcagtggccgattggccggctcgccgatcgctacggccgtctgctggtcctgcgcgttcaggtgtttgtggtgattctcggctgtctggcgatgttaagccaggccgcaatggcgcccgcgctgttcgtgctgggcgcttccggcttcacgctctatccggtggctatggcctgggcctgcgaaaaagttgagcgtcatcagctggtggcgatgaaccaggcgctgttaatgagctataccgtgggcagcctgcttgggccgacgctgaccgccatgctgatgcagaacttctctgacaatctgttgtttatcatgattgccagcgtgtcattcatctacctgctgacgctgctgcgcaaagcggggcaccatcctacgccggtggcgcacgcctga

SEQ ID NO: 198353 - DNA, 864 bp, Klebsiella oxytoca
atggggagtggatggcatgaatggccgctgattattttcacggtctttggtcagtgcgtggtgggcggcttcattgtgctggctctggcgctaatgaaaggcgacttatcgcgtgaacagcagcagcgcgtcgtgtggagcatgtttggcctgtgggtgctgataggcgtgggctttattgcctcaaccctgcatcttgggtcgcccatgcgcgcgtttaactcgctcaatcgcgtaggcgcctcgtcgctcagtaacgaaatcgccagcggggcgcttttcttcgccgtcggcggcattggctggctgctggcggtggtgaataagctaccggcggggctgcgtcatctctggctggtcattaccatggtgctggggataatctttgtctggatgatggtccgcgtctataacactattgatacagtacccacctggtatacggtctggacgccgcttagcttcttcctgacgatgtttatcggcggtccgctgctgggatatctgctgctgcgcgttgccgatgtcaacggctgggcgatgcgcctgctgccggcggtgaccctgctggcgctggtgattagcgccatcgtggtgctgatgcaaggcagcgagctggcgacaatccatagctctattcagcaggcctcggcgctggtgccggcctacggctcgctgatggcgtggcgcctggttgcgctggcgttggcgctggtctgctggattgctccccagctcaaaggctaccagcctgcgctgccgatgctggggctggcttttgtgctggtgctgatcggtgagacgatcggccgcggcgtcttctacggcctgcatatgaccgttggaatggcaatcgccagctaa

SEQ ID NO: 198354 - DNA, 618 bp, Klebsiella oxytoca
atgacaactcaatatggattttttattgattccgcccgttgcaccggttgcaaaacctgcgaactggcttgtaaagactataaaaacctcacgccggaagtgagcttccgtcgtatctacgaatacgccggcggcgactggcaggaggataacggcgtctggcagcaaaacgtctttgcctattacctctctattgcctgcaaccattgtgaagatccggcctgcaccaaagtttgcccgagcggggcgatgcataaacgtgaagatggctttgtcgttgtcgatgaagatgtctgtatcggctgtcgctattgccatatggcctgcccgtacggcgcgccgcagtacaatgcgacaaaaggtcatatgaccaaatgcgacggctgccacgagcgcgtcgccgatggcaaaaagccgatttgcgtggaatcttgcccgctgcgcgcgttagatttcggcccgattgaagagctgcgccaaaaacacggccagctggccgccgttgcgccgctgccttcggcccacttcactaaaccgagtatcgtgattaaacctaacgccaacagccgaccgtgtggagataccaccggctacctggccaacccaaaggaggtgtga

SEQ ID NO: 198355 - DNA, 2439 bp, Klebsiella oxytoca
atgaaaaccaaaacctccgatgctttactggctgctgaggtgagccggcgtggtttaatgaaaaccacggcgattggcgggctggcgatggccagcagcgcttttaccttacccttcacgcgcattgcccaagccgcagacaacctcaaccccgccagcgaaacggtcacctggagcgcctgtacggtgaactgcggcagccgctgcccgctgcggatgcatgtggtgggtggtgagataaaatatgttgaaacggacaataccggcgacgatagctacgacggtctgcatcaggttcgcgcctgtctgcgcggccgctcgatgcgtcgacgcgtctacaacccggaccgcctgaaatatccgatgaagcgcgtgggcaaacgcggcgagggcaaattcgagcaaatcagctgggaagaagcgttcgatactatcgccagcaatatgcagcgcctgataaaagagtacggtaatgagtccatctatctgaactacggaacgggaaccctcggcggaaccttgactcgctcatggccaccggggaaaaccctgattgcccgcctgatgaactgctgcggcggctatctcaaccattatggcgactactccaccgcgcaaattgccgcgggactgaactacacctacggcggctgggccgatggcaatagcccgtcggatatcgaaaacagcaagctggtggtgctgtttggcaataaccccggggaaacccgcatgagcggcggcggggtgacctactacctggaacaggcgcgggagaaatctaacgccaggctgattattatcgatccacgctataccgataccggcgccggacgcgaagacgagtggatccctatccgcccgggaaccgatgccgcgctggtctccgcgctggcgtgggtgatgattaacgagaacctcgttgaccagcctttcctcgacaagtactgcgtaggctatgacgagaaaacgctgccggaaggggcgccggccaatggccactataaggcctatattctcggtcagggcaaagacggtatcgcgaagacccctgagtgggcgtcgacgattaccggcattccccaggcgcgtatcgtgcagctggcgcgcgaaatcgccagcgctaaacctgcctatatttctcagggctggggcccacagcgtcatgccaacggtgagctggtttcccgcgcgatttccatgctggcaatcttaaccggcaacgtcgggattaacggcggcaataccggcgcgcgtgaaggttcttactccctgccttttgaacgtatgccgacgctggataatccggtggaaaccagtatttccatgtttatgtggaccgatgcgattgagcgcgggacggaaatgaccgcgctgcgcgacggcgtgcgcggcaaagataagctcgacgtgcctattaaaatggtctggaactatgccggtaactgcctggtcaaccagcattcagagattaaccgtacccatgacatccttcaggatgacaagaagtgcgagatgattgtggtcattgattgccatatgacctcctcggcgaaatatgccgatattctgctgccggactgtacggcttcggagcagatggattttgccctcgatgcctcctgcggcaacatgtcatacgtgatttttgccgatcgggccatcaagccgcgttttgaatgcaaaaccatctatgagatgaccacggagctggcgaagcgcatgggcgttgagcaacgtttcaccgaaggccgcactcaggaagagtggctgcgtcacctctatgagcaatcccgtaaagcgatcccggcgctgctgccgtttgatgaattccgcaagcagggaatcttcaaacagcgcgatccggaaggccaccacgttgcctataaagctttccgcgaagatcccgccgccaatccgctcacgacgccgtcagggaaaattgaaatctactctgcgcagctggcggaaattgccgcgacctgggaactgaaagaagaggatgttatcgatccgctgccgatatacagccctgggtttgaaaactatgacgatccgctggcgaaaaagtatccgctgcagctgaccggttttcactataaagcccgcacgcactccacctacggcaacgttgacgtactgaaagccgcctgccgtcaggagatgtggatcaacccgcttgatgcacagaagcgcggtatcgccaatggcgatcggatccgcatttttaacgatcgcggtgaagtgcatatcgaggccaaagtgaccccgcgcatgataccgggcgtggtcgcgctgggtgagggggcctggtataacccggacgcaggccgcgtggatcaggctggctgcattaacgtgctgaccacccaacgcccgtcgccgctggcgaaaggcaatccatcgcatagcaacctcgtccaggttgaaaagctgtaa

SEQ ID NO: 198356 - DNA, 1293 bp, Klebsiella oxytoca
atgctcgatcccaatctgctgcgtaccgagccagacgcagtcgcagaaaaactggcacgccggggctttaagctggatgtagataaacttcgcgctctggaagagcgtcgtaaagttctgcaggttcaaactgaaaacctgcaggcggagcgcaactcccgatcgaaatccattggccaggcgaaagcgcgcggggaagatattgagccattacgcctggaagtgaacaaactcggcgagcagcttgatgccgctaagaccgagctggacgcgctgctggcggagatccgcgatatcgcgctggctatccctaatatcccgcacgacgacgttccggccggtcgcgacgaaaacgacaacgttgaagtcagccgctggggaaccccgcgcgagttcgattttgacgttcgcgatcacgtcacgctgggcgaaatgcacggagggctggattttgccgccgccgtgaagctgaccggttctcgctttgtggtcatgaagggccagctggcacgcctgcatcgcgcgctggcgcagtttatgctggatctgcataccgaacagcacggctacagcgaaaactacgtcccgtatctggttaaccaggacacgctgtacggtaccggtcagctgccgaaattcgccggcgacctgttccatactcgtccgctggaagaagaagccgacagcagcaactacgcgctgatcccgacggcggaagttccgctgaccaacctggttcgcgatgaaatcattgatgaagacgatctgccgatcaaaatgaccgcgcatacgccgtgcttccgctctgaagccggatcttacggccgcgatacccgcggtctgatccgtatgcaccagttcgacaaagtcgagatggtgcagattgtacgtccggaagattccatggcggcgctggaggagatgaccggccacgccgagaaagtgctgcagctgctgggtctgccgtatcgtaaagtggctctgtgcacgggcgatatgggcttcagcgcatgcaaaacctacgatctggaagtgtgggtgccggcgcagaatacctatcgtgagatctcttcctgctccaacgtctgggatttccaggcgcgtcgcatgcaggcacgctgccgcagcaaatctgacaagaaaactcgcctcgtacacacgctgaacggttctggcctggcggtcggacgtacgctggtcgcggtgatggaaaactatcagcaggcggatggtcgcatcgagatcccggaagttctgcgtccgtatatgcgcggccttgaatttatcggctga

SEQ ID NO: 198357 - DNA, 1344 bp, Klebsiella oxytoca
gtgagcaacctgtcgctcgatttttccgataacgcgtttcaacctctggccgcccgtatgcggccagaaaatttagcgcagtacattggccagcagcacctgctggcgccgggtaaacccttaccgagggcgattgaggccgggcatctacactcgatgatcctctgggggccgcccgggacaggaaaaaccaccctggccgaagtgattgcgcgctatgccagcgccgacgttgaacgtatctcagcggtgacctccggggtgaaagagatccgcgaggccattgaacgcgcgcgccaaaaccgcaacgcgggtcgccgcacgatcctgtttgtcgacgaagtgcaccgtttcaataaaagccagcaggacgcctttctgccgcatattgaagacgggaccatcacctttatcggcgcgacgacggaaaatccctcctttgaactcaattccgctctgttatcccgcgcgcgcgtttatctgctcaagtcgctgaccagcgacgacatcgagcaggtgctcaaccaggcgatgagcgacaaaacgcgcggctacggcgggcaaaatatcgtcctgccggacgagacgcgcaaggccatcgccgaccttgtcaacggtgatgcgcgccgggcgctgaatacgctggaaatgatggccgatatggccgaagccgacgcctccggcaatcgcgtgctgaaagttgagctgctgactgaaattgccggtgagcgcagcgcgcgtttcgacaacaaaggcgatcgcttttacgatttaatctccgcactgcacaaatcggttcgcggcagcgccccggacgccgccctctactggtacgcgcggattattaccgccggcggcgatccgctctacgttgcccgccgctgcctggcgattgcctcggaagatgtcggcaacgccgatccgcgcgcgatgcaggttgcgatctccgcatgggactgctttacccgtgtcggaccggcggaaggcgaacgggcaattgctcaggccattgtctatcttgcctgtgcacccaaaagcaacgcggtttacaccgcgtttaaagcggcgatggccgacgcccgcgaacgtcccgattacgacgtcccggttcatttgcgcaatgccccaacgaagctgatgaaagagatgggctacgggcaagagtatcgctatgctcacgatgaaccgaatgcttatgccgccggggagcagtacttcccgcaggaaatggcgcaaacgcgctattataagccgacaaaccgggggctggagggcaaaataggcgaaaagctcgcctggttaaccgaacaggatcaaaatagcccgataaaacgctaccgataa

SEQ ID NO: 198358 - DNA, 612 bp, Klebsiella oxytoca
atgaaaaaactcgcaatcacctgtgcattactgtccagttttgtcgtcagtcaggtatgggcggatgccgccagcgatttaaaaagccgccttgataaagtgagcagcttccactccagctttacgcagaaggtcaccgacggcagcggtaatgccgtgcaggacgggcagggggacctgtgggtcaagcggcctaatctgttcaactggcatatgacccagccggatgaaagcgtgctggtttccgacggcaaaacgctgtggttttacaacccgtttgttgagcaggctaccgctacctggctgaaagatgcgaccagcaacacgccgtttatgctgattgcccgcaatcaggccagcgactggcagaactacaacattaagcagaatggtgatgattttgttctgacgccgaaaaacggcagcggtaatctgaagcagttcaccatcaacgtgggtcgcgacggtacgattcatcagttcagcgccgtggaacaggacgatcaacgcagcagctatcagctgaaatcgcaacaaaatggtgccgtggatgcatctaagttcacctttacgccgccgcaaggggttacggtggacgatcaacgtaaatag

SEQ ID NO: 198359 - DNA, 4059 bp, Klebsiella oxytoca
ttgagccaggaatacactgaagacaaagaagtcaaattcacaaagctgagtagcggacgccggctccttgaggcgttactcattctttgctccctttttgccatctggttgatggcggccttactcagctttaatccctcggatcctagctggtcgcaaacggcgtggcatgagcctattcacaacataggcgggacgccgggagcctggcttgccgatacgctattttttatttttggcgtaatggcctataccattccggtcatcattatcggcggctgctggtttgcctggcgtcatcaagaaaacgacgagtacatcgactatttcgccgtctcgctgcgtttaattggcgcgctggcgctgatcctcacttcctgcggtctggcggcaatcaacgctgatgatatctggtatttcgcctccggcggcgtgatcggcagcctgctgagcaccaccctgcaaccgctgctgcacagcagcggcggcacaatcgcgctgctctgcatctgggcggcaggactgacgctatttaccggctggtcctgggttagcattgctgaaaaactcggcggtgcgattctttctattctcacgtttgccagcaaccgtacccgtcgtgacgatacctgggttgatgaaggggaatatgaagatgatgaagaagaatatgaagatgatgaacccgcgaagcagcagggttctcgacgcgcgcgaattttacgcagcgccttagctcgccgccagcgtctggctgagaagttctctaatccgatgggacgtaagaccgatgcggcgctgttctcgggtaaacggatggatgacgccgaagacgaggtccagtacagcgccggcggtgcgcctgttgccgctgacgatgtccttttttctggctccagcgcagcgcgtccggcaaatgctgatgatgttctgttctccggcgtcagtgcggcacgtcccggcgattttggcccctacgatcctctgttaaacggtcatagcattgccgatccggtggctttggccgcgcaggataccgctgcgccgcaggcatggtctgaaccgctgccagggtatgaggcgcagccggtctatcatccggaacaggcaccggtacagcagccagcatatcagccagaaccggcttaccagccgcagcatgcgtaccagccagaacaggcaccggtacagcagccagcgtatcagccagcaccgccttaccagccgcagcatgcttaccagccggaaccggcttaccagccgcagcatgcgtaccagccggaacaggctccggtacagcagccagcatatcagccggaaccggcttaccagccgcagcatgcgtaccagccggaacaggccccggtacagcagccagtatatcagccggaaccggcttaccagccgcagcatgcgtaccagccggagcaggccccggtacagcagccagcgtatcagccggaaccggcttaccagccgcagcacgcgtaccagccggaacaggccccggtacagcagcctgagccttacgccgcctccgttgagcctgagcctccgcaagaggaggtgaagcctcagcgtccgccgatgtactactttgaagaagtggaagagaaacgcgcgcgtgaacgcgagcagcttgccgcatggtatcagccgattccggagccagtcagtccggttgcgacaaaaccgatcgcgcctccgcctgctccggcggctgatgttgccgcggtgagcgcgctggcggctggcgtccatcaggccaccggggcggcctctgctagcgccgcggcggcctccgtcgcatctgccgcatccagcgccgcgccgctgtttagcccggcgtcgggcggcccgcgagcgcaggtaaaagagggcatagggccgaaattgccgcgtccaaaccgcgttcgcgtgcccacgcgccgtgagctggcttcctatggcattaagctgccttcgcagcggttggctgaagaacgtgcgcgtcaggcagagcatcagcactatgatgacgatgcgctgacggacgaggaagtagcagagcttgagcagggtgagctggcgcgtcagttcgcggctgcgcaaaatcagcgctatggcgatagctacgctgcggaagaggatgatgtagacgaggattcagccgctgaagccgaacttgcccgtcagtttgccgcttcccagcagcagcgctacgccagcgagcagccgccgggatcgcatccgttctctgcggcggattatgaattctcgccaatgaaaacgttagttgatgatacgccgagcgagcctgtcttcacgccgttgccggaagtacagcagcctgccccgcagtatcagcagccgacccagcattcgcagcccgtacagcagccgatgccgcaccagcagatgcctcagccgccgcaacatgcgcagcagcagccggttcaccatcagccgatgccgcagcaggctcctggcagctatccgcagcagcaggctccgcagcagccgatcccgcagccgcaggaaagtctcattcacccgctgttgatgcgcaatggcgacagtcgcccgttacagaagccgacgacgctgctgccctcgcttgacctgctcacgccgccaccggctgaagttgagccgatcgatacctttgctctagagcaaatggcgcgtctggttgaagctcgtctggccgatttccgcattaaagccgatgtggtgaactactcacctggcccggttattacccgctttgagcttaacctggcgccgggcgtgaaagcggcgcgcatttccaacctgtcgcgcgatctggcccgttctctgtccactgcggcggttcgcgtggtggaggtgatcccgggtaaaccctacgttggcctggagctgcctaacaaaaagcgccagaccgtttacctgcgcgaagtgctggataatgcgaaattccgcgataatccttcaccgctcacggtggtcctcgggaaagacatcgcgggtgaacctgtcactgccgatctggcgaagatgccgcacctgctggtggcgggtaccaccggttccggtaaatccgttggggtcaacgccatgatcctcagcatgctctataaagcgcagccggaagatgtgaaattcatcatgattgacccgaaaatgctcgagctgtcggtctatgagggaataccgcatctgttaacggaagtcgtgacggacatgaaagacgcggccaatgctttgcgctggagcgtcaacgagatggagcgccggtataaactgatgtctgcgctgggcgtacgtaatctcgcgggttataacgagaagattgctgaagccgcacgtatgggacggcccattccggatccttactggaagcctggcgacagtatggatgcgacgcatccggtactgaaaaaagagccttacatcgtggtgctggtcgacgagtttgccgacctgatgatgaccgtcggcaagaaagtggaagagctgattgcgcgcctggcgcagaaagcgcgcgccgctgggatccacctggtgctggcgacccagcgaccgtcggttgacgttatcaccggcctgattaaagctaacatcccgacgcgtatcgcctttaccgtatcgagtaaaattgactcgcgtactatccttgaccagggcggtgcggaatcactgctgggaatgggcgatatgctctactccgcgcctaactcgacgatccctgtgcgcgtccacggcgcttttgtacgcgacgaggaagttcacgccgtcgttcaggactggaaggcgcgcgggcgtccgcagtatgtcgatggcattacctccgatagcgaaagcgaaggcggcggcggtggctatgagggcggtgaagagctcgatccgctgttcgatcaggccgtcaactttgtgacggaaaaacgcaaagcctccatatctggggtacagcgtcagttccgcattggctataaccgcgccgcgcgtatcattgagcaaatggaagctcaggggatcgtgagcgagcaggggcataacggtaaccgtgaagtgctggcgccgccgccttttgagtaa

SEQ ID NO: 198360 - DNA, 495 bp, Klebsiella oxytoca
atggtagatagcaagaagcgccctggcaaagatctcgaccgcattgatcgtaatatattgaatgaattgcaaaaagacgggcgtatttccaacgtcgagctttctaaacgggtgggactttctccgacgccttgtcttgagcgcgtgcgtcgactggaaagacagggttttattcagggctatacagcgctgctcaatccgcactatctggatgcatcacttctggtatttgttgagattactctgaatcgtggcgcgccggatgtgtttgagcaatttaactccgctgtgcaaaaacttgaagaaattcaagagtgtcatctggtttccggggattttgactacctgttgaaaacccgcgtaccggatatgtcagcgtatcgtaaattactgggcgagaccttgctgcgcctgccgggcgtaaatgacacccgtacctatgtggtaatggaagaagtcaagcagagtaatcgtctggtaatcaagacgcgctaa

SEQ ID NO: 198361 - DNA, 969 bp, Klebsiella oxytoca
atgggcacggccaaacacagtaaactgcttattcttggttctggacctgcgggatacaccgctgcggtctacgcagcgcgcgcaaatctgcagccggtactgattaccggaatggaaaaaggcggtcagctgaccaccaccacggaagtggaaaactggccaggcgatcctaacgatctgaccggaccgctgctgatggagcgcatgcatgaacatgccaccaaatttgaaaccgaaattattttcgatcatatcaacagcgtcgacctgcaaaaccgtccgttccgtctggtcggcgacagcggcgaatacacctgcgatgccctgattattgccaccggcgcttcagcacgctatctgggtcttccctcggaagaagcgtttaagggccgcggcgtgtctgcctgtgcgacctgcgacggtttcttctatcgtaaccagaaggttgccgtcatcggcggcggcaatacggccgtcgaagaggcgctgtacctgtctaacatcgcttccgaagtgcatttgatccaccgtcgtgacggcttccgcgcggaaaaaatccttatcaaacgcctgatggacaaagtggagagcggcaatatcgtgctgcacacccaccgtacgctggaagaagtgaccggcgaccagatgggcgtaagcggcttgcgtctgcgcgatacccagaatgcggataacgttgaatccctggaggttgcggggctgttcgtggctatcggccacagcccgaacacggcaattttcgccggtcagctggagctggaaaacggctacattaaagtccagtccggcatccacggcaacgccacccagaccagcatcccgggcgtcttcgccgccggcgacgtgatggatcatatctatcgtcaggcgattacttctgcgggtaccggctgtatggcagcgctggacgcggagcgctatctggatggtttagccgacgcttgcaaataa

SEQ ID NO: 198362 - DNA, 1767 bp, Klebsiella oxytoca
atgaataaaacccgtcaacaagagttaacccgttggttaaaagatcaaagcattatctcccgtcgctggttgatgatttcccgcgtattgggcgtcgttagcggcctgttgatcgtcgcccaggcctggttcctggcgaggatcctccatcgcatgattatggaaaatatccccgcgacggcgctgctgctgccctttacgctactggtgctggtctttgtgctgcgcgcctgggtggtctggctgcgtgaaagagtgggttttcaggccggtcaacatatccgccttgagatccgccgtcaggttctggatcgcttacagcaggcgggaccggcgtggatacagggcaaacctgcgggtagctgggccacgctgatccttgaacagatcgacgatatgcatgactactatgctcgctatttgccacagatgacgctggccgcctctgtaccgttgctgattgttatcacgattttccccatcaactgggccgcggcgctgattctgctgggtaccgcaccgcttattccgctgtttatggcgctggtgggaatgggcgcggctgatgccaaccggcgcaactttctcgctctggcgcgtttaagcggccattttctcgatcgcctgcgcggtatggaaacgctgcgtatttttcatcgcggcgaagcggagacggacaacatacgcgaggcctcgcaggatttccgccagcgaacaatggaagtgctgcgcctggcctttctctcctccggtgtcctggagtttttcacctcgctgtcgattgcgctggtcgccgtttactttggtttttcctatctgggagagctcaactttggccattacggcgccggggtgacgttgatgtccggtttcctcgccctgattctggctcctgagtttttccagccactgcgcgatttaggcaccttttatcatgcgaaagcgcaggcgattggcgccgccgatagcctgaagacctttatggaagcgccgctggcgcaggcagagcgtggggaaaaggcattaaaagatgatgaaacggtaagccttgaagctcgcgacctgctgattaagtctcccgaagggaaagtgctggccgggccgctgaatttttccctgcgcgccggtgaacgcgtggtgctggttgggcaaagcggctcgggcaaaagctcgctactgaatacgttaacgggttttcttccctatgacggctcgctcaaggtcaatggcatcgagttaaagagtctggatgccgaccgctggcgtcgtctcctgagctgggtcgggcaaaatccgcagctgcccgcggcgacgctgcgcgaaaacgtcctgctctcctgccctgaagccaccgaagcgcagctgcagcttgcgctggataaagcctgggttagcgagttcgtctctcttctgccgcagggtattaatacgcctgttggcgatcaggccggccggctgtcggtcgggcaggctcagcgcgtcgccgtcgcacgagcgctgctggtgccctgtcgtctgctgctgcttgatgagcctgccgccagccttgacgcgcatagcgaacagcgcgtgatgcaggcgctgaccaatgcatcaacgcagcaaaccacgctaatggttacccatcagctggaaggactggcgaactgggatgcgatctgggttatgcaggatggtcgaattgttgagcaaggcagctattcgcagctggcggccgctggcggccccttcgcgaccctgctcgctcatcgtcaggaggagatttaa

SEQ ID NO: 198363 - DNA, 1722 bp, Klebsiella oxytoca
atgcgcgcattatggccttacctggcgctgtacaaacgacacaaatggctgttgctgctcggtatcgtgctggcgatcgtgacgctgctggccagcattggcttattaacgctatccggctggttcctgtcggcatcagccgtcgttggcgtggcgggcatctacagctttaactatatgctgccagccgcgggcgtgcgcggcgcggcgattattcgcaccgcgggccgctactttgagcgtctggtcagccatgatgccaccttccgcgttctgcagcacctgcgggtctttaccttcagtaagctgctgccgctctcccccgccggactggcgcgttttcgtcagggcgagctgcttaaccgggtggttgcagatgtcgataccctggatcatctctatttgcgcgtcatatcaccgctggtaggcgcgctggtggtgatcctggtcgtcaccgtagggttgagcgtgctggacgtcactctggccctgaccctcggtggtattatgctgctcaccctgctggtgatgccgccgctgttctatcgcgcaggtaaacccgcaggtgaaagcataacccggcttcgcgggcaatatcgccagcatctgacctcatggctccagggacaggcggaactcatgctattcaacgccagcgaccgctaccggcagcaaatggaaaaaacggaagcgcgctggctggatgcgcagcgtcgccaggctgagctgaccgcgctctctcaggcgctgatgctgctgattggcggtattgcggttatcgctatgctgtggctcgcctccgcgggcgttggcggcgatactcagccaggggcgctgattgcgctgtttgtcttctgcgcgctggcggcgtttgaagcgctggcgccggtaaccggcgcatttcagcatttggggcaggtgatcgcctccgcaaagcgcatcacgcaaattaccgagcaagagccggaagtgactttcactcatggcgaaggccagacgctggagaacgtctcgttacgcttacatcaggtcaccttcagctatccgcagcagccctcccccgcgctggagaaagtgtcattgcagatcgaggccggagagcatatcgccatcctcggacgaacaggctgcggtaaatcgaccctgctgcagctgctgacccgtgcatgggatccggctgaaggggaaatcttactcaacaatcagccgctggggcagtttaatgaggcgacgctgcgccgggcgatgagcgtcgtgccgcagcgcgtacatctgttcagcgctacgctgcgcgacaacctgctgctggcttctcccggagccagcgatgcccgacttgcccaaacgcttgaacgcgtcggcttagcgaaattactggaagatagcggtctgaacagctggctgggagaaggcggtcgccagctttccggcggcgagctgcgcaggctggctatcgcccgcgccctgcttcacgatgcgccggtcatgctgcttgatgaacctactgaaggcctcgatgcgacgaccgaaagtcaaatccttgatttactggcggaagtgatgcgtgaaaaaaccgtgttaatggtaacccatcgtctgcgcggactggcgcgttttaatcagataatagtcatggacaacgggaagattattgagcaaggtagtcacgcagaactgctggctgaacaggggcgttactaccagtttaagcagcgcctgtag

SEQ ID NO: 198364 - DNA, 705 bp, Klebsiella oxytoca
atgcggctggttcagctctctcatcattccatcgccttcccctccccggaaggcgctttacgcgaacctaatggcctgttagcgctgggcggcgatcttagcccggcgcgtttactgatggcctatcagcgcggtatttttccgtggttttcgcccggcgaccctattttgtggtggtcccccgatccgcgagcggtactgtggccagagaaatttcatctcagccgcagcatgaagcgtttccatcagcgctcgccttatcgcgtcacgctgaatcacgcctttggtcaggttatcgagggctgcgccgaccaccgcgatgagggaacatggataacgccggggatcgttcaggcgtaccaccagctgcatgagctgggacatgctcattctgttgaagtatggcagggaaaggaattagtcggcgggatgtacggcgtcgcgcagggcgcgctgttttgcggagagtcgatgttcagccgtgccgaaaacgcctctaaaaccgcgctgctggtctttagccagatattttcgcaggatggcggaaaattaatcgattgtcaggtgctgaataagcatacggcatcgctgggcgcagtggaaattccccgccgcgattacctcgactatctttccgtgctgcggacgtatcgtctgccggagcgattctgggtaccaagggtgctatttgcaggagaagcataa

SEQ ID NO: 198365 - DNA, 219 bp, Klebsiella oxytoca; identical to SEQ ID NO: 173880

SEQ ID NO: 198366 - DNA, 2283 bp, Klebsiella oxytoca
atgctcaatcaagaactggaactcagtttaaacatggctttcgccagagcgcgcgagcaccgtcatgagttcatgaccgtcgagcacttgttgctggcgctgcttagcaacccttcggcccgcgaagcgcttgaagcgtgttcagtggacctggtcgcgctgcgtcaggagcttgaagccttcatcgaacagaccacacccgtactgcctgcaacggaagaagagcgcgacactcagccgacgctgagcttccagcgcgtgctgcaacgtgctgttttccacgtccagtcttccggccgcagcgaagtgaccggcgccaacgttctggtcgcgatttttagcgaacaggaatctcaggcggcatacctgctgcgtaaacatgaagtcagccgacttgatgtggtgaatttcatctctcacggtacgcgtaaagacgagccgagccagtcttccgataacagcggaagtcagcctggcagcagcgaagagcaagcaggcggggaggatcgtatggaaaacttcaccaccaacctcaaccagcttgcccgcgtaggcggtatcgatccgctgatcggccgcgagaaagagctggaacgtgctattcaggttctgtgccgccgccgcaagaacaacccgctgctggtgggggaatccggcgttggtaaaaccgctattgctgaaggtcttgcctggcgtatcgtgcagggcgacgtgccggaagtgatggctgattgcactatctattcactggatattggctcgctgctggcaggtactaaataccgcggcgactttgaaaaacgctttaaagcgctgcttaagcagctggagcaggacaccaacagtattctgttcatcgatgagatccacaccattatcggtgcgggggcggcttccggcgggcaggtcgatgccgctaacctgattaaaccgctgctttccagcggtaagattcgggtcattggctcgacgacctatcaggagttcagcaacatctttgaaaaagatcgtgccctggcgcggcgtttccagaaaattgatatcaccgaaccttccgtggaagagacggtgcagattattaacggcctgaagccgaagtatgaagcgcaccacgacgttcgttacaccgcgaaagcggtacgtgcggcggtagagctggcggtgaagtacattaacgatcgtcatctgccggataaggcgattgacgtgattgatgaagccggagcgcgtgcgcgcttgatgccggtgagcaaacgtaagaaaacggttaacgtggcggatattgagtccgtggtggcgcggattgcgcgtatacctgagaagagcgtttcccgcagcgatcgcgatacgctgaaaaacctcggcgatcgcctgaaaatgctggtcttcggccaggataaggcgattgaggccttaaccgaagcgatcaagatggcgcgcgccgggcttggccatgagcacaaacccgtcggctctttcctgttcgccgggcctaccggggtcggtaaaaccgaggttaccgtacagctggcgaagtcgctgggcattgagctgctgcgttttgatatgtccgaatatatggaacgtcataccgtcagccgcttaatcggtgcgcctccgggctacgtcggtttcgatcagggcgggctgctgaccgatgcggttattaagcatccgcacgcggtgctgctgctggatgaaattgaaaaagcgcatccggacgtctttaacctgctgctgcaggtgatggataacgggacgctgaccgacaacaacggccgcaaagcggatttccgcaacgtggtgctggtgatgaccaccaacgccggggtgcgtgaaaccgagcgtaaatccattggcctcatccatcaggacaacagtccggatgcgatggatgagatcaaaaagatctttacgccggagttccgtaaccgtctcgacaacattatctggttcgatcatctgtctacgacggttatccatcaggtggtggataaatttatcgtcgagctgcaggttcagctggatcagaaaggcgtctctttggaagtcagccaggaagcccgcgattggctggccgagaaaggctacgaccgggccatgggcgcgcgtccgatggcgcgggtgattcaggacaacctgaaaaaaccgctggccaacgagctgctgtttggctcactggttgacggcggacaggtgaccgttgaacttgataaagagaaaaatgcgctgacctacgacttccagagtgcgcagaagcacaaaccggaagcggcgcattaa

SEQ ID NO: 198367 - DNA, 318 bp, Klebsiella oxytoca; identical to SEQ ID NO: 189620

SEQ ID NO: 198368 - DNA, 231 bp, Klebsiella oxytoca; identical to SEQ ID NO: 189619

SEQ ID NO: 198369 - DNA, 1947 bp, Klebsiella oxytoca
atgatggcgttactggaactgcgtgatattcgccgcagctacccctccggcgatggcaacgttgaggtgctgaaaggcattacgttgaacattgccgccggtgagatggtggcaatcgtcggcgcgtccggctccgggaaatccacgttgatgaatattctcggctgtctggacaaaccgaccggcggtacctaccgggtcgcgggaacggacgtggctcgcctcaacggcgacgagctggcgcgcctgcggcgggaacatttcggttttattttccagcgctatcacctgttatcgcatctcaccgcggcgcagaacgtggaagtccctgcggtttatgccggcgccgagcgcaaagcgcgcctggcccgggcccatgagctgctggttcggctggggctgggcgacagagctgaatatcagccttcgcagctctccggcggccagcagcagcgggtgagtatcgcccgcgcgctgatgaacggcggggaagtgattctggcggatgagccaaccggtgcgctggacagccgctccggcgaagaggtcatggggatacttcaccagctaaaagcgcaggggcatacggtgattatcgtcacccatgatccgcaggtggcggcccaggcggagcgggtgattgagatacacgacggtgaaatcgtgcgtaatccgcccgctctgagtccggcgcaaggcggcgtactgcgccagcgcacggcggccgaaccgtcggcgtggcgtcagttcagcagcggctttcgcgaagcgctgatcatggcctggcgcgcgatggcggcgaataaaatgcgtacgctgctgacgatgctcgggattattatcggcatcgcatctgtggtgtcgattgtggtggtgggcgatgccgcgaagcagatggtgctggccgatatccgcgccatcggcaccaataccattgatgtatatcccggcaaggatttcggcgatgacgatccccgctatcagcaatcgctcaagtacgatgacctgttagctattcagaaacagccgtgggtgagctcggcgaccccggcggtatcaaaaagcctgcgcctgcgggcggataacatcgacgttgccgccagcgccgagggcgtgggggcgcagtactttaacgtctacggcatgacctttagcgaaggcaatacctttaacgagcttcagctaaatagccgcgcgcaggtggtggtgctcgacagcaacgcgcgccgacagctatttccgcacaaagcgcgggtcgtcggcgaagtgattctggtcggcaatatgcccgcgacggtgatcggcgtggcggatgaaaaacagtcaatgttcggcagcagcaaaattctgcgcgtctggttgccctataccacgatggctggccgggtgatggggcaatcgtggctgaattccatcaccgtgcgcgtcaatgaaggctacgacagcgcggttgccgagcagcagctgttgcgtctactggaactgcgtcacggtaagaaagatgttttcacctggaatatggacagcatcttgaaaacggcagaacggaccacacatacattacagctgtttctgacgctggtggcggtgattgcgctggtggtcggcgggattggcgtgatgaatattatgctggtctcagtcaccgaacgcacgcgggagatcggtatccgcatggcggtcggggcgcgggccagcgatgtcttacagcagtttttgatcgaggcggtgctggtttgcctggtcggcggggcgctgggcgtcacgctttcgctgctgattgcctttgtattacagctgtttttacccggctgggagatcggtttttcaccgttggcgctattgaccgcgtttttatgctccacgctgaccggggtgctgtttggctggctaccggcgcgcaatgcggctcgtctggaccccgtcgacgccctggcgcgcgagtag

SEQ ID NO: 198370 - DNA, 1116 bp, Klebsiella oxytoca
atgaaattaaatggaaagcgcaggaaagtttggtggctgctggcgattgtcgtgctggccctcgccgtctggggatggcgaattctgaatgcgccgctgccgcagtatcagacgctggtggtgcgtaaaggcgaccttcagcagagcgtgctggcgaccggtaagctcgatgcgttgaaaaaagtggacgtcggggcgcaggtgagcgggcagctaaaaacgctgcgcgtcgagattggcgacaaagtgaaaaaagaccagctgctgggggttatcgacccggagcaggcggaaaaccagataaaggaagtcgaagcgacgttgatggagctacgggcgcagctgaaccaggcgcgcgcggaacgtaaactgtctgcggcgacgctggctcgtcagcagcagctggcgcagcggcagctggtctctcgccaggacctcgataccgccgcgaccgacttagcggtcaaagaggcgcaaatcggcacgattgaagcccaggtcaaacgcaatcaggcgaccctggatacggccaaaaccaacctcgactacaccaaaattctggcgccgatgtccggagaagtgacgcaaatcaccaccctgcaggggcagacggtgattgctgcccagcaggcgccgaatattttgaccctggccgatctcagcaccatgctggtgaaggcgcaggtctcggaagcggacgtcattcatcttaagccggggcaaaaggcctggtttaccgtactgggcgatccgctgacgcgctatgaaggaacgctgaaggatattctcccgacgcccgaaaaggtcaatgacgctattttctactacgcccgttttgaagtgccgaacccgcagggcatcctgcgcctggagatgaccgcccaggtgcatattcagctctcagaagtgaaaaatgttatcaccatcccgctgagcgcgctgggtgaggccatcggcgataaccgctatcacgtgcgtctgctgcgtaccggtgaagttaaagagcgtgaaatcgttatcggcgcgcgtaacgacaccgatgtggcggtggtgaaagggctggacgagggggatgaagtcattatcggcgaaggtgcggccggagcggcgaaatga

SEQ ID NO: 198371 - DNA, 1659 bp, Klebsiella oxytoca
atgcatcttgagcgcgtagaaatagtcggttttcgcggcattaaccgattatcgttgatgctggaacaaaataacgtgctgattggcgaaaatgcctggggtaaatccagcctgctggatgccctgacgctgctcctgtcgccggagttcgacctctatcattttgttcgggaagatttttggtttccgcctggcgatattcaggggcgcgagcatcatctgcatatcatcctgaccttccgtgaaaatgaacccggtcgccatcgggttcgacgctatcgtcctctcagcagctgctgggttccctgcgacgatggctatcagcgcgttttctatcgcctggaaggggagcttgccgatgacgacagcgtgatgaccctgcgcagctttattgatggtgaagggaaagcgctggagcttgacgatattgatgaactcgcccgtcacctggtacggctgatgccggttctgcggctacgcgacgcccgctttatgcggcggatccacaacggcaccgttccgcactcgccgcagatcgaaattaccgctcgccagcttgatttcctctctcgcgaactggtacatcatccgcaaaatttaaccgatgggcagatccgccaggggctgtcggctatggtgcaattgctggagcactattttgccgagcagagcagcgcgcagtcgcgccatcgtctgatgcgccgtcattcacatgatgaacagcgcagctggcgctacctggatattatcaacaggatgatcgacaagcccggcgggcgcagccatcgggtgattttattggggctgttttcgactctgctgcaggcgaaaggcacggtaagactcgatcgcgatgcgcggccgctcttgttgattgaggacccggaaacccggctgcatcctattatgctgtcggtggcctggcatttgctcaatttactgccgctgcagcgggtgacgacaacgaactccggcgaactgctgtcattaacgcccgtcgagcacgtctgtcggctggtgcgtgaatcttcacgagtgtcggcctggcggctggggcccggcgggatgaatgcggaagacagccggcgcatcgcgtttcatattcgctttaaccgcgcttcatcgctgtttgcccgctgctggctgctggtggagggggagacggaaacctgggttatcaacgagctggcccgccagtgcggccatcactttgatgcggaaggggtgaaggtcattgagtttgcccagtcgggtttgaagccgctgattaaattcgcccggcgaatgggtattgagtggcatgtgctggtggatggcgatgaagccgggaagaaatacgccgccaccgttcgcagtttgttgaatgacgataaaatgctggagcgagaccatctcaccgcgctaccggcgatggatatggagcattttatgtaccgtcagggcttcgacgatgtttatcaccgggtcgcgcagctgccgatgaatatacccatgaatatgcggcgggtgatcaccaaagcgattcaccgttcgtcaaaaccggacctggcgattgaagtggcgatggaggccgggcggcgcggggttgacgccattcctgcgctgttgaaaaaaatgttctctcgcgtactatggctggcgcgcggacgcgcagattag

SEQ ID NO: 198372 - DNA, 696 bp, Klebsiella oxytoca
atgtttagaaaattagcagcagaatgctttggtacattctggctggtatttggtggttgcggtagcgccgttctggctgcggcattccctgagctgggaattggttttgccggcgtcgcgctggctttcggtttaaccgtattaaccatggcgtatgccgtcggtcatatttccggcgggcactttaacccggcggtaactttaggtttatgggccggcggtcgtttcccggccagggacgtgattggttatattatcgcccaggttgtcggcggtattatcgccgccgctattctgtacgttgtcgccagcggtaaagcgggctttgacgccgccgctagcggattcgcatcgaacggctatggcgaacattctcccggcagtttctccatgctctccgctattgtgattgagatcgtcctgacctgcggcttcctgctggtcattcacggcgccacggataaaaacgcaccggccggcttcgctcctgtcgctattggcctggcgctaacgcttatccacctgatcagcattccggtcaccaacacgtcggtaaacccggcgcgcagtaccgcggtagcgatattccagggcggctgggcgctgcagcagctgtggctattctgggtgatgccgattatcggcggcattctcggcggcgtgctctaccgcaccctgctggaaaaacgcagctaa

SEQ ID NO: 198373 - DNA, 900 bp, Klebsiella oxytoca
atgttttcgggacttttaatcattctgctgccgttggttataggctatcttattcctcttcatcggccatcagcccttaaactcatcgcgcgacttctgagctggattgtctacgttattctcttttttatgggcattagcctggccttcctggataatctggccagcaacctcctggcgatccttcattatgcggcggtcagcgtcgttattattctgctatgcaatattgccgccctgatgtggctcgagcaaaaaatgccctggcaaaatcatcatcgtcaggaaaaattaccctcccgtctggcaatggctctggaatcccttcagctatgcggcgtggtatttattggttttatgattggtctgagcggtatatcctttttacaacacgccaccgaggccagcgaatataccctgatcttccttttgttcctcatcggtattcaactgcgcaataatggcatgacgctgcggcagatcgtactgaatcgccgcggaatgattgtcgcggtagtggtcatggtcagttcactgctgggcggtatcatcaacgcctttattctcgacctgccgctaaaaaccgggctggccatggcttccgggtttggctggtattcgctctccgggattctgctgaccgaatcctatggcccggtaattggcagcgcggccttctttaacgatcttgcccgcgagctgctggcgataatgcttatccccggactggtgcgccgcagccgttccaccgcgctgggcctttgcggcgcgacatcaatggactttacgctgccggtactgcaacgctctggcggggtggagattgtgccggcggccatcgttcatggcttcattctcagtctgctggtgcccatattgatggctttcttctccgcttaa

SEQ ID NO: 198374 - DNA, 1653 bp, Klebsiella oxytoca
atgttttgtgtgcaatgtgaacaaaccatccgtaccccggcagggaacggctgctcttacgcgcagggtatgtgcggaaaaacggccgaaacgtccgatctgcaggatctgctgattgcctctctgcaggggctctccgcctgggcgcttaaagcccgtgaatacggcatcatcgaccacgacatcgacagctttgcgccgcgcgcttttttctccacgctgaccaacgttaacttcgattccccgcgcatcgttggctatgcgcgcgaggccatcaccctgcgtgaagcgctgaaagcccagtgcctgaacattgatgcccaagcgacggttaacaacccgatggccgatctgcagctggcgagcgacgatctgggcgacctgcagcgccaggcggcggaattcaccccgaacaaagacaaagcggccatcggcgagaacattctcggcctgcgcctgctgtgcctgtacggcctgaaaggcgctgcggcttatatggagcacgcgcacgttctgggtcagtacgacaacgacatctacgcccagtaccataaaatcatggcgtggctcggtacctggcctgccgatatgaacgcgctgctggagtgctcgatggaaatcggccagatgaacttcaaagtgatgagcattctggacgctggcgagaccactaaatatggtcaccccaccccgactcaggtcaacgtcaaagcgaccgaaggcaaatgcattctgatttccggccatgacctgaaagatctgtacaacctgctggagcaaacagaaggtaccggggttaacgtctacacccacggtgaaatgctgccagcgcacggttacccggaactgcgtaaattcaagcatctgattggtaactacggcagcggctggcaaaaccagcaggtcgagtttgcccgcttccctggcccgattgtgatgacctctaactgcatcatcgacccaaccgtcggcgcctatgacgaccgtatctggacccgcagcatcgtcggctggccaggcgtcaatcatctggaaggcgaagatttcgccccggttatcgcccaggcgcagcagatggcgggcttcccgtacagcgagatcccgcacctgatcaccgttggcttcggtcgtcagaccctgctgggcgcggctgatacgctgatcgacctggtgagccgtgaaaaactgcgccatatcttcctggtgggcggctgcgacggggcgcgcggcgaacgtaactacttcaccgatttcgccaccagcgtaccggacgactgcctgatcctgaccctggcctgcggtaaataccgtttcaacaaactcgaattcggcgatatcgaaggtctaccgcgtctggtcgatgccggtcagtgtaacgacgcttactctgccatcatcctggcggtcaccctggctgagaaactgggttgtggcgtgaacgacctgccgctgtctctggtgctctcctggtttgaacagaaagcgattgttattctgctgaccctgctgtcgctgggcgtgaaaaatatcgtcaccggcccgacggcgccgggcttcttcacgccggacctgctggccgttctcaacgagaaattcggtctgcgttccgtgaccaccgttgaagaagacatgaagcagctgctgagcgcgtaa

SEQ ID NO: 198375 - DNA, 969 bp, Klebsiella oxytoca
atgacaatgccaactcatcagtgcccatggcggatgcaggttcatcacatccatcaggaaacgccggatgtatggacaatttcgttgctgtgccacgactattatccgtaccgtgccgggcagtatgcattggtcagcgtacgtaattcagcggagacgctgcgtgcttacaccatttcatcgacgccgggagtaagcgagtacatcacgctgaccatccgtcggattgacgatggcgcaggctcacagtggctgacccgcgacgtgaagcgcggcgactatatctggctgtccgatgccatgggtgaatttacctgtgaagataaggctgaagataagttcctgatgctggctgctggctgcggcgttacgccaatcatgtcaatgcgtcgctggttggcaaagtaccgcccgcaggccgatgtgcaggtgatctttaacgttcgttcaccgcaagatgttatttttgccgacgaatggcgcgaatatccggtgaccttagtcgctgaaaacaatgccacccacggttttgtttctggccgactgacgaccgatctgctgaaaagcgtaccggatctgacctctcgtaccgtgatgacctgcggcccggcgccgtatatggattgggttgagcaggaggtgaaagcgctgggcgcgacgcgtttctttaaagagcagttctttacgccggtagccgaagccgctaccagcggcctgaagttcaccaaactccagccggcgaaagcgttctatgcgccggtcggcaccacgctgctcgaagcgctggaaagcaataaggtgccaattaccgtcgcctgtcgcgcaggcgtctgcggctgctgcaaaaccaaagtggtttccggagaatataccgtcagcagtaccatgacgttaaccgatgcggaaatcgctgaaggctacgtgctggcctgctcctgccacccgcagggtgatttggtactggcttaa

SEQ ID NO: 198376 - DNA, 426 bp, Klebsiella oxytoca
atgctgttaaatgctgttaataaactgctatcccatgacgatttcggcaaactcttgttacgacttgccgttggcgggctgatgctgtttcacgggttgcataagctatttgatggcgtagggggaatcagcaatatgctggtagcaaaaggattgccggggtttatcgcttatggggttttagtgggcgaggtggtagcgccttgcctgctgattctgggagtgcttacgcgtccggcggcgctggtgctggcgtttacgatggtcgtggcctggctgatggtcgggacgggcaaaatctttgcgctggatgcggtaggtgcgtgggcgattgagagcctggtctatttctttgtgggcgcgctggcgattgccttcctcggggcagggcgctatgccatcggcggcaattcggcctggcggtaa

SEQ ID NO: 198377 - DNA, 1719 bp, Klebsiella oxytoca
atgaaacagaccgtggcggcatacattgccaaaactcttgaacaggctggcgttaaacgtatttggggcgtaaccggggattcgctcaacggcttaagcgacagcctgaaccgtatggggaccatcgactggatgcccacgcgccatgaagaagtggccgccttcgccgccggggcggaagcgcagcttaccggcgaactggcggtctgcgcaggctcctgcgggccgggcaacctgcatctgattaacggccttttcgactgccaccgcaatcacgttccggttctggccatcgccgcccatattccttccagcgaaatcggcagcggctattttcaggaaacgcatccacaggagctattccgggaatgcagtcactactgtgaactggtctcaaccccggaacagatcccgcaggtgctggccatcgccatgcgcaaagcggtgattaaccgcggcgtctcggtagtggtgcttcccggcgacgttgcgctgaaagccgcgccggaaagcgccagcagccactggtaccacgcaccgctgccgcaggtgacgccggcggaagaagagctgaaaaagctggcccagctgctgcgctattcaagcaacatcgccctgatgtgcggcagcggctgcgccggggcgcataaagagctggtagacttcgccgcgaagctcaaagcgcctatcgttcacgcgctgcgcggcaaagagcacgtagaatacgacaacccttatgatgtggggatgaccggactgattggcttctcctccggcttccacaccatgatgaacgccgacaccctggtgctgctcggcacccagttcccctatcgcgctttctacccgacggacgcgaaaatcattcagattgatatcaatcccggcagtattggcgcccacagtaaagtggatatggcgctggtcggcgatattaaatcgaccctcagcgcgctgatgccgcatcttgaggagaaaaccgaccgtaagttcctcgataaagcgctggaacactatcgcgacgcgcgcaaggggcttgatgacctggcgaagcccagcgaaaaaacaattcatccgcagtatctggcgcagcgcatcagccactatgccgacgacgatgccatctttacctgtgacgtgggtacgccgaccgtctgggccgcgcgctatttgcagatgaacggtaagcgccgcctgctcggatcgttcaaccatgggtcaatggctaacgccatgccgcaggccatcggtgcgaaggccaccgcccctgaccgtcaggttgtggcaatgtgcggcgacggcggcttcagcatgctgatgggggattttctctcgctggcgcagatgaagctgccggtgaagatcgttatcttcaataacagcgtcctgggcttcgtggcgatggagatgaaggccgggggctatctgacagacggcactgaacttcacgccaccaactttgcccgcatcgccgaagcgtgcggcatcaagggcatacgtgttgaaagcgcgtcagaggttgatgaagcgctgcaaaccgctttcgctaccgatggcccggtcctggtagatgtggtcgtcgccagtgaagagctggcgatgccgccgcaaattaaactggagcaggccaaaggtttcagcctttatatgctgcgcgcgattatcagcggccgcggcgacgaagttatcgaactggcgaaaactaactggctaaggtaa

SEQ ID NO: 198378 - DNA, 1002 bp, Klebsiella oxytoca
atgatagatttacgcagcgataccgttacccgtccgggccgcgccatgctggaagccatgatggccgccccggtcggggatgacgtatatggcgatgacccgaccgttaacgaactccagcgctttgccgccgacctggcgggcaaagaggccgctatcttcctgcctagcggcacccaggccaacctggtcgccctgctcagccactgccagcgcggcgaagagtatatcgtcggccagggcgcgcataactatctctacgaagccggcggcgcggcggtgcttggcagcatccagccgcagccaatcgatgccgcagcggacggttccctgccgctggataaagtcgcggccaaaatcaaaccggacgatatccatttcgcccctacccggctgctgtcgctggaaaacacccataacggcaaagtgctgccgcgtgaatatctcaaagatgcctgggagtttacgcgccagcgcggcctggggctgcacgttgacggggcgcgtatttttaacgccgtcgtggaatacggctgcgcgctgcgcgagatcgcccgctactgcgactccttcaccatctgcctgtctaaaggactcggcgcgccggtaggctcgctgctggtggggagcgaagagtacattcaccgcgctatccgctggcggaaaatggtcggcggcgggatgcgtcaggccggtattctggcggccgcgggcctgtatgccttgcagaacaacgtcgcgcgcttaaaagaggatcacgacaacgccgcgtggatggcggagcagctgcgcgccgccggcgccgaggtgacgcgtcatgataccaatatgctgtttgttcgcgtcggtgaagcgcgcgccgccgcgctgggcgagtatctgcgcgaacgcggggtgctgatcaacgcctcgcccatcgtgcgcctggtgacgcatattgacgttaaccgccagcagctcaccgaggtggttagccactggcaggcatttttaaaccgttaa

SEQ ID NO: 198379 - DNA, 1434 bp, Klebsiella oxytoca
gtgtcgcagcgaattctggtgcttggcgccagcggttatatcggccagcatctggtgaaaaggctcagcgagcagggcttcaccgtgctggcggcggcacgccacatcgacaggcttaaaaaacagcagctccccggcgtcgagtgctattcgctcgatttaaaccagccggatgcgctacccgccctgctggcgcaggctgataccgtttactatctggtgcacgggatgggcgaaggcggcgactttatccgccacgaacggcgggtcgccctcaacgttcgcgacgcgctgcgcaagtcgccggtgaacgaagtcatctttctcagttccttacaggtggcgaagcaggagcaatccgatcatctgcgcgcccgccagatcaccggcgatctgctgcgcgaatcgggcgttccggtagcggaagttcgcgccggcattatcgtcggcgccggttccgccgccttcgaagtgatgcgcgatatggtctacaacctgccggtgctgacgccgccgcgctgggtgcgctcgcgcaccacgccgattgcgctggaaaatttactctactatctgctgcagctgctaaaccatccggcccgcgagcatcgggtgtttgaagccgccggaccggaaattttgagctatcagcagcagttcatccgctttatggcggtcagcgacaaacgccgcccgctgatccccatccctttcccgacccgctggatttcggtgtggtttctcaacgtcattacctcagtgccgccaaccacggccaaagcgctgatccaggggctaaagcacgatctgatcgccgacgatcgggccctgcgggccttaattcctcaaccgcttatcgcgtttgatgaagcggtgcgccttacgcttaaagaagaggagcagctggtgaactccagcgactggggctacgatgcgcaggccttcgcccgatggcggccagagtacggctactacccgaaacaggcaggctgtaccgttaacacttccgcaagccttgccgcgctgtggaaggtagtcaaccaaattggcggtaaagagggctatttcttcggcaacgtgctgtggaaaacgcgcggggcgatggatctgctggtcggtcaccggctggcaaaaggtcgcccggaaaatgaatatctgcagaccggcgatgcggtggacagctggaaggtgattatcgtcgagccggaaaagcagctgacgctgttattcggcatgaaagcgcccggccttggccgcctgagctttaccctgcgcgataaaggcaatcatcgcgaactggacgtgcgcgcctggtggcacccgcacggtatgccggggcttttctactggctgttgatgatcccggcgcatctgtttatttttcgcggtatggcgcgacgcatcgcccacctggcggagcaaatcaccatcaaatag

SEQ ID NO: 198380 - DNA, 1014 bp, Klebsiella oxytoca
atgaaggtactggttaccggtgcgaccagcggattgggccgcaacgcggtggaatatctgcgtaacaggggcattagcgtcagagcgaccgggcgcaacgaagcgatgggcaagcttctgagcaaaatgggcgcagagttcgtccctgcggacttaaccgagctggtctcttcgcaggccaaagtgatgctcgccggtatcgataccctgtggcactgttccagctttacctcgccgtggggcacccagcaggccttcgatttagctaacgtgcgcgcgacccggcgtctcggcgagtgggcggttgcctggggcgtgcgcaacttcgtgcatatctcttcgccgtcgctctattttgattatcaccatcatcgcgatgttgcggaggatttccgcccgcagcgtttcgccaacgaattcgcccgcagcaaggcggcaagcgaagatgtgatcaatctgctggcgcaggccaacccaaatacccgttttacaatcctgcgcccgcaaagcctgtttggcccgcatgataaagtgtttatcccgcgcctggcgcagatgatgcagcactacggcagcgtcctgttgccgcgcggcggcagcgcgctggtggatatgacctactatgaaaacgcggtacacgcgatgtggctcgccagccagccgcagagtgaccttctgccctcggcccgcgcgtacaacattactaacggcgaaccgcaaaccctgcacagcattgtgcagaaactcatagacgagctggggattaagtgccgcatccgttcggttccctatcccatgctggatatcatcgcccgcagcatggagcgctttggcaataagtcagcgaaagagcccgcatttacccactacggcgtctctaagctgaactttgattttactcttgatatctcccgcgcccagcaggagctaggctatcagccggtcatcacgatggatgaagggatactccgcaccgccgcgtggttgaaggaccacggcaagctgcactattaa

SEQ ID NO: 198381 - DNA, 831 bp, Klebsiella oxytoca
atgagagcttgccgggcaggcgtactgctggcgctgctgctggcgggctgcgccagcgaaaaaggtattatcgatcgcgatggctatcagctggatacgcgccatccggcgcaggcggcttatccgcgcatcaaagtgctggtgattcactacaccgccgatgatttcgacgtttcgctggcgacgctgacggataaccaggtgagctctcactacctgatcccggagaaaccgccgctgcacggaggtaaaccgcggatctggcagctggtgccggaagaggaactggcctggcatgcgggcgtcagcttctggcgcggcagcacgcgcattaacgacacttcgattggcatcgagctggagaaccgcggctggcaaaaaacggcgggggtgaaaagctttacgccgtttaatccggcgcagattgacgccctgatcccgctgacgaaagatattatcgcccgctaccacatcgcgccgcagaacgtggtcgcccatgcggatatcgcgccgcagcgcaaagacgatccggggccgctgttcccgtggcgcaggctggccgagcaggggattggcgcatggcctgatgcccggcgcgtggcgttttatctgcagggccgtccgtcatacgagccggtagacgccgcagcgctgctggacgtcctggcgcgctacggctatcaggtgacgccggaaatgacgccagcgcagcagaagcgggtcattatggctttccagatgcacttccgtcccgcgcgctgggacggggttgccgatgcgcaaaccctggcgatagccgaagcgctgctggaaaagtacgggcgtggttaa

SEQ ID NO: 198382 - DNA, 324 bp, Klebsiella oxytoca
atgcaattttccaccactccgaccctcgaaggtcagcccatcattgaatactgcggcgtcgtcacgggggaagcgattctgggcgccaacgtattccgcgattttttcgccagcatccgcgatatcgtcggcggtcgttccggcgcctatgaaaaggagctgcgtaaggcccgtgaaattgcgtttgaagagctgagcgagcaggcgaaggcgctgggcgccaatgcggtggtcgggattgatattgactacgaaactgtcggtaaagatagcagcatgctgatggtcagcgttagcggcaccgcggtgaagacccgccgatga

SEQ ID NO: 198383 - DNA, 516 bp, Klebsiella oxytoca
atgcgctacaaagttcttgcattagtcctcccctgcgcgctggcgctcagcgcctgtactaccgtcacgcctgcgtacaaagataacggcacccgcagcggcccctgcatcgaaggcggcccggatgacgtagcgcagaagttttatgactaccaggtacagcaccgcaacagcgatttaaccgcgctgcgcccatacctgagcgacggtctggcaaaactgctgaacgacgcgcgtcaggacccgtctaacaacgccctgctgcagtcaaatcttttctccagtagcccaacgccagccgacagcgccgatgtcgccagcgcctccaccatccctaatcgcgacgcgcgcaatattcccctgcgcgtggagctgaaacagggcacccaaagctggaaagacgaagtgctgatgattcaggaaggccagtgctgggccgtggatgacgtgcgctacctcggcaacaacgcccatgcgccggcgggcaccctgcgtcagagtctggaaaaacgctaa

SEQ ID NO: 198384 - DNA, 747 bp, Klebsiella oxytoca
atgtatcagactgcccagatgagcataaaattaaacggcattaattgcttctacggcgcacaccaggcgctgttcgacatcacgctggattgcccgcagggggaaacgctggtgctgctcggcccaagcggtgccggtaaaagctcgctgctgcgcgtcctcaatctgctggagatgccgcgttccggtacgctgcatatcgctggaaatcatttcgactttaccaaagcgccttctgacaaagccattcgcgagctgcgccagaacgtgggtatggtgttccaacagtacaatctgtggccgcatctgaccgtgcagcaaaatctgattgaagctccctgccgcgtgctcggtttgagcaaagatcaggctttagcccgcgctgaaaagctgctcgaacgtctgcgcctgaaaccctatagcgatcgctacccgctgcatctttccggcggccagcagcagcgcgtcgctattgcccgcgccctgatgatggaaccgcaggttctgctgttcgatgaacccacggcggcgctcgatccagaaatcaccgcccagatcgtcagtattatccgcgaactggctgaaaccggtattacgcaggttatcgtcacccacgaagtggaagtggcgcgcaaaacagccagccgcgtggtctatatggaaaatggccatatcgttgaacaaggtgatgccggctgcttcgcgcatccgcagaccgacgcgtttaaaaactatctttcacattaa

SEQ ID NO: 198385 - DNA, 732 bp, Klebsiella oxytoca
atgaaaaaagtactgattgccgctcttcttgcgggcatgagcctctccgctaccgcagcccagaccattcgtttcgccaccgaggcctcctaccctccgtttgaatcgatcgatgccaataacaaaattgtcggctttgatgtcgatctggcgaacgcgctgtgtaaagagattgatgccacctgcacctttaccaaccaggctttcgacagcctgatccccagcctgaagttccgccgtttcgacgcggtcatggccgggatggacatcacccctgagcgtgaaaaacaggtgctgttcaccaccccgtactatgaaaactccgcgctgttcgtcggccagcagggtaaattcaccagcattgacgccctgaaaggcaagaaagtcggcgtgcagaacggcaccactcaccagaaattcatcaccgacaaacacccggaaatcacgaccgtgccttacgacagctaccagaatgcgaagctggacctgcagaacggccgtattgatgccgtattcggcgataccgccgtggtgaccgaatggctgaagagcaatccgaagctggccgcggtgggcgacaaggtgaccgataaagactacttcggcaccggtctcggcattgcgctgcgccagggcaataccgaactgcagcagaaatttaacgctgcgctggaaaaagtgaaaagcgatgggacttaccagtctatctataacaaatggttccagaagtaa

SEQ ID NO: 198386 - DNA, 717 bp, Klebsiella oxytoca
atgaacgaattttttccattagcaagcgccgccgggatgaccgtcggccttgccgtttgcgccctgatcatcggcctggtgctggcgatgctctttgccgtcctcgagtcggtaaagctgcgtccggtcgcctggctcgcaaccggcattgtcacccttttgcgcggactaccggaaattctggtggttctgtttatctattttggttcctcacagctgctgctgaccctttctgatggttttacgatcaatctcggcattgtgcagatcccggtacagatgcagattgaaaacttcgacgtcagtccgttcctctgcggggctatcgcgctttctctgctgtatgccgcttacgcatcgcagaccctgcgcggggcgcttaaagccgttccgcaggggcaatgggaatccggtcaggcgctgggattatcgaaagccgctattttctttcgcttagtgatgccgcaaatgtggcgccacgcgctgccgggactcggcaaccagtggctggtgctgctgaaggataccgcgctggtgagcctgatcagcgtcaacgatctgatgctgcaaactaaaagcatcgccacccgaacccaggagccgtttaactggtatatcatcgcggcggcaatctatctggtcatcaccctgttgagtcagtacattctgaaacgtattgaccagcgtgcgacgcgcttcgaacggagaccaggctga

SEQ ID NO: 198387 - DNA, 669 bp, Klebsiella oxytoca
atgcttgattacttacccgaactgctaaaagggctgcatacaagcctgacgctgaccgcagcctctatcgtcgtggcgctgattctgtcgctgatcttcaccatcattctgacgctaaaaacgccggggctggtgtggatcgtgcgcggctatatcacgctgtttaccggcacgccgctgctggtgcagatcttcctgatttactacggcccgggacagttcccgtcgctgcaggaatatccggtactctggcatctgatttccgaaccctggctctgcgcgctgatcgccctttctctcaacagcgccgcttataccacgcagctgttttatggcgccattcgcgccatcccggatggccagtggcaatcctgcggcgcgctgggaatgagtaagaaagatacgctggcgatcctgctgccgtacgcctttaaacgcgccctctcctcctactccaacgaagtggtgctggtgttcaagagtacgtctctggcctacaccattaccctgatggaagtgatgggccacagccagctgctctatggacgtacctatgatgtgatggtgttcggcgccgccggcattgtctatctggtggtcaatggcctgctgacgctgctgatgcgcctggtggaacataaagcgctggcctttgagcgacgtaattaa

SEQ ID NO: 198388 - DNA, 732 bp, Klebsiella oxytoca
atgaaaaagttagttctggccgcactgcttagcactttcgcctttggcgccgctgccgcagaaaaaatcagctttggcgtttctgcaacttacccaccgtttgaatcgatggacgccaataaccagatcgccggtttcgacatcgatctggcaaacgcgctgtgtaagcagatgcaggctgagtgtacgttcaccaaccatgccttcgacagcctgatcccggcgctcaaattcaagaaatatgatgcggtcatctccggcatggacattaccccggagcgcagcaagcaggtggcgtttaccgacccgtactacgctaactccgcgctggttatctcgaagaaagatgccttccactctttcgccgatctgaaaggcaaacgtatcgggatggaaaacggcaccacgcaccagaaatacctgcaggataaacatccggaagtgaaaaccgtggcttacgatagctaccagaatgcgtttatcgacctgaaaaatggccgtattgatggggtgtttggcgataccgccgtggtcaacgagtggctgaaaaccaacccacagctgggcgcggcaacgccgaaagtcaccgacgcgcagtacttcggtaccggcctcggcattgcggtacgcccggataacaaagcgctgctggaaaaactgaacgccgcgctgaaggcgattaaagccgacggcacctacgagaaaatcagcaagcagtggttcccggagtaa

SEQ ID NO: 198389 - DNA, 780 bp, Klebsiella oxytoca
atggcaaatttcgagggctggtgtgattcgacagagcgtaatatcagcgaccattatttgcagtcaataacggccagggatgccgagtgtatgttcggcgttcaggttatggccgcgctaatacctgaacactatgcgtcacaaagaaatatcgctaacgcatttgaagctctaggtaaaccggggctggcggcatacattgctggaaaattgcctgaaacgaaacagattcgttccggtgatttgggtgagatatttgcaactgaatggataaatgcacgtagcaatggctataaaacgcctataaaaagattgcgctggaaagatcatcgcaatatgtcgatgcgtggtgaggacgtcattggtatttacatagatcagtcttctcaacaactttttttccttaaaaccgaagcgaaaagtcgcgccaaaatgacgggagaggtggtttcggaagcccgcgataacttgaataaagagcaagggctgccatcttcacatgccctaatgttcatagcagatcgcctgaatgaacagggtgaggagcttttggctaaagcgatcttaaatgcaacgcttcggcaaggaattgttccaggatgcgtccggcatcttatctttctattatcgggcaactcttcagaaactatgctgaccacttcaattgaaaagtatacaggtcaaaataatcagtggggtgtttgtctaagaattgctcgccatggtgagtttattgccgcaacttttgaaaaggtgattagcgatgccagcaacagctga

SEQ ID NO: 198390 - DNA, 3525 bp, Klebsiella oxytoca
atgccagcaacagctgatgaaattatcgaagctattaaggaagcttcagctgtaggttttcgcgggcgcctgattgcacgcgggcaagcccggtcggtgatctggcgagacggtgacttgccgccggatgcaccggagtttagcgcactgctcagtcaggaccttcaaggctatgcttatgccctaatcgatctcggccttcgtcttcgagaacttaatggagacgacgcctatgtgcgaattgcttttgaacaggccggaaccgcactcgagtcggctattgctaaaggaaaacgcgacagccgggatacagattttcacttcgtaatggctgctgcaagctatcaccttgcgcatctttcagcacgagcctattcgttactcgcaatggttggtcaggacgataatttttcaccaatagagagggctcttacacaactgatccggcgtgatttgcgtactctgcgcgataatgcgttgggatttcggctcagaggtgatggcagtgacgtgaaaattactgaaatcctccaggctcgcctaaacttgccgcaagacgagaacggtgacagtgagtcagaggaggacatcctttttgatgggcttgatttggcactgactgacgcctatatgtcggccatttctctctaccttctcgctgtagaaaggggagaatcacgtttgctttccaaggctattgaaaaattaagaattagtctaagtatatgtgctcagtttaatatgctaccccagtggtggctaaactttattacaattcatctgttatctgacctttggtcagatacattccatgaaagattgccactggttccagttggtggtgacgctgctgaatggcccgcgcttcgggaactgtttattgcactgcttcaaagacgacctcgagccgaaattgatctctggccatcgcagagagaggccgccgaacgctcagttaatgacaatgacgatttggttgtttcgttgccaaccagcgctggaaaaactcgtattgctgaattgtgtattcttcgctgtctggcgggtggcaagcgtgttgttttcatcaccccgcttcgtgcgctttctgcacaaacagaagccactctctccagaacatttgggccgcttgggaaaacaatatcaatgctgtatggcagcattggcgtaagtggtatggatgaggatgcaattcgccagcgtgacatcgtcgtcgccacgcctgaaaaacttgactttgctctccggaatgacccgtcaattattaatgatgtaggactttttatttttgatgaggggcacatgattggggccgatgaacgagaggttcggtatgaagttcaaattcaacggctgttgcgcagacaggatgccgatacgcgcagaattgtctgcctctcggcaattctacctgatggtgagcaactcgatgattttgccggttggctccgtcgtgacaagcccggaggaccaatcaaaaataattggcgaccgacccgcttgcagtttggcgaggtcatatggtccgctccagcaggtcggcttaatctcagtgtcggttatgaggcggcttgggtatcgcgttttatcgtcagcagacaaccgccaaaggttaaattacctaataaaaagcagcgaacaaaaatgtttccctctgataacaaggagctctgcttagcgacagcctggcgtctaattgaagatggacagaccgtacttatctactgcccacttcgccggagcgtcgaaccgtttgccgagaccattgtcgatctgcatcagcgcggactactgccatctttatttgatgctgccccggacattcttgatacggctatctcgctgggagaagaatggttgggggcacacagcccgatacttgcctgcctacggttgggcgtggctcttcatcatggcgcattgcctacggcttatcgcaaagaaatcgaacgtttgctgcgagatggggtacttaaagtgacgatctcatcaccgacgctagcacaaggtcttaatctttcggcaacagctatcgtcatgcattctcttcatcggaatcgcgagcttatcaaagtgtccgagtttagaaacgtcataggcagagcagggcgcgcatatgtagatgttgaagggctggtgatttatccaatattcgataaagtaaataaacgccagactaactggcataccctcacatctgacacgggggcccgtgagatggagagcggactaatacagcttgtctgtgtgttattgattcgcatgcatacacggcttggtggggatttaaaagcactcactgaatatgtgaccaacaacgccgtagcgtgggaatttccagaaattatgaccgaatctccgcaagaaagagatattgcgcaggccatctgggaaaaacaactttcaacgcttgatactgctattctgagccttcttggtgagaatgatatcccggatgaccagattgaaactgctcttgatgacattcttcagtcttcactttggcaacgaagtttgcagcgttatagggatgagaatgaacggattttgctgaaatcgggactcctgtcccgcagccgctacatctggcagcgctcaacggcagcagggcgccgggggtatttcctgtcgggggtaggacttacaaccgggctacgacttgatgctattgccgctaaggccaaccaactattgattgatgcgaatgcggctataatgggcggtgatgccgaagaggcaattgctgctatcactgcgctcgctgaagaggtctttaccttctatccgtttatacccgatccattgcctggcgactggagaggtattttacgttcctggctattgggtgaacccatgactaacgtcgcgaatacgcaggcgtctgaaacgcttcaattcgtcgagaatgggctggtgtatcgacttccgtgggcaatggaggctattagggtacgtgcaacagctaatggagacctcataggtgatacaaataccacgctagacgattatgagttaggttttgcggttgctgccgttgaaacaggtaccttgagccgttcgtcttcactgcttattcaggcgggttttagctctaggcttgcagccataaaagtggttacagacactactgccgattttcaatccggccaggagcttagaaggtggctgaactctgaagaagtgataagccacacggataatcatgactggcctacacctgaaaccagagtgatgtggctggaattcttgggtagtctcagccccaaaggcagccaggtttggagtcgtcatcgttataacggaatggtggactggagagatactccggcagtgatcggcacaccattgcagctttacactgttgatggtattcatcacgtactggctgatgatggcactcctctgggaagtataaatggcagaattaacacaaacagaagaggtcttcttagagttgaggtggatgatgagaatggtcgtgccatgttcgattatttaggaccggacgactttatttctacctga

SEQ ID NO: 198391 - DNA, 294 bp, Klebsiella oxytoca; identical to SEQ ID NO: 98996

SEQ ID NO: 198392 - DNA, 444 bp, Klebsiella oxytoca
atgtcattcgataacgttttagagcagttctgggtttgcatggtaatagcgctgatgtccagttgtacttcaatcaccgtcacgcaacaggaaatgttccgtcttttgcgagaacgaatggtcaagataaatgccatgacaggttgtctcctcagttgcttttattgtttcagtcactgggtggttttagtgggtatggcaatctacaggcctgttctccttaattcaggattttggttagttgaccttgctgttactgctttctttaccatcggtttaacgtccatattcagaggtattattctactgatgatgagaaatgccattgccaaggcgattgaagaaaaggacatgaaagacaactttgtttatagcatgtacaacaccatacgatatatttttcttcgcaaggatcgccatctctgcgccaagtatgttgagtaa

SEQ ID NO: 198393 - DNA, 894 bp, Klebsiella oxytoca
atgctggataaacttaccggaatgcgggccttcgttgttgtggttcagacaggctcttttgttgcggccgcagaccggctcgatatgtcgcctcagatggtggcccgccatatcgccacacttgagaagcagcttgaaacgcgcctgcttaaccgaacgacgcgcaggcaaagcctgacgccggcaggctcgctgtactacaggcgttgtgaaacaattttacaagccatcaacagtgcagaacgggaagcaagcagttcgagtgcgattcttgcaggtacgctacggctgaatgcgccggtaacattcggccgttatgtcttagtggattttttgagcatatttcttgagcgttatccgcaaatgcgtattgaacttattctttctgatgacgttattaatcctgcttcagaagattttgacctagtgatacgcatcggcgagcttgataagaaactcagacttgcggcaaaaccgttgcctgcgtaccgatttattgcatgcgctgctcctcaatacctggcaaagtacggtcatccagaacaaccttctgatctgaaacatcatgagtgtctggtttttgcaccctggtctgcgggattaagccattactggcctttttccagcagtgagggatatgcggaagtgatggtaaactctcgcctggctattaacgactggggagcaatccttgaggcggcattaagaggtaccggcttgctatttggttatgaaaagggacttgaacgatttattaaaaagggaaaactcgttcctgttctggaagattttaatattccccctcgggaaatgcatttattgtacgacccttctcgggctaacgaaaaccggtataaagtttttattgacgaattgtatgaacatcttagctaa

SEQ ID NO: 198394 - DNA, 330 bp, Klebsiella oxytoca
atgcaaatttatattgtcagaatggaccatccggatggcaccgggtggaatacctttgtgcgcgagcatgtgatttatctgaaagggctgatagaacagggcaaactgttagcgtccggtccgctcaaaaacacgccgctgcgggcgggatttcttattttcagggctgagacgcgcgatgaagtccagtccatgatcagtgcggacccttttgctcgtgaaggtctcatcgctaaacttgaaatccatgaatgggacccgttgtttggtctgcttgacaggtactcaagccacaatacggtcagtgagttgcaggacttaattggctga

SEQ ID NO: 198395 - DNA, 930 bp, Klebsiella oxytoca
atggcagagcataaattacactcaggtgaaaaaatactggtgctgggcgcaggacaactcggggcggctgtactgcagcatctgctccccgcagtctctcagcgagaaggcactgtgtgcgttatcgtttcgcctcgagccagggatgaacaaggtcaactgtgcgcttccacgcatcaaaaatatgtggatgccggagcaaaattaatccctctggacatcgccgacagcacgatggacgccctgaaggatcagtttaaagagtttgataccgttatcaattgtatggggtttgttgcaggcgcaggcacccagataaaaatcacccgcgcagtactggaagccggagttaaccgctactttccatggcagtttggtgttaactacgatgtcgtcggcaaaggcagcggccagccggtctgggacgaacagtatgatgtaagaaccttactgcgagaacaacacaacaccgaatggatcattatctccaccggtatgtttaccagctttctcttcgagcctgcattcgatgtggtgaatttatccgcacggactatcaatgcgctggggggatgggacacacaggttacagtaacttctccggaagatatcggccgacttaccaccgacatttatctccatcagccgcgtattgccaacgaagtggtgtttgttgcaggagaaacgacttcctatggtgaactggcagaaacggtcgagcgagtgacacaacaaacctttgtaaaaaaggttctgaccctgccgaccctgctggaggaattgcaggccagcccggatgaccagatgcttcgctatcgtgcggccttcgcccgaggagacggtatgtggtggccgatgaacgacacctggaacgtgcagaataatattcccacgcagaatatcgcagcctggcttaagtcatccatttaa

SEQ ID NO: 198396 - DNA, 906 bp, Klebsiella oxytoca
atggataaactggcagcaatgcaggtctatgtcagcgtggtggaaactcatggctttgcaagagcggcagaagtgctgggtctgccacgctctacggtttccagggttatccgggagctggaatcctggcttggtatccagcttttgcagcgtactacccgcaaactcagcatcacgacggagggccagcgctactacgacgaatgcaaaaggatcctgacggatattgccgccatggagtcgtcttttcccgcccgatctgagcagccaggaggccgtttcaaagtggggatgccccagtccctcgcccgacattgcattatccccggactcccgtcgtttctccgccagtaccccgggctggaagtgatgctgtgctcaagcgataatgttgaggatatcatcagggaaggatatgactgcgtgatccgtactggcaggatcgaagattcaacaaccctggttgcccgcccactgcctggttttacctgggtcgttctggccgcgccgtcttatattgatgctttcggcaagccgcaaaaactggatgaactggaaaagcatcacgcggttggctatctgaatcaccgcaccggacgcacaactgaatggttttttacccttgatggtggggatcgggcgatccgtatgagagaggtactaatcgttgacgataccgatgcctatattcaggccgggatacagggggttgggttaatccgtgttgccagttatctggctatgccgtacctgcaaagcggggaactggtctcctgtctggagaacagcacctctgaattaccgctatccctggtatacccctatagccggtatataccaccgtcagttcgcgctttttatgactggagcagaacgatgttaagtcacccggataatcgtcagtaa

SEQ ID NO: 198397 - DNA, 558 bp, Klebsiella oxytoca
atgcatgacagcctgcctgcggagaaagcgtaccgtattcttgaagctggtcccgttattctggtatccacgagggggacagatggccgaacgaatctgatgaccgcaggttttcacatgatgatgcagcatgccccaccgctggtcggtgtgattatcggcccctgggattacagctatcaggcgctgtcagatacaggagaatgtgttctggctgtaccgccagccgggatggcaaagaccgttgtggacatcggtaattgctcgggggaaacagacgacaaatttgctcgtttcggcctgacgcccatcgccgcgcaatcgatcagtgcgcctctggtagatgaatgcctggctaacctggagtgcagagtggtggatgaccgccaggtgcggcgctataacctgtgggtgctggaagttcggcggatttggcttgacagcgcatggcaggaactgcgcctgctccaccatcagggcgatggccatttcagtgtcgacggagagatgcttgaccttagtgacaggatggtaaaatggcgcgacctaatgaactga

SEQ ID NO: 198398 - DNA, 858 bp, Klebsiella oxytoca
atgcaacaacaaacctcccctgcaaaagtctggtttatcaccggagctgctcgtggtattggtctttcgctggcacgccagttactggcgcgaggcgataccgtagccgcaacctcccgcaccctgaccagtctgcgtcaggtattcggcgacgataacgcgcggctgctggcgctggaggtggacctggtgaacgaagtcagcgttcaacaagccatcaacagcaccattgccgccttcgggcacattgactgtgtggtcaacaacgcaggctacggccagcagggtaccattgaagcattaaccgacagcgaattacgccgcaatttcgatgttaacgtatttgctcccctgcatgtactgcgccatgccctgccgcatatgcgtacgcggcgcagcggccatatcttcaacgtggcgtcgatcgtaggctttcagggcggttacgcgggctggggaagctatgtcgccagcaaattcgcactggccggtctgaccgaaaccctggcggccgaactggccgaactgaatatcagagccacagtggtctatcctggaccggtgcgcaccgggttcctgtcgaaggagacactggtcgtggcccagcgcacaatcgctgactataccgaagctcaggcctcgctggacctacatctgaacggtctggacggcaaacaggctggcaatcctgataaagtagcttctctgatactgcaggcggccagtgctgacgccccacccgtgcatctttttgcaggtaagattgccaacactcttgctgaacaaaaaatgcatgcagtgagtcaggaccttgatgtctggcgaagtgcgtcagatgccacggattttgaagagtaa

SEQ ID NO: 198399 - DNA, 768 bp, Klebsiella oxytoca
atgtcagagtcaggctctttttccagggctatgccctttgcaggccgtgttgcgattgtcaccggtgccgccagcggtatcggcctggcgaccgtcgaactgttgcaccgccagggcgctcgtatcgtcgcagttggccggggggataatgtcaatgcgctagcacgtgaaggcattgtgcccgttgtcgccgacgtgactcaggaagccagtgcggaactggccgtgcggactgcaacagaacagttcggtcgcctcgacgtcttaatcaacaacgctggcatcatcatcaaccagcccgtggcagaaatgacgctcagggaatggaaccaggtcatggctgttaatgccacgggggcattccttttttcaagggaagccatgcgcccaatgatggcggcaaaatcgggtgcaatcgttaatattggttcttacgcctgttatcagtcttttcccggtatcgccgcctatgcagcctccaagggggcgctggcacaattaacccgcacactcgcgctggaagctatcgctcacggtattcgtgttaatgcagtcggttccggagatgcggtgacaaacatcacgaatacaatccagcccgacgggcaggcatatctggcagagcatggtcgtaaagcgcctgttggtcgtgcagcccaccccgatgaaatcgcagaagtagcagcctttctggcgtcagacagggccagttacattgtcggcgcagtggttatggccgacggtggcatgagtgtcgccattcagtga

SEQ ID NO: 198400 - DNA, 744 bp, Klebsiella oxytoca
atggaagcagttgtatcagaaaaggttatggtggtcattcttaccggtgccagtagtggtataggtgaggccacagcccgtcatctttccagtaaggggcatcatttgtttatcggtgccagacgtatggaaaaactgaccgcactggcgacagagttgcgggcaatggggggtaatgttgatgccatggcaattgacgtcacgcaaccagaagatttgcaacgcatcgcagccagggcgctggagaagcacggacgcattgacgttctcataaataacgctggcgttatgccactctcaccgctggcatcgttgaaggtcgaagagtggaaccgcatgctggatgtcaatgttcggggcgttttacacggaatagccgccgtcctgccgatcatgcaggagcagggttatggtcacatcattaatattgcctccacaggcgcgtatacggtctcgcccacagccgctgtctattgcgccagcaagtttgccgtgcgcgctatttctgacggactgcgacaggagaccaacgcgatccgggtgacgctggtcagcccgggggtggtcgagtcagaacttgccgatcatattacggacgaaacagccctgactgccatgcgcgaattccggcgcatcgccttacctccggagcccgtggcgcaggcaatcgcctatgccatcgaacaacccgcaggcgttgatatcagcgaactcatcgtccgccctgtggccagtcctcattaa

SEQ ID NO: 198401 - DNA, 945 bp, Klebsiella oxytoca
atgccagaaagattgccctccatatctcaacagtccgaaatggcggctatgatttgccagctcgccccacatgaaggtcacacccgtacgttgctggatggcgtgcgtctgatgcgtgctgacggtgcgctggggcgtacccccgtgttgtacgaaccaggcattgttattgtctgtcaggggcacaaaagaggttacctggctgacagggtttaccactacgaccctttgcactacctagtgctgtcagtacctctgccattttcaagcgagacagatgccagcccggcggaaccttttcttgctgtgtccattcggctggatatgacagctgtggcagacctggttatggctgtcgatcaccatgccactgcatcaggttcacccgctggcattgtctccacaccacttgacgacacgctggcagatacgacagttcgtcttctgaaggtattattttcaccacttgaagcccgggttctggggccggggattgtgcgagagctgatttttcgtgttctgctgggtgaacagggcggagccattcgtgctgcgctggcctgtcatggcaactttggacgtatcgcgcgtacgttacagcgtatccacctcgattacgcccggcaactggatgtggcttcacttgcgcacgaagctggcctgagcgttccggcttttcatgcgcatttcaaagccgtggcggcgacttctcccattcagtacatcaagtcagtacgtcttcatcaggcgcgactgatgatgatacgggacaacgttactgcagcaggggcagcagctcgggtcggctacgaaagtgcgtcgcagttcaatcgagagttcaaaagactgtttggtcgcagtcccggagaggagacacgtaaaatgcgcacggcattcgcactgatggaacctgcgcaactcgaagcagcgacatcgacacactaa

SEQ ID NO: 198402 - DNA, 375 bp, Klebsiella oxytoca
atgtcattcgataatgtgtcagaacagttatgggtctgcctcgtcattgcactgatgtccagttgcatatcaatcaccgtcacgcagcaggaaatgtttcgcccgttgcgtgaatggatggtcaaaaaaaattccatgataggctacctgttcagttgtttttattgttttagtcactgggtggtttttgccggtgttgcaatttacaggcccgttcttgttcattccggattctggttaattgaccttgcggttacggcattctttaccatcggtttaacggctatgttcagcgggatcattctgaaagtaatgagaaacgctatcgccaaagcaattgaagaaaaagaaatgaaagacaagctgggtttgtaa

SEQ ID NO: 198403 - DNA, 420 bp, Klebsiella oxytoca
atgagaaaagaccaccggctgtcccgtgcattacacgtgctgatacatatggataaaatccgcgatcccgttacctccgaagatatagcctcgatgatcaatacaaatccggttgtggtcagacgccttttccaggggctcaaacaggcgggtatcattcattctgaaaaagggcatggaggtggctggacactccagaaacctctcggagacatcactctccttcaggttttccacgctattggcagcactgaacttttttcaataggctgggcgactgaacatgacaaatgccagatagaggatgcagttaacaatgaaataagtgatacgcttgaagaggcaagacgtctgattacgaaccgctttgctgaacttacccttgataagcttgtgccggaagtccttaaacataaataa

SEQ ID NO: 198404 - DNA, 3192 bp, Klebsiella oxytoca
atgaaagtatcaaaattctttatcgacaggccggtttttgctggagtactgtctgcgttgttcattctggcagggattatcgccatatttcgtctaccggtatcggaatacccaccggttgtccccccatccgttatcgttcatgcccagtatcctggagccaatgccaccacgattgcacagacggttgcagctccaattgaggaaactgtgaacggcgtagagaatatgctgtatatgcagtcactttcaaatgaggatggcaatctctatctgacagtgaccttcaaactgggcacagatcccgatcaggctcagcaatgggtgcagaaccgggtgtcgcaggctctgccccggttacctgaagatgtccagcgactgggtgtcacaacgaataaaagctcgccgaatatcacacttgccgttcatatgatatcgcctgatggcagatataacgataattacatcagtaattacgccatacgtaacatcaaagaccagctctcgcgtattgagggagttggccaggtatcagtatggggccccggtggttacgcgatgcgaatctggcttaatcctgatgctatggctgctcgcggactgacgacatcagatgtcgcctctgctatccgtgaacaaaacgcccagtcaccagtgggaagcgttggcgcagcccctatggcagaagaaacaccgttacagttgtcagttaatgccagcggtcggcttaaaacggctgaagaatttggcaacattgtgctccatgcccgacaggataccagaacgacattattgaaggatgtcgcccgtattgaactggccgctgaaaattatgccatgcgtacttacctggataaaaagcctgcggtagcgctggccatacaggagtctccgggcgcaaatgctctggaaattgcctcacaagtaagtcgcacaatgaacgatctgaaaaaacagttccctgaaggactggattaccagatagtttataatccaaccaaatcagtcagggcgggtatagaagctgtgcttcatactctttttgaggccatactcctcgtggtactggttgtttttcttttcctccagacctggcgagcatcaatcattcctctgctggctgttcccgtttcgataaccggcacaatggcatttctgtacctttttgggttttcaatcaatgccctgagcctttttggcctcgtcctggctattggcattgtcgttgatgatgccattgttgttgttgaaaatgtagaaagaaacatagaaagaggcatgacgccatatcatgccgcctgcaaggctatgcaggaagtcagtagtcccattattgcgatcgcgctgacgctgagtgccgtatttgttccgctggcttttatgagtggcctgaccggaaggttttatcagcagtttgcagtgacaatagcagtttcaacaattatctccgctattaactcccttacgctctcaccggctctctctgccatgctgctgaagccacgtgattcagacagcgactggcttacgcgcattatgcatcgtagttgtggacggttctttactgttttcaaccgcctgttcaacagtagtgccaggcgatatgaaaaaggtgttggcgcgcttggccagcgcaagattctgattatggttatttatggcattctgctggcaattacgctgttattgggcagatctgtacctggggggtttatccctgctcaggataaagaataccttatcagttttgtgcagcttcctgctggcgcatcattgtccagaacagaccgggtactggaaaaaatgaatgacatagcacgaagtgagccaggagtatcttccacatcttcttatgctggattgtctgtaaacggcaccaccacaagccctggttccggtctgacatttgtcctcctcaagccttttgagcaacggcctggcatcagcgcagatgatgttgccgcctctctgaatgccagatatcagtcacttcctggcgcagattttgcagccgttttcccggcaccacccgttatgggtctgggttccctggggggattcaaattgcagcttgaagacagaggaaatatcggttacgacggaatggccgaagtacttcgacgctttcaggcagaagcagctaaatcacctgtgctgacgccactcttttcaacataccagaataattttccacaaattaatgtcgatattgaccgtaatcgcgccaaacaacttggggtgaacataagtgatattaccgagacattacaatcctatcttggctcatattatataaatgatttcaatataataggtcgtgtatatcaggtaagaatgcaggccgacgcagagttcagggcgaccccggaggatatactgaaactacagacccgaaatgccgatggcaatatggtaccgctgtctgccatagcccatattgagccgacacacggtcctgagctggttacccgttataacggttttacagcagtcgatcttagtggcgctcctgctccaggctattcttcaagtcaggcgatggaagagattgaacgtatagcgatgaaaacacttccacccggcatagagtatgagtggacagacctgacctaccagcaaattcttgcaggcaacagtgccgtctggatttttccactctgtgtattattggtattcctggtactggctgcccagtatgaaagccttacgctccctttggctgtcattatgattgtcccaatgagtatcctttctgcacttaccggggtgtggctgactcatggggacaataatatctttacgcaaattggatttatcgtcctggtcgggctcgcatctaaaaatgccattcttatcgttgaatttgcccgtgaacttgagctttcaggtaagtctgcctttaacgcggtgaaagaggcatgccgtctcaggctgcgtccaattctaatgacctcactggctttcatcatgggtgtaatccccctgatggtatcgcatggagcaggcgctgagatgcgtcaggcaattgggatatcagtattctttggcatgctcggcgtcaccctttttggcttgtttatgacccccgtgttctacctcttagcccgacaaatatcagggaaaccactgcactcggccactttaccggacgcgcctgaggaacggccgataacagaacaggcttcagactaa

SEQ ID NO: 198405 - DNA, 1170 bp, Klebsiella oxytoca
atgactgtatcgttcaaacgtcgcatgttgtgcttaaccggtacactggctgtaatcgggctgttcctttcaaaacagagcgtcatacccggcgcgtatgcacttgagacatcaaactttaaaacggtgcgaactacgtccgcagttgttcatacggtaaacgactgggtcgaattctcgggaaaactggaagccaccgatgaggtcactgtacgttcaaaagttacaggctcgattgtggatgttaagttcagggatggtcagttggtcaggaaaggcgatattttatttattatcgatccagccccttataagactgaactggcccgggctcgtgcagcatacgcgcaggcaaaagcgaagcaggacttggcattgctggatctatcccggggtaaaaaacttatcgggacccatgctatctcacagcgcgattatgacgttctgaacaatgccgctcgggaatcgaaagcagccagggagattgccgaagctgaggtcgagagcgccaggctcagcgaaagctatacccggatcaccgcaccggtaactggccgtatttccagagcagaactgacagtcggtaatctggtcgcagccggtattgacagtccagttcttgcatctattgttgctcttgatcccttgtatgtcgcttttaatgcggatgaacgaacctatcttaattatatcgacaagctttcaaataaagacaaacctgaagtgctggtaggactggccgatgaaaaagattatccacataaagccattcttcattctgtggataatcatctcagtactgaaaccggcactatcaggatgcgcgcacttcttgataatccatcatcaaggttgcttcccggtttacaggcccgggtcagactccaggcaagcagatcttatacagcagtattgattgaccagacactgatccgcaccgaccaggacagacgctatgttctggtagtcggaaacaatgacaaagttgaatatcgccccctcgaactgggaaacaaacagggggaactgattgttgtgaaaaaaggcctcaataagggtgacagagttatttccggtggggcgcagttggtcagccccggtgaaacagtcgttgtcagcaaagatgaatccccttcttcaaaatcccgggaaggaaataagtcatcatga

SEQ ID NO: 198406 - DNA, 501 bp, Klebsiella oxytoca
atgagtaaatttgaagagatttgcgcagcgtacaaggtatctcaggataagtttcatgactaccgtaaccgttctatggattttgctttaaggcttggacataaatacatccagtatcttggtatcactaaagagaacttcaggtgggtacctgtgcaagataactcgactgaagatgaaggctttaccatccagggtgccatgcatctggatgacgatacctattggcatctggggttaaaaataaacgttttcacagcacctaatgctttccctcagcaaaggcttttgatcatcttcaaatttaaacagaaagaaaaagataagtttgaagtactggttgatggctacgatacgaaacacgtcatcgtagtagatggggatgcgtcctacacagtcttcttcaaccacttacagaaaatcatcatgagtctttatgaggatgacctagataacttcctcgcgtcccagcaagagaataggaagattggtttcatttga

SEQ ID NO: 198407 - DNA, 321 bp, Klebsiella oxytoca
atggatgaacaaacgcaacagttgtccgaagcaataaacaaactcacagagttaaataactccctgcaaaaaagagttcttgtccttgaggccaatgctgcaattgacgagatagctcacgcatgttgcatcgccagcgactccccctctgtcaggctccaaagctggaaccagtgggttgccgacagggttgcagagcatgcagtaaaaaccagctctacaggaaagcctgaggagccgctggtcaaacttgttattgaggttcagttgaaacgaattgagcactggagcgaactttttcgtgaagggaatgaagactaa

SEQ ID NO: 198408 - DNA, 258 bp, Klebsiella oxytoca
atggatattggctctttaatcagtactctttcttctatcagtacactgggaaaagcgcttatcgatgagtgcgaccgccagaaacttgcgtccctccagatcgatctctcgaataaaatcattgaggctcagtccggagccgggaacagcggcaggatgtggcgagccaggcggcgcttcccacctatcaagggtatgattggtgtcgatttcatattctgtaagcctttttcaattgatgaaaatgcagtaggctga

SEQ ID NO: 198409 - DNA, 1407 bp, Klebsiella oxytoca
atgaaatctcagtttttgccagtattaccgtggatggggggcaagcgtcgcctggccagacatttccttccgttatttccggcacatacctgctacgtggagccgttctgcggcgcagctgcgctgtacttcatgaaagaacccagcaaggtggaggtcatcaatgatattcacggcgagctgatcaatctctaccgggtgatcaagcatcacctggatgagtttgtccggcagttcagatgggcgctggtcagtcgccagatttatcgatggatgaaggataccccggaagaaacattgaccgacattcaacgggcggctcgcttcttttacctgcaaaaacaggctcttggcggcaaggttgccgatcatacctttggtaccactaccaccagcgcaccacgccttaacctgctgcgcatcgaagaagaactgccgctggctcacctgcgactttccagaaccaccattgagcaccttgactgggctacttgcattaacaccgcagcggcgaccagcttatccccgctggacccgtcaggctcctcaaaaacgaaattttctaacaccagaacggatatttatcagaccgttaccgacagcatcattgcagcgctagaagccggtgttaaaccctggtcctgcccgtggcagcgtgtatctggtatgtctggattgccatctaattacgcaaccggagcagtctatagcggtatgaatatcatgctgttatggtgcagcgcatctaaacaaggtttcagcgattcccgctggatgacttacaaacaggcacaggtagttggtggacaggttcgcacgcgtgaacgtggcaccacagccattttctacaccacgctggagaaggaaaacgacgccggagaaatcgaccatatcccgatgctgaaaactttcaccgtgtttaacgttcagcaaatcgacggcttgcctctgacaaaggtaactgtcagcccggaagcgacatttgccccgttaccgcaggctgaaaatctcttcaggaagagcggcgcaaacatcattgagaaaggacaaaacgtctttttcagcccatcaactgatgaagtctggttaccggagcgccatctgttcgctgatgcggttaacttctacgctaccggcctgcatgagcttgtccactggagtgggggtaaaaaacgcctgaaccgtgaaatgaaagggaagtttggcagtgcggattatgcagaggaagaactggtggcggggttgggaagtgcttttctgatggcggatctgggggtttatggagaggtacaacatgaaagctatattgcttcttggctgaaagcgctgaaaaacgacaagcgctatattttcaaagcggccagcgccgccgctaaagctcattcttatctgataggcaacctctga

SEQ ID NO: 198410 - DNA, 453 bp, Klebsiella oxytoca
atgtaccgtaatttccgtggtaaggaagacttagtaaaagccgtactgaggcagcgctctgactacctgactgagcaattaaagacacgacttaaggacaagcccagcctggacgagaaaatcattgcaatattcgattggcgcggccaatggttttgttcgactaccttcgctggttgcctgttcggtcgagcagtggctgagtttccggaccactcagacatccgtgagattgccctcgattacaagcgcaagctgcacggcctgatacaggacgaaatcgcccaataccatctccccgagactgctgcgaccctcgcgaactacatcatgatgctgcttgacggggcgactgtgaatgcccaggcatttggcgaaagttactttgccggtgaggcgtgtgatgcggcgttaatgctgcttcgattcaatgcaggcaagcagattcgctga

SEQ ID NO: 198411 - DNA, 711 bp, Klebsiella oxytoca
atgctaacgtttgagcacaccatccaggtgctggtaatcggcggctcctctggcatcggttttgccatcgccaaactgttccatcaacagggtgccactgtcaccctggcaggccgcagtgcagcacgcttgcaccaagccgcacaggatatcggctctgacattaccatcgagccacttgatgtcatgcaaccggcagagctggagcgctttttcgcccggccgacgcgctggcaccacatcattgtcacggccgcctcgctgacgtttggaccactgaaaaccgtctccctggaagacgcccggcgcatcttcgacagcaagttctgggcggcttatcacattgcccgtctcgcacagtttgacgaacgcggctctctgacactggtctctgggcggtttgcccagcgcgctggacctcaaaccgccttaatcagcgcggtcaactcaggtatagagggtttagcccgcggactggccagcgagctgtcgccggtacgggtcaacgtactgtccccaggttttgtcgacacgggcatgcatcccgaaccactgatacaaaaaatgagccagcgaagccttttactccccgtcaagcgcatcgcccagcctgaggacattgcttcggctgcgcttttgctcgccatcaacccaatgatcagcgggacagtattggccgtagacggcggagattcggttactttcacgtag

SEQ ID NO: 198412 - DNA, 321 bp, Klebsiella oxytoca
atgtataaacgtatcgtgttgctgaaaagcccagacaccgcagccttgtcggtattgcttcaggaactgcacggtttccccgggcatgttcccggccttgtgtcggtggaagtcattgccgacagtggccaccgttcccttggctttgaccagggtttcattttgacctttaccgatgaatcagtactccccgactggcgagaacaccccttacacgccgcgtttcgcccaaggttacgtgcgttgtctcaaatgctgattttcgattacccgcacaccacgacgttgctgcaggaggaaggtcgccatgctaacgtttga

SEQ ID NO: 198413 - DNA, 873 bp, Klebsiella oxytoca
atgtcgatcattttcgaatgcgaacgggacggccagcactatatcacctgtccttgcactaacgagcagtacgccctctatccagtcaacagcatgtaccaactgcttcgggaaacaccggcgggccaataccccgatggcccactggcatacctgcgtgaacaaggcgtgacaccgcagagggtggcggacctgtccggctttgacatgctgccttgcctgcagcccccagatccaaggcacgggatggtgtgcggctttggcctgacccatcaaagcaaagtcgcggtaccgccggaacacgacgagcggcccgcgttctttatcaagggctttgccgacacccttaaacgcagcggtgacgtgctatgcatgagccgcggcgcgctgtcggcatgtgaagaggctgaagtggtggctctttttctggtgtctgagaacggccagccggattacctcggctacaccttcggcaacgacctgaccgatatcgccctggccaaatctaaacgcaactacctggcgtacgccaagctacagcccagtgcaatttcccacttgctttatcggcaacccctgcccgaactggtgcaaggcagaacgtccatttatcgggcgggaaacttgcactgggaacaggagtttcgcacaggactttcgtgtctttgctatgacgtcgacgacttgttcaacaccttgtggcaacacccggcgctgcgcctaccaggcacgctgatctacctctacctgggagcagatcgcaacagcgccgacgccggcatccagctgtcccacggtgacactgtggtatgcgatttcgagagcggcccccggctgagcaaccttatagaatgggagaacgtccatgtataa

SEQ ID NO: 198414 - DNA, 1722 bp, Klebsiella oxytoca
atgaagtatttttccgatttgcttgtcgacctgctgatcaaccaaggcattgagtatgtttgcttcaacccgggcgcctcattccgcggcattcatgactcgctggtacatcatccggcccccgaagttccgaccatcctgatgtgctgccacgaagaaatctccgtggccatagcacacgggtattacaaggccagcggcaagcatatggcggtgctggtgcacgccaacatcggcttgcagcacgcaagcatggccatcttcaacgcttggtgcgatcgggttccgctgctggtactgggtggcaacggccccattgacgctgcgctgcgccgcccctggatcgactggatccatacatcacagggcattgacaaattgctctccggctataccaaatggacggacatgcccatttcccaggccgccacgttggagtcggtacaacgcgcgcttaaactttgcgccgccgagccccacgcgccctgctacgtcgccatcgacagcgcggttcaggaggagtcgctggctgacgggcttttactaccagccggcccggtgcgcccagaacgcctgccggccctggacgaccagcaactgtccgagctggtcgagcacctgatggcagcgcgacatccggtcatcgccgtagactacgctgcgctgaatgacaaacaggcagacctgttactggaagtggccacaaccgcaagtgctgcagttatctcccgtaacggacgtttcaacgtgcccaacacccatccactggtgttccaggaccatgacgcgcacctcatgggcgagtgcgactttctgttagcactggaagtccaggacctctatggtctgcttgcccattccgggcagacgccccatgccggactatatattgcgaccctggatacccattccctgctgatcagcagttgggtggctgatagccagaaactggtgtgcgctgacttgtcgctgcatgccaacgtagtggcctccatcccccgcatcgcacaggccgtgcacgcagtcgcggagatgcgtaccactacagcacaggcacaagcaagggaacgcatcgaacgcatcgcagcgcataaacagaagcagcgtcaggcgttactggcgcacgttacacaacccgccgacggcctgaccattgctcaggcactgatcgccattcacgaagccatcgggcacctccgctgggtactaaccaataccggtagcgtgacaatcgacaccctggttcgccaactctggccgattgaccgcagtgaagcctacatcggcatgagcggcggtgccgggcttggttatggtctgggtgcagccatcggaggcgcccttgcacacaagggcaccggcaagctgtgcattaacctgcaatcggatggtgacttactctataccccgagcgcgctctggacgctgtcggcctacgacatccctctactggtactggtcatcaacaatcggctgtatctcaactccaagcagcatgccgaacgcattgccgacctgcgccagcggccaacagatctgtccaacctggccaccggcttccatgacaacgaagtagactttgttgcgctggcgaaaacctttgacctctatagccccggcagtgccgacacgccagcggccattcaggaaaaaatcatggactgcctgacttacatggaaacccacggcaagcctgccttgcttgaaattaagacgctctag

SEQ ID NO: 198415 - DNA, 1194 bp, Klebsiella oxytoca
atgacgctgcctgagatctacctcgtccgccaacctatgaccaccccgttcacccatggcgcccaccgacgacaaacctcggaaagtgttgtgctgcgctggacacgtggcgctttcaccggaatcggtgagtgcgctccgcgtcgctatgtgaccgcagaagattgtgaatccgtgctggcagaactgcgcagtattgatttcgcgcgactggcgcaagccctggccagcgttgacccgatcgatcgtggtcgtacgctctatgaacaaggcctgccattctttcccgacaaagctgtgggtaacaatacacgttgcctggtggagatggcagtgctggatactctggcccagcaagctgaactgcctctgtcctcttacctgctgcatatcacagcgccagtcacggcaacacgccgtgttctgcctgcccaggctaacatcacccaagtactcgacctgtctcaatcggtgcaggtcttctttcagcaacgcaaacccttacgttcgctgaagctcaagctggaggccgacctccatgccaatcgccagcgtctggaaagcctcagggcattggcgccaaccctggatctgtatgtcgacccgaacatgagctggtcagccgatcaacttcacaacagcgcccggcagttacgggatttggacgtagcgctgttcgaggaacctttacctcggggaagcctggaggattaccgccaggcccgccgcaaactaggtattgcgatcatgctcgatgaatctgtcatctcaccttccagcctggcgctggcctggaaacaccaggcgctggatgcggtgaacctgcgcatcgccaaatgtggtgggttacttgctacgacaaagatgattgagcaatgccatcactgggggctgccggtttatctgggcgtgcaggtggccgaagtgggcccgctgattgccgcgcaccgcgcattactgacggcctacgacggttttctgggggtggaagccggtcagcacgaccgtttttttgatagcgacctgatggagccaatgcccgctattgatcgacagcacaatgctattcccctgcctgttcccgcgcgaccaggccttggttgccagctgacgccacacatattgcccttccaacaggccaccgaggcagtcaaacacctcaaagagccactcaactcggagcgtgcacaatga

SEQ ID NO: 198416 - DNA, 879 bp, Klebsiella oxytoca
atgaatatgcatatgtttcagcacaacattactcgcgaggtccattatctggctcaggcaaaccgccgtatggctttgcatgcctggcggcccatgcgggtacaaggcgccattctgtatttccatgggctgcaaagccacgcgggttggctatggtcagtaggtaatgcattcgccaacctggggatcgccttctatgcgctggatcgtgaaggttgcggcatcagcagcggcgagaaacacgggttcccggatgttcgtacgcttcacgaggatgcacgggctgccatcgaccatattcgccgcgaagtgcccgacgatgttccgctctgcctgttcgggcattgcctcggcggatcggtacttgccgccattgccagttgctcccacggtcagttgccctacgacaatctcatcatctgctcaacctggctgggcaaaatgcatgaccggctcagcgaacatgagcgcgcgagcattgacctggacgacaggcaaagtctgtgggacgccggactgaaggccgaggatttcacagccaatccgcacctggctgagttcatacgcaatgatgcgctggccaccactcaccttcagaatcgcgaacgcaaaaaactgctggcactggagaaggtgtacctggcggccgatgcccaaccgatagacgcccccagcctgttcatctgcgccgacaaagatccgcttgtggacgtgagttccacagtgcgtcattttcagcgcctgtgcatcaacggctcaaccctgctggtcaaccaggacaagcattacctgttcttcactccggcgatgggcctggtcgtacagttcaccgcagattttgtcaaagccaacggacactatgcttatgacgctgcctga

SEQ ID NO: 198417 - DNA, 1656 bp, Klebsiella oxytoca
atgggaaagttggactcttgggtcggtcattggcagcaccgggcgccgaccttcaaagcggaatgcgcccaggcgctggcgagttatctggagaggctggacaaacccctcagggcacaggaggacgtgctggaggacatcattcatgtatgtaataagtcactgttatggaaagaaaatagctattatgtccgccactgcaacggcagaatcacccgtactaacattccggtcatgacctatgacagcttcagggaacccctgatacgggaaggccagcaaaaaggggggatactcagctgcagcccggtagtgcgctggctcaagaccagcggtactaccgggcagtcaaagcgaatcccctatacgctgcactggatccgtcagtatcgggtccccgccatccaggcgatgtggggattctttgcccatgactaccctgccctcctcgccaacccatgggccacgctggatacccagacggtacgtgacccgagcaccgagtacgttgaaggactgccgtatcaggcgatcagcaaccggaaccccctggtaggcagtggcgactggaatccgccctggtatgaggctccctggttcacaccattcctggatgccagccatgaacagaagatgtatgcacgactgttatggacactgggcgaggatgtaaggttgatcactgccatcaaccccagcactctgctctcactgcaccattgcctgctggaaaaccgtgaacaactgctacgcgacttgcataacggtactcttgccagcggtagcatacgcgctgctaaccctgctgccgctcgccgacttgagcccatactggctgcggacaacgttgtgctgacagatgtgtggcccggactggagcgctacagttgctggacaactgcatcggctaagctctacaaaccccagttgcagcgaattatggggcaggcgaaagtgctgccgttcatgtcctgtggtaccgaaggggtggtgaccctgccggtggatgatgatcaagacagccaaccattggcagtgaaccaggcattcttcgagttcatttccgtgtccgtcgacatagatgctgtggtccgcgaccagctgcagccggaaacccttgcactggaccaactgaaggaaggggacgaataccatctggttatgtggcagggcaatggcatggtccggatgtacaccggtgacatctatcgcgtgcatggttactaccgtggcgtaccgcgtctcagcttcagtcggcgtaacggcgtcatgcactcgttcaccggcgaaaaaattaccgagacccaattgcacgaagcaatacagatgtgcggcatccctaatgccgggctgtatctatgcgccccgatctggaaagagacaccttactatgctgtcgccatcgaggccggaggactgccctgcggtgaatcggagatgctcagccagctgctggatagtcatctccaggcactcaatatcgagtatgaatccaaacgcaccagcaagcggctggggcaaataagagtcatcactatccctggtaacgctatctcccttgccatcgagaaggagaaagccgccaggaaaacacttcagatcaagtacaagccgttccaaccagacctgtccctgctgggcatccagcatttctga

SEQ ID NO: 198418 - DNA, 987 bp, Klebsiella oxytoca
atggtttccaagatcacgctgggcacgcaggggttgcgagtaggccgtataggcctgggctgtatggggatgagtcagtggtatggcgctacggatgacaccgaatcggtgcgcaccctgcatcgggcaatagaactgggggtggacttcttcgattcggccgaggcgtatggaccgttcaccaatgaacggcttttacagcgcgcttttgccgggcggcgtgaggaggtagtgatcgctaccaagttcggtttccgcatcgttgacgaccagatcgttggcgtggatagctccgtcagcaatcttcagaaagtcgtcgatgaatcgttgaagcggctggggacggactacattgatgtgctttaccagcatcggcttgacccctctatacccattgaggaggttgtgggcgcgatggcgcgttttgtcgagcaaggcaaggtgaaatacctgggactttgcgaagtgggagcacacaccattgagcgagcccataccactcatccaatttcagtgatccagggtgaatactcgttgtgggagcgcaatgttgagcaagagatcttgccgcttctggaaaggctgggcattggctatgtggcgttctgtcccttgggtcggggctttctgactggcaaagccgccagcgcaagccactacgatgccaacgatttccgtcagcaggatccacgttttcgcgaagaaaattttgccgccaatacgtttctgaccgagtcgatcatagcgctcgcggcctcctgggggatgacgcccgcgcaactcgcgctggcctggctgctgacgcgcagcccgcatttagcggtgatccccggcaccaagcgggtagagtacctggaagaaaacgttgcctccgatggctgcgagctcaccggcgagcaattgcatgcgatcgaggcgctgcttggtcagtggaccgttgccggcgcgcggtatgagcagcgaatgatgcagttcattgaccgatag

SEQ ID NO: 198419 - DNA, 1176 bp, Klebsiella oxytoca
atgcaatcgtatcgtttactggatgaaactgaacaacgttttcatcagaactttttgcaccgcaacggtaacacccaggtgacttcgttgctgactgtgcctggctgtgtcagtgcccttcgggcgaggaaggcgtttagccagttggtcgctgactatccttttcttcgacagaagatcgttcctgtggggggtgaacaatacgggtttgtgcagattgaagagcaagtccattcttcgccctgcgcggctcaaccgccgctgcagcccgacatattgctcaggcttgaattgaatcgggtgttgggcgaccaagagtgctggcgcgcactggtcgttcctgatcctgagctgaaccagacgcacattgtcctgacgcgtaaccacgcgatctcagacggctacagcactgcccggctggttaacagcctggccggttatctcggcgtgagcccgtcgaactcaggtaagcagaagccgggcgcctttcacctgcgtctgcggtattggcgtgagtatccgatagagacgggaaaagccagccatgccgactttgtgaggttgcaggtcagtgcgcatgtcgcgtaccgcatcgatcacttacgcgcgacatcgggtttcaccgccaacactatctgggggggggttctggtttacagctatctgcggcatgccagtgtaccggcagtggatttgttcactgcttattcgctgcgtgatccaggcagccacggtcagccactgagcaaggcctgcatgattgatgtgcgtgaagctacatttggcgacgagccgctagacctgcccggatgtattaagcgctacgggcgagtggtatcccaggacaaggcactgcttggcacaaaacccggcaagcccgcgaaccaaaggccggtagcagaagatacggtgcgaccgacactggccttcactaacacggggttgctggatcgctttttgactcatcccggggggcgcgttctcgagttctccacgctggtcaaccgctccggcggcaactacgaattcgtcctgcacttgggcaagttcaagggcacgtggcatgccgcgctggccttcagctcactgaaagtcgatcgagcgacggcgcttgccttcaagtcacaagttgagtcggcacttgacgcattgcccactgcgctcaacatccaataa

SEQ ID NO: 198420 - DNA, 1380 bp, Klebsiella oxytoca
atgaatacttccgacaacaagacattgacgcttcttgccacctgtctgggcttcgtggtggtgttgctcgatgtgagcgtagtcaatgtggctctggagagattcaaagccgagttcgccacggacgtgctgcaattgcaatggatagttaacgcttataccttgtttttcgcctcgctcctgctcaccggtggggcattaggcgatcgctttgggcacaaaacggtgtttttgtggggatatgcagtgttcaccctggcctcgctaggctgtggcctggctcatacattacccattctgatcggctttcggtcactgcaaggcattggcgctgcgctgttggtaccgacgtctctcgccctggtgcgtattgcctatgaagtacccgccgaacgcagcaaggctattgctctctgggctggggttgccgggatcgcgctagctgccgggccggttgttggtggactgctgatcggcgtgttcggctggcgcagcatttttttcatcaacctgcccatcggcctgattgggatcgtgctatgcatggtcaatacaccccgtattgcacccaatcataaaggagggttcgatctctgggggcagatcctggcgttgttcaccctagccaacctgacctacacagtcattgaattgggccgtgaggggggcgttgacctgcgagtgattatccactcactgtgttttgtgctcgggctgattggttttatctgggtcgagtcgcgcaccgcgcgtcctatggttcctctctcggtcttcaacaatgcggcgttcagcctggcctcgatcttggggatcatcgtaaattttgtgttttacggactgatattcgtcttcagtatctttttacagcaggtaaatcattactcggtgatcagcaccggtctggcattcctaccgatgacgggtgtcctgttcttcggtaatcagttggcggccaggtggctacccaagctgcgcgagcgacggctgctggcgttgggactggccattgcattgctgggcgtggtttcgctgtggccatttgtagacggtgcaccctacgcagacattgccgtacagatgtttgttatcggcttcggtatatctctgaccgttcccacgctgactgcgacagcggtcaaccacgtcagcagtgacaagtccggggttgcttcggcaatagttaacgcctcgcgccaggtcggcggcctgatcggggtggcaattttcagcttgttgatcagcgtggccgatgcctcccagtttggccgcggattcgcccaggttatcgtcctgtcctcgttgctgttggcggtgggctgggctttgacgctcgtgttgctgcgcaagcaaccattggccgtgaaatcggctacgtga

SEQ ID NO: 198421 - DNA, 831 bp, Klebsiella oxytoca
atgcaaaccgtcatgaaaaatgagtcaaatccaggctatacacctttccaactgaactcccagcaaattctggattttagggctaacggatggatgaagctggaaaacgttatttcggctgaaacagtgcagatgttgctgaatgaggccaggacaaggatgggtgaagtcgcacgcacagtagaccgtaacgacccgggcaaacagattgagaatgcctaccgctggtatgcgcgctgggatgaagtctccagcacttgtccgcagataaaggcgctcagccactctccccggctggccagtattgcctcacaactggtgggggaagatgtgcgtttttattcagaccatgtgttcgccaagaaccccgaatccgaggcgggtggagatacgccctggcaccaggactttccccatcaccctctggatcggcaaggtgccttgaacatctggattgcgttggtggatctcacgcctgagatgggcaccatgcagtttctcagtcgtagtcatcgggcgggcatgctgggaagatatttcaaccgtcgtgatgacgtgaccttgatcgacgagcacccgtgggtactggatgagttcgaaatgtcgccacctatttcactcaaggccggtgatgcaactgtgcacgacatgaacgtcatccacgcagcaccggccaacagttccaacacgccgcgctgggtgtattcgacgctctggctgccggtttctgcacgctatacgggagcgtccaaccaccgtactgacccgctcggattgacactcgacatgcccatggaacatcccaagttccccattattccaacccgctga

SEQ ID NO: 198422 - DNA, 384 bp, Klebsiella oxytoca
atgccacatgtttatcttgaatattccgcaggagtagatgacaacgttaatgccagggaagcgatccagcggcttcatcaggcgctcgtcgaggtatccggattgcgactggacttggtcaagacacgacttattcggtacgacgactacttcattggtgactgcaatgaacctcaggaattcatccacctgaatgtttcgaccgtgtccgggaaggccggagatgatgagcagcggcgggcgatcagcggtacgctgctggatgtgcttgctgatattttcgagcctgttttgcagcaacaaaaggtggatatttctgtacagatcactgaagtaccggcaagtgggtacgtacgcaggcggtcgacgaccttggttccatga

SEQ ID NO: 198423 - DNA, 1908 bp, Klebsiella oxytoca
gtgactcggattctgacagtgactcggattcggacagcgactcggactcggacagcgattctgattctgacagtgactccgactcggacagtgattccgactccgacagcgattcggactctgacagcgattcggattcagacagcgattctgactctgacagcgactctgactctgacagcgattcggactccgacagtgactccgattctgacagcgactccgactcggacagcgattcggactctgacagtgattcggactccgatagtgactccgactcggacagcgattcggattctgacagcgactctgactcggacagcgattcggactccgacagcgattctgactccgactctgacagcgactctgactccgacagtgactcggattctgacagtgactcggattctgatagtgacagcgattccgactctgacagtgactccgattctgacagcgactccgattctgacagcgactccgactctgacagtgattcggactccgacagcgattcggactccgacagcgattccgattctgacagcgactcggactccgacagtgattctgactcggacagcgattctgactcggactccgacagtgactcggattctgacagcgattcggattccgacagcgattcggatagtgacagcgactctgattcggacagcgattcggattccgacagcgattcggactctgacagcgactcggactcggacagtgattcggatagtgacagcgattctgactctgacagcgactccgattccgacagcgactcggattctgacagcgattcggattccgacagcgatgccgattcggacagcgactcggactccgacagtgactcggattctgacagcgattcggactccgacagtgactccgattctgacagcgactcggattcagacagcgattcggactctgacagcgactcggactctgacagcgactctgactccgacagtgactccgattctgacagcgactccgattctgacagcgactccgactctgacagtgactccgactcggacagcgactcggattccgacagtgattccgattccgacagcgatgctgactctgacagcgactccgattcagacagcgattcggactctgacagcgactccgattcagacagtgattcggattcagacagcgactcggattcggacagcgactcggactctgacagcgattccgattccgacagtgattcggattctgacagcgattccgattccgacagcgatgctgactctgacagtgactccgattcagacagcgactctgactcggacagcgactctgactccgacagtgattccgacagcgactcggattcagacagcgactcggattctgacagcgattcggactctgacagcgactctgacagcgattcggattctgacagtgactccgattccgacagcgattctgattctgacagtgactccgattctgacagcgactcggattctgacagcgactcggattctgacagtgactcggattctgacagtgactcggattctgatagtgattccgactctgacagcgactctgactccgacagtgattcggattcggacagcgattcggactcggatagcgattcggactcggatagcgattcggactccgacagcgactcggattccgacagtgattccgactctgacagcgactctgactccgacagcgattcggactctgacagcgattccgactccgatagtgattccgattctgacagcgactccgactcggacagcgattcggactctgacagtgattcggattcagacagcgatgccgactctgatagcgactcggatatcccgcaggccaatgcggataccaataccgcgctga

SEQ ID NO: 198424 - DNA, 141 bp, Klebsiella oxytoca
atgtttttgaacctattgaatgcagacgcaatgcagaaaaattttctgaggaaagatttagaaatgaaattaatgcatatgttcgcgataaatgggctgtatttaatgactctaagtagcagcgatttcgttaattcataa

SEQ ID NO: 198425 - DNA, 975 bp, Klebsiella oxytoca
atgaccaataaccagttaacagaaaacagcgtcacccagcttttaaacagcgtcaaactggcacgcgataacgcagagcgtgacgacaatcgcgtagaccactctttttattatgcgctggcgcgcgccctggaagagctaaaggaacaccgcaaggccgcaatggacagcgagccggtggcttggttctggtctcgtgacgatgagcgggatgtgtcgcgggatgtgtcgttgacaccaccagatgacgatgaagatgcggccgacgcgattgaatgcggctggacggctacgccgctctatcgccacgcgcagccagcgcctgaactggagccggttggttatctattcgtatcagaccagggggctatcgcttactctccgacaaattggggaataccaggcttcaggttaatagggcaaatttatggcgacatgaacgttgaagcgcagccatcgccggtagtgccggagaaagcaaccgttggcgaaatgccattccttggcaccagtgaaggagtatatgttcgagggtggaacgactgccgcgccgccatgctccaggctggtaccctcaccaatgaggataccaggcaggctggcaactctccggtaattccggaggggtacgtgatggtgccgaaggagccgacaccagaaatactggcggttataaccgaagccataaaatctatgcgtggctcagcggcaacgtatgcaagggttctcgcagccgccccgcaaccacaaaacgcaccacaaaatattcctgaaattattccgggatggattcaggtaagcgagcgggtgcctgaagaccgcatatcggtaatcctatgggatgctgaaattggagaagtaacaagcggtcactacagccataaaacacagactttttatcattgcggcgatgctatcgaaaacgagataacccactggatgccgcctccatgcgccccgcaggaggtgaagtga

SEQ ID NO: 198426 - DNA, 582 bp, Klebsiella oxytoca
atgacaactgatatcaccgaactgacaccagaagccgcccgcgagtcggggagtattttgattattgtcgcagcccggatggcgcgtcgtgagttttttacaccactgcatgctctctgtgaatccggtcagcgtgtcgttagtactagagcgttgtgtgatgctgtagagcgcgcagaagagcatatggtcagccaagtttcgaaaattgttgatggtcacgacaggttgaccaaaaaactgaaagaggctgaatcccggaatgctgagctggtagaggcgctggagaaggcgcaggcaggcgagaagcaatggcgagaagttgtcgatgcgttctgcactgatgacgccgactggcacaatctgactaactcaaacaatgagctgattgctctcttgtctcaggccttgtgcgagcaagcagaccgcatcgccgagttggagtcaaagctggctcatccggtgcaactgccgaaaacaaacggctactggactgagcaagaaaaggcttatgaagaagctattacgctcgcgaagcggcaaattcgcgttgccggatttcgctgtgagggggatgagtaa

SEQ ID NO: 198427 - DNA, 210 bp, Klebsiella oxytoca
atgagcaaacctaccgacgaagaaatcatccagttgctggcagattacggaagctgcatgacgtatgtcttaaccaatgttctccgccgtaaatactggcctctcgataccgcgtatgtgttgcgtcgcctgaaaaagctggaatctgccagaagagttaagcgtgttaagagtaattacaaaactcaaatttgctggggtgccgcatga

SEQ ID NO: 198428 - DNA, 204 bp, Klebsiella oxytoca
atgctgaagcccaatcacgtctatatcgaggtatctcataaccagagcggcggtctgtctctctgcgtcagcaatgacagcggcggctaccgcatatcaggctctaaggttggcggatgcgaaaccctggagtgctttgaggtcgacgccagcgagcttatcgagcaaattcgagagcatgcgaacacagaggtggccaaatga

SEQ ID NO: 198429 - DNA, 135 bp, Klebsiella oxytoca
atgaactttgaacctgaaaattacagccggcgcgcccttctctggtttgctgcactggtcagtgttgccgggtgggttgcagtagtcgctgtaatctggggcgtatgcatcatgatcgaatgggtgacggcatga

SEQ ID NO: 198430 - DNA, 198 bp, Klebsiella oxytoca
atgttaaaaacacaagttgttgagtactacggtggcatttctaaaacggcaattgctttaggggtaacccatagtgctgtttgccaatggggaaatgtaattccacaaaaacaggcatttgtaatcgagagaatcacaaaaggaaaactcaaatacgatgcgaatctttaccaaaagtctatagacccagcagcttag

SEQ ID NO: 198431 - DNA, 597 bp, Klebsiella oxytoca
atgaccagttcagaacttttggaattgatcaaaaaagatgtaagtgatgtaaagcaacaaggttcagaaaccatcccggtggataatttacttcactatctttcagaaatagatgtgacagagcagccagaggctaatgctttaactctcgaagggattaagcatcaaaactccacccaattggaaatattgaaaattgaaaatagctttcaaatagagtctttcaaagctgctatcagtattggtgcgaatgcttgcagaacatttctaataatgaatggaggtgcagcaatcgctctgttggcttttttaggaaatatttggaacaagaattcatcagttgaagctgcgtctgctatcgcatcagctctctatcttttctgtggaggagtcgttctggccggactttgttcgggcttatcctatttctcacagtgctgcttcgcatcatcatatcttggaactaaaaaattttatctttggctcgggcatacaataaatgctttagcttgtatatgcggcgccggttccatcttcatatttgcttatggttcatattgtgcttatcaatcaatgattgctcagttagtaaaataa

SEQ ID NO: 198432 - DNA, 183 bp, Klebsiella oxytoca
atgtgggtccttatcatctggatgttcgggggctatagcccgtctgacgcgaagccgacaatcaccgcgcaggaatttacgacagaatctgcgtgtcgtactgcattcgccaaaatcaaagaacttaacgatggtgaactggcgctgcgtggcgtctgcacgccaaaaggagccaaccaatga

SEQ ID NO: 198433 - DNA, 216 bp, Klebsiella oxytoca
atggctgagtacaaagcagaggaccttatcccaggcatgatgttgcgcggctctcgtggggtagtaacgctgggccgtcgcttgccaaaccgggtgaataagaacggtatcgagatggttcgctttgagggggttgggaagattaagacgtattcgtcggcggtcgggtctcctcagtacatcatcgcggttccggctaagaaggaggctgagtga

SEQ ID NO: 198434 - DNA, 252 bp, Klebsiella oxytoca
atgacaaatcctaatggactgcccacgattcctgaaggcgcaacggtcatcgttgatccagacattgagccaatccatggaaagattgtagttgcacgaatagatgggaccaacgaggccacggtcaaaaaactggttgtagacggtccgcaaaaatttcttgtcccgctaaatccccgttatcctaacatcgccatcaatggtaactgcgtcattattggtgtggttaaaggcgttcaatatgagctctga

SEQ ID NO: 198435 - DNA, 210 bp, Klebsiella oxytoca
atgaccaccgatgatgttgaaaagtactttggaaacgctgagaaggtagccgagttctttggcatatccagcgaagctgtttatcagtggcggaacagacccggtcgcttgatcccaaaagggagggctgctgaagccgcgtaccgcaccgatgggaaacttgttttccaaccggagctgtatagcaagcttaaagaacaaaaagtttga

SEQ ID NO: 198436 - DNA, 192 bp, Klebsiella oxytoca
atgacgctgttgatcgcgagttgcgcgaaaagtttacccgccccggtggtggttgatgcggcctgcaactgggtgcgaatcatttacctgaccgaccacgatattgacgtgctggataagcagacgaagcgcgacattctggcgcataacaaatcagtgctggcgaactgcccgcaaggtacaagcaaatga

SEQ ID NO: 198437 - DNA, 564 bp, Klebsiella oxytoca
atgattgaatcgaaacatggttcagggcttccgcgcgcccaaatgaaagatattccaggttatccgggatatctggcaagtgaagatggcctcatttactcgctccgctcaggtagcgttcggcagttgtcgatgcggctacataacgggtattggcacgtgaatgtaaataccggagcaggcaatgatacgaaagtgaagaagcaagtacaccagcttgtgttgcttgccttcgccgggccaaagccatctgactcccatatcacccgccatttggatggaaacccgctgaacaactgcaaaacaaacctcgattggggaacgccaaaggagaacacttctgacagcatgcagcacggaacggccgcttttctgcggcgcggacagcgagcggtagcaacaaaattgaagcctgaaatcatcctgagcattgagcgagaggcgaaatccggtaagacgctggtggctattgcaaagcgctacggtattacgcacacgcatgttcgccgcatcagggatcatcaatgtcatccagatatttggtcaaagggggagggtgggtaa

SEQ ID NO: 198438 - DNA, 894 bp, Klebsiella oxytoca
atggatctgcgtgatagttatgcccgacaggtcaggctattaatgactgccctgccgcatgttgcgaaggagtcctgtttcgccctgaaaggcggcacggcaatcaacttatttgtacaagatttccctcgcctgtcggtggatatcgatctggcggtcatcaatgacgccttgatgcgtattacggaatcgctgaacggcagaccggggatcacggctatccgacaggagaataaagcggatgaaaagcgcatcacagttaacaccgctgattcgaagataaagattgaagttagtccggtctggcgcgggctgctgttgcctccggcagaaatgccggtatgtgaacaggtggaaatggaatatggattcaccaccatgaatgtcgtcttgctggcggatctttacggcggtaaaatctgcgccgcgcttgaccgtcagcatccgcgcgatctgtttgacgtgctgaatatgctggagaaaccgggcctgacacgcgagatctttgacggttttctttgctatctggcagggcatccccgccccattgccgagctgctggcaccaaactgggatacagcgcggatcgcgactctgtacgcacaggaattttcaggaatgacgcagcgggaaacatcgctggagtcccttttatcagtaacgactttgctgccacaagcgctgaaatcgcatcttacggacagagatcgccagttcttgctcagctataagcaaaatagccccgactggtcgctgttttgctatcctgaaattcaacacctaccggcaattctctggaagctgcgtaacctggcgctgctgaaggataagaatccagccaaatatgtagcggcggtgagcaagctgaaaggagttctggaaaagtacctttag

SEQ ID NO: 198439 - DNA, 426 bp, Klebsiella oxytoca
atgtttgtcacgctgtatacctctggcctcaccgttgatataccgtcattcacgacacaacttaaaatcggcgaccgacagttagtgggcagagtaccggaactggccgcgtatgagatcgcctgcggcgttccttccttgatctcgttcgaacatgccgatgctctgtttcaggggatgaatcttcttagcccgcgtaaattacaggcgctgctcttcgccagtcattcggttaaaaccaaccgcgtgatgctctaccttgcccgacgcaatgagcatccttactttcagtacctcgatcaaagcggtatagaaacaggctcgggaaaacggcaaatcgttcccggcggttggctggagccggattatcaaatcaccgttccccgcgcatttaaaccggaaggagtcgaagatggatctgcgtga

SEQ ID NO: 198440 - DNA, 195 bp, Klebsiella oxytoca
ttgcgtttcttaatcgcagcacggatcacgctgtccgacgagatcgaacgcaagattattcgcctgttcgcactggggatgagttaccaggatatcagccgggaaattgaagagctctatgctttcagcgtgtccaccgccaccatcagtacagtaaccgataaagtcatccctgaactaaaacagtggcaatag

SEQ ID NO: 198441 - DNA, 1434 bp, Klebsiella oxytoca
atggcgactatcgtacaaagcaatatgaagctcaaaggtaatgtcaagttaccttcagttaatgcccctctaccagacggggctaatttatttgcagatttctccactggtcgctacgtcataaaacacgcaagcggtaatgtcattcgctcagcatccctgacagatatactctcttttacaagagcctctgttgctacgcgagttggggcaactggtttaattgaatatttacagtcaggtgagcctgcaattgattatgaccctgtaactcttgattgtcttggattgcgtactgaactctccagtataaaccgggttgcctggtcacaggatttcactaaaaccgcaagctggaccccagcaaatatttctgtcacggctaacgatgcaatctctccagacggaaatactacggcgacgaaacttattgagtccactgattcggtcgcctctgtaagaacgctgctttgcatcaccaccagtgacgcagtatccgcttcgccttacacgttcagtctttttgcaaaagccaacaccgctggggtgattcagttggcagcgcagggagctgtcgctgccactgcatttgcaaacttcgatctaagaaacgggaaaatagggaaagtatcccctggttctgcgaccgttggaatgtttcaggtaacaatggaggcttaccgtaacggatggtaccgcattgctataaccatcactccgaacgcgtccgcatccccacaattcactgttgcactggttaacgatgatagcagtgctactgctctgccatcctatctgccagcaaccccgaaatcagtctggatatggggggctcagccagaaaggagggatggatattcatcatatattcctacagcaggagctggggtaacgcgtgcaagtgatgtctgtacaacaccttcaacgacagcatttatcacagccgcagcaggaactattctggcagcagtagttaacccacatagtcttcagactttaagtggtaaatataattcactggcttgcatgactgttttggataacagcgtatctggccctcacatcagattcgcttatcgacctcctgcatcagggactgcaatgggcacgccttctggggcggctttaggcgttgttcctgactcttcaggtactgcccaaaaccttgagataccaagcatgacggcagtaagcgatagcgagcaatcatgtatcttcgcatttgatggaactgcgctaactacaaaactttttgatggctataactggtataagcgcagcgtgaccggagttcctccggcccttaatcgtctgacgatcggaagggcttaccttgataccaacaattacttcaacggtcacatcaagaaaatcatctactggccaacaactttaagtgatactgatatggagcaaattctttcttatcagtaa

SEQ ID NO: 198442 - DNA, 501 bp, Klebsiella oxytoca
ttgcatatccggcgtcttcggtccgctggcaatggtctgctcaatcgccgccagaataccgtcgtgggcggcctggtagcgcgcgtccccgttgccgaggaagtcgagcatcatcgcgccggcccagatggtggcaatcgggttggcgatatttttgccgtagatatccggcgccgaaccgtgtaccgcttcaaacagcgacggaaaggtgcgatccggattgaggtttgccgacggggcaatgccgatggtgccggtacaggccgggccgagatcggagaggatatcgccgaacaaattggagccgaccaccacgtcaaaacgttccggctgcagcacgaagcgggcgcacagaatatcaatgtgctgcttatcccatttcacctccgggtagtgctgcgccatcgcttcgacgcgctggtcccagaagggcatgctgatggccagaccgttggatttggtcgccgaggtcagggttttgcgcgggcggctctgcgctaa

SEQ ID NO: 198443 - DNA, 177 bp, Klebsiella oxytoca
atggccgccgagggcggaatattccccttcggtgttttcacgcaccacgtagaaatcgatatcgccgggctgtttacccgccagcgggcaggggacgccggggaacaggcgcaccggacgcaggttgacgtactggtcgaactcgcggcggaacttcagcagcgagccccacagtga

SEQ ID NO: 198444 - DNA, 243 bp, Klebsiella oxytoca; identical to SEQ ID NO: 95389

SEQ ID NO: 198445 - DNA, 834 bp, Klebsiella oxytoca
atgaagctttttgattatctgaagatggagtttcctggccttacgcctgaagataccaaagtccaccttgcacaaattaatgattataaagaggatccgttggttaaattccgtgcagagacttttgatgaatggcagtgctggcagaagcggctggagtttaaccgaagatatgtcgtttcactgattaggatcccggggacggaaacctggctatttgcgggagcatttcagcagaaaggcaatgcgggaaagaaagcctatccaggtcgtgaggaactgcattatcaatacctccttgagaaacttcctgagactgaagaatacgcaggaaggatgtatatcagctttaaaaatacagcccgcaacttcattcgcctcggtgaaagtatacagagcgaactggttatcagctcaatcaccccggtacgtctgaccttcggcgagtttcccggctaccgcaacgttgtgctggaccgaaacagcatcggcgcgatcctcagacttaatctgaaatcctggcgcaccgcgttgtccgttgttaaaggcatctatgtattaaccgatcgggacgggggaaaactttacgttgggaaagccgatggaatcgatgggatatggggccgatggaaatattactttggttccggacatggcggcaatgtagggcttaaggaagctttcgggacaggcgatgaaaatcgactgcagaatattactttctcgatccttgaagtcatggatcttaatgccgaaaaaggtgaaattgaccgtcgcgaaactcactggaaacaaatactgctctcacgggagtttggctataaccgaaactaa

SEQ ID NO: 198446 - DNA, 729 bp, Klebsiella oxytoca; identical to SEQ ID NO: 102217

SEQ ID NO: 198447 - DNA, 486 bp, Klebsiella oxytoca
atgcatatccatgccgaaccccgtagcgccggtgttgcggatggtaattcggtcaaatactgcgttacggtaatactgcaggaagattcccttaatatccgggatatagccattgaccggatggagttgctggttttctccatcaatagtgaagtcaaagaactgaatgttctcgagataaatttccggcgatgcttcggttggcttcccccgatactggaatgcgggcaaatagcccatcggataaaataccgttgcctcctgaccagcacccaacagggagacccccgagcggggaacgacaggttgataaagttcaaaatgccctggcggattgtagagaaaaccgccgccctctccagacaaccagtcaaatccgcgttggattctgcgggtagaactctcccttccctcgccatgccgtccacactcccgcacgtcaagaaccatgcggcgcttacgcatctcatcaacacgtttctttag

SEQ ID NO: 198448 - DNA, 1026 bp, Klebsiella oxytoca
ttgaataattcagccatgccactgcgtctgacggtggtctttgccgcgtctggcgatcgtaacagcattcctaccgacgccaccaccgaaacgctgaatggggggaaggcatcattcgatgttggcttccccccaatcaccagaattgctctctcatcaggcgggaagccacctcaaggtcaggattttaacggtatattctatgagtcttttttgaggcaccagtggaatcaggctgggggtggatatccatttgattcggcttatgcaaccgctattggcggttacccaaaaggggccgttgttccatttagcactctcgacgggctttggctgaacaccctcaatagcaacaatgggacacctgaaaatacaggtggtggtgcatcagggtgggtccctttgtcaagttatggtatttcgtcaataactgcatccggatctgcaaatatcacgctgactgccttgcaggcatcacgtccagaaatagttatcagcggagtgctaactgggaatatctatttgtttttccctccgtggattaagaaatggaaggtcaaaaataatacctctggtggatttaatgtcgtttgcaaaacaattggcgggagtaatacggcaacattatatcctgcagggcggggacatattcactgcgatggagcgaatgtttatttcgtagatgctaccagtggccccgggcagtccggagggttactttttggaaatggtgctcgtcttgcctggggttatacggatgccaattgcaatgttgctggggccgatggtgaatacgaaacggataacatttttgttaccccaacgtttacaaccagcgacggggtatttggatttaataccatctgttcggtaaaagttatgccggttgatatttctggggtcggacagaatgaacgctcatggcttatggactcgacgttttcaggaagtggtttttcatttcgttctgcatgcaagacgcaaaacgcaaccattagaactcgctgggaagtaataggattctga

SEQ ID NO: 198449 - DNA, 288 bp, Klebsiella oxytoca
atgctcatgaccctgtcaatcgacacctcacgcatcgacgataagattaccgttctgaccagtgagcttaaatcacggtttcccgatggaatttctgagcgagtcgatagcgaactgtctcgcctgactaacgacatcatccttactgatctctcttccacagtcggcgcagatggaacccgcgaggtcgtccagcgtgtggacttcggcgggtgctttgatgcgttcacttccgcactccgggcaggtgattttgatgtccatggcgatcccctcaaagttgtttaa

SEQ ID NO: 198450 - DNA, 657 bp, Klebsiella oxytoca
atgataaaaaagtcttttcttctcatgctttcgttttctttggcgggatgtgcaatgtcgccagcggaatatattaattatcaaaaatcaaataacttcgataaggcaaaattttccacgaactctggaggcctgcagtccgtttctgatttgcgagaaatttatagaaatgtgactggtaaaaatcttccggatcaagatacaagcgattgtaggaaagataataaatgctatttcaataggtacaatgacctatttcacgacttgatgtatcagcggcagatagagcagcagaaaaaagaaaatgaagaattagccaagcaaaaagaagctgagtgtcaggctagtaaagagtgcatggccaagcgtgagatcgattccgcatcttacactttaaataatgtctactattctctaatggcccgatacccataccagcaggcagactctgacgctggggtaaggcatatgtgccgcgttgctggggaggcccagagatccggtgttactctggaattgatgaaggagcatatcagcttaacagaaggaattggccctgaaatgagataccaaatagtccaggttgctgaggcctgctggaaaatgagcaagtatggcgttccggacggaaccacgcagatcaaatcaatgtattaa

SEQ ID NO: 198451 - DNA, 489 bp, Klebsiella oxytoca
atgaccgccgaagcgatattagcgctagtgaaaaagctctggctgccggcgctggtcgtcatcctgattgcagcactggcgatatctgccagtcactacaaaggcaatgccgagcaggaaaaaaaacgagccgataacgccgagcacaatttaaatttggctaacgacgctatcaccgatatgcaagtccgccagcgcgatgtcgctgcgctggatgccaaatacacgaaggaattagccgatgcaaaagctgaaaatgatgctctgcagcgcaagcttgataatggtggtcgggtgctcgtcaaaggcaagtgtccagtgtcagccgcaacccaaaccaccggcaccgccagcatgggcgatgatgccaccgtcgaactctctgcagttgctggacgaaacgttctcggtatccggtccggaatcctcagcgaccaaacagccctgagagctctgcaggaatacatcaccacgcagtgcctgaagtaa

SEQ ID NO: 198452 - DNA, 1680 bp, Klebsiella oxytoca
atgagtaatgccatcaccgagatcgacaacaccgatctcgtgtttatcttcgggtataacccggcagattcacaccctattgtggcgaatcatgtgattaacgccaaacgtaatggggcgaaaatcatcgtctgcgatccgcgtaaaatcgaaaccgcgcgcatcgccgatatgcacattgcgctgaagaacggctcgaatatcgcgctgctcaacgctatcgggcacgtgatcatcgaagaggatctctacgataaatccttcgtcgccagccgttccgaaggcttcgaagagtatcgcaaaatcgtcgaaggctatacgccggagtcggtggaagagattaccggcgtgagtgcccaggagatccgcgcctgcgcccgcatgtacgccagcgcgaaatccgccgccatcctgtggggcatgggcgtcacccagttctaccagggcgtggagaccgtacgttcgctgaccagcctggcgatcctcaccggcaacctcggcaagccgagcgtcggcgtcaacccggtgcgcggccagaacaacgttcagggcgcctgcgacatgggcgcgctgccggatacctatccgggctatcagtacgttaaattcccggaaaaccgcgagaagttcgccagagcctggggcgtcgacagcctgccggcgcacaccggctaccgcatcagcgagctgccgcaccgcgcggcgcatggcgaagtgcgggcggcgtacatcatgggggaagatccgctccagaccgacgccgagctgtccgccgtgcgtaaggctttcgacgatctggaactggttatcgtccaggatattttcatgaccaaaaccgcctcagcggccgacgttatcctgccctccacctcgtggggcgagcacgaaggcgtttataccgcagcggaccgcggcttccagcgcttctttaaagcggtagagccgaagtgggacctgaaaaccgactggcagatcatcagcgaaatcgccacccggatgggctacaagatgcactacaacaacactcaggaaatctgggacgagttgcgtcatctgtgcccggatttctacggcgccacctacgagaaaatgggcgagctgggctacgtcatgtggccgtgccgcgatgagtccgacgccgaccaggggacctcttatctgtttaaagagaagttcgataccccgaacggtctggcgcagttcttcacctgcgactgggtcgcgccgattgacaaactcaccgacgaatacccgatggtgctgtcgacggtgcgcgaagtcggccactactcgtgccgttcgatgaccggcaactgtgcggcgctggccgcgctggcggatgaaccgggctatgcgcagatcaataccgccgatgccgaacgtctgggcattgaggatgaggcgctggtgtgggtgaactcgcgtaagggccgtattatcacccgcgcgcaggtcagcgatcgtccgaataaaggggcggtctatatgacctaccagtggtggattggcgcctgtaacgagctggtttccgagaacctgagcccgataaccaaaacgccggagtacaagtactgcgccgtcaacgttgagccgattgccgaccagcgggccgcagagcagtacgtaattgacgagtacaataagctgaaaacccgcctgcgcgaaagcgcgatgggctaa

SEQ ID NO: 198453 - DNA, 129 bp, Klebsiella oxytoca
atgtgtcggttttggagggaattttattgtgctattatcgagatcttcatggatgccgaagataaatactcttttacgattttgaggaacaccataatctacagcattgattatatcactgaattttaa

SEQ ID NO: 198454 - DNA, 336 bp, Klebsiella oxytoca
atgactctgatgactctgacggtactgatgactctgacggctctgatgactctgacggctctgatgactctgacggctctgatgactctgatgactctgatgactctgatgactctgatgactctgatgactctgatgactctgacggctctgatgactctgatggctctgatggctctgatggctctgatggctctgatggctctgatggctctgatggctctgatggctctgatggctctgatggctctgatggctctgatggctctgatgaccctgacggctctgacggttctgatggctctgatgactctgacgtctctgatggttctgtaa

SEQ ID NO: 198455 - DNA, 981 bp, Klebsiella oxytoca
atgagccatcaactcaccttcgccgatagtgaattcagcactaagcgccgtcagacccgaaaagagattttcctctcccgcatggagcagattctgccatggcagaatatgaccgctgtcatcgagccgttttatcccaaggcgggcaatggccgacggccctatccgctggagaccatgctgcgtattcactgcatgcagcattggtacaacctgagcgacggtgccatggaagatgccctgtacgaaatcgcctccatgcgcctgtttgcccgattatccctggatagcgccctgccggatcgcaccaccatcatgaatttccgccacctgctcgagcagcatcaactggcccgtcaattgttcaagaccatcaatcgctggctggccgaagcaggcgtcattatgacccaaggcactttggtggatgccaccatcattgaggcacccagctctaccaagaacaaagagcagcaacgcgatccggagatgcatcagaccaagaaaggcaatcagtggcactttggcatgaaggcccacattggtgtcgatgccaagagtggcctgacccacagcctagtcaccaccgcggccaacgagcatgacctcaatcagctgggtaatctgcttcatggagaggagcaatttgtctcagccgatgccggctaccaaggagcgccacagcgcgaggagctggccgaggtggatgtggactggctgatcgccgagcgtcccggcaaggtaaaaaccttgaagcagcatccgcgcaagaacaaaacggccatcaacatcgaatacatgaaaaccagcatccgtgccaaggtggagcacccgtttcgcatcatcaagcggcagttcggcttcgtgaaagccagatacaaggggctgctgaaaaacgataaccaactggcgatgttattcaccctggccaacctgtttcgggtggaccaaatgatacgtcagtgggagagatctcagtaa

SEQ ID NO: 198456 - DNA, 321 bp, Klebsiella oxytoca; identical to SEQ ID NO: 95262

SEQ ID NO: 198457 - DNA, 279 bp, Klebsiella oxytoca
atgaaatataaaacccttagccaggttcataccgaagcaatgaacgatcatgagtacagcgcggcattcgaggcagaagaagcctcggagctacttcgggaaaccttagcaacatggagaaaagaagcgggtttgacgtcggcacaggttgcagaacgtatgggcatcaaagcgcctactatctcacgtatggagaagaacgcttcgcgaatgagtattcagacgctggttcggtacgccagagcctgcggtgttaactttaaaattcagcaggtttga

SEQ ID NO: 198458 - DNA, 414 bp, Klebsiella oxytoca; identical to SEQ ID NO: 109942

SEQ ID NO: 198459 - DNA, 483 bp, Klebsiella oxytoca
atgaagttaaataaagctaaggtattttttacgattgctgttgtatttgcttctatcataactctcatttatttttgttttcattctgcaagaattgatgcaatttatcaagggagcgattacgtaaaaccgattgatgaatattgtaagtcaacagttatattagtaagtaatgcaccgattactgataggggacggttgagtttatgggagcaagaaaaagacaatgttatgacaacgatgccgctacagaaaaaatgtgattcaatatatttcgtgagaaataagccagagcctcctttatttagtgaggatgttaaatattggcaagcagatgaacagttttgttttaaaggggaggtgaatggtgcgtgtatatctaataaaaatatttttatgtcaatttctttgttttcattaactactgatgggatctatagagatacttacaaagataaaactatttatgtgtcttatcgataa

SEQ ID NO: 198460 - DNA, 1977 bp, Klebsiella oxytoca
atgcatatttcccctcctattttgttaccatattccccgaatggaattttcagcgactgggtttttaagtgcatgcctgtcgatgctgcacgtaattaccccgtaaatcccgtgggtgcatggcacgggggcatacatattcttcatacagatctttccggggcgcaggccaaccccatccgggcaattgctgacggtactattatttatgctaggtttccgtccgaaaacaaagataaaaagccactggcttataatgggaaaacggacgatgggtgtgtattgatccgacataagatattgattggtgatgatcctgtcgagtttgttttttattcgctgaccatgcacatgaagcaggtacgatttgaaattctgtcaaatatagggcagcgtataaaacgtgaacaagtcttaggtacgtcgggtgtcgtggatggcaaaaatgcattccacttccaggtttgttgtgagaaaaaaattctcgatgtatggtgtggtcgtattcatgggggcattaatattgcgttcccaggaaggtttaagcctgtatacggttgtgagtactattatttcccaacaggtacacctgtttatgtggatattcctagaggttttattggcggcccaacgaacctcacgacagaagatttatatattatcaacagtggggtagagacaaaaactctgcgaaaaaaaaatgatggttcctatgaccatctcggcagcgttgctgtggccgtcaattatatcagcgaaccatcagggattgattcctggaaaaatgtcaggggttacagtcagtgggttaaggttgcgctccccgagggtagtgggtgggtcgatgtctgcactgataatataatgacttatagcgacgccgaactacctgactgggcaggatgggctctgattgatgacgacacatccagtgatagtcagtgtaattcacaaataataaaaaaattatatgcagaaaagcaaaatgataatgcaaaatatctgcttacacactcaatttgcaagtttccattcgagtgggatttttcaacattcgatgcgcgtttttcatgggtaaaaacgaaaacagatcaactacccgagccattgaccgatgatgattacaatgaactcaaggaacacataaagtcgttatgcttctttgataaattacctgctgaggtacaaaaggagctgagtggtcagatttggcattttgaaccccgaatattcatcacggagatacaaaaaactgaacgccgcttgatttttgaaacaaaacgtaaaatgaatgattttactgctgacgatatgcgacatggagatatgacgaaagaaaaaattcttcaacaaggaaatcataaaatgtttacacggtttaattttgaaaataccattgatgaacattttgataatatggctagtatggcaaaatggactgcttggggggaatattcgccacttattaaaattatgattgaaaaattcaaaaagaatgatggcgggattttacggcacaatctattgaataaagcgtttttaggacacaaaacgacaatggattgtgtaaataaaatcaaaggattcttatttaatttactgtctaataatgatttttgttcattgtcaatagatgacttgcaaaaattgagtttgaagataagggatccaaaggatggaattaaactgccaaaattcgataattatgactggtttaatggcttgggaattactatccacgatacttatgctacaaaaatttatctggattatatcgacattaaagataatggttttgaagctagtttaagctttaagatccaagaccattttggtctggatgttgcagatgtaaatggtaaatggtttgaatattctccttggttttgttcgtggtttattttgcagagatacgaggcctataattataagccctttataaatgaggctaatttcacttgtgtaataacggggtag

SEQ ID NO: 198461 - DNA, 471 bp, Klebsiella oxytoca
atgaagtaccatttgaaattacgtacgataatctgtgccattctgttttgtttttttgcaacgttttgtttcggttcttcagatataaataactctccggaagttgttatcagccatttttattctgactatctcactgcctggaatgactcagatgttgggcgtgggttagaaaaaagccagcaggccattgataaatatacaacaaaacaccttcagaatctgaaaaataatgatgattcaggagctgattattttacaaatgtgcaggaaatctgccctgagtgggctagtgagataactacacatatctcatcgctaaataatagaaaagccattgttgaactgactcttggtcacagtgacagcgaatctaaatataaaataaaccttgtcaaaaatgatgatagatggctcatggattcagtgttatttgtttccagtgccacaggtcattgcaacgataactaa

SEQ ID NO: 198462 - DNA, 2967 bp, Klebsiella oxytoca
atgccacgtcgttccatcctgtccgccgccgagcgggaaagcctgctggcgttgccggactccaaggacgacctgatccgacattacacattcaacgataccgacctctcgatcatccgacagcggcgcgggccagccaatcggctgggcttcgcggtgcagctctgttacctgcgctttcccggcgtcatcctgggcgtcgatgaactaccgttcccgcccttgttgaagctggtcgccgaccagctcaaggtcggcgtcgaaagctggaacgagtacggccagcgggagcagacccggcgcgagcacctgagcgagctgcaaaccgtgttcggtttccggcccttcaccatgagccattaccggcaggccgtccagatgctgaccgagctggcgatgcaaaccgacaaaggcatcgtgctggccagcgccttgatcgggcacctgcggcggcagtcggtcattctgcccgccctcaacgccgtcgagcgggcgagtgccgaggcgatcacccgtgctaaccggcgcatctacgacgccttggccgaaccactggcggacgcgcatcgccgccgcctcgacgatctgctcaagcgccgggacaacggcaagacgacctggttggcttggttgcgccagtctccggccaagccaaattcgcggcatatgctggaacacatcgaacgcctcaaggcatggcaggcactcgatctgcctaccggcatcgagcggctggttcaccagaaccgcctgctcaagattgcccgcgagggcggccagatgacacccgccgacctggccaaattcgagccgcaacggcgctacgccactctcgtggcgctggccaccgagggcatggccaccgtcaccgacgaaatcatcgacctgcacgaccgcatcctgggtaagctgtttaacgctgccaagaataagcatcagcagcagttccaggcgtcaggcaaggccatcaacgccaaggtacgtctgtacgggcgcatcggtcaggcgctgatcgacgccaagcaatcaggccgcgatgcgtttgccgccatcgaggccgtcatgtcctgggattcctttgccgagagcgtcaccgaggcgcagaagctcgcgcaacccgatgacttcgatttcctgcatcgcatcggcgagagctacgccaccctgcgccgctatgcaccggaattccttgccgtgctcaagctgcgggccgcgcccgccgccaaaaacgtgcttgatgccattgaggtgctgcgcggcatgaacaccgacaacgcccgcaagctgccagccaatgcaccgaccggcttcatcaagccgcgctggcagaaactggtgatgaccgacgccggcatcgaccggcgctactacgaactgtgcgcgctgtccgagttgaagaactccctgcgctcgggcgacatctgggtgcagggttcacgccagttcaaggacttcgaggactacctggtaccgcccgagaagttcaccagcctcaagcagtccagcgaattgccgctggccgtggccaccgactgcgaacaatatctgcatgagcggctgacgctgctggaagcacaacttgccaccgtcaaccgcatggcggcagccaacgacctgccggatgccatcatcaccgagtcgggcttgaagatcacgccgctggatgcggcggtgcccgacaccgcgcaggcgctgatagaccagacagccatggtcctgccgcacgtcaagatcaccgaactgctgctcgaagtcgatgagtggacgggcttcacccggcacttcacgcacttgaaatcgggcgatctggccaaggacaagaacctgttgttgaccacgatcctggccgacgcgatcaacctgggcctgaccaagatggccgagtcctgccccggcacgacctacgcgaagctcgcttggctgcaagcctggcatacccgcgacgaaacgtactcgacagcgttggctgaactggtcaacgctcagtttcggcatccctttgccgggcactggggcgatggcaccacatcatcatcggacggacagaatttccgaaccgctagcaaggcaaagagcacggggcacatcaacccaaaatatggcagcagcccaggacggactttctacacccacatctccgaccaatacgcgccattccacaccaaggtggtcaatgtcggcctgcgcgactcaacctacgtgctcgacggcctgctgtaccacgaatccgacctgcggatcgaggagcactacaccgacacggcgggcttcaccgatcacgtcttcgccctgatgcacctcttgggcttccgcttcgcgccgcgcatccgcgacctgggcgacaccaagctctacatcccgaagggcgatgccgcctatgacgcgctcaagccgatgatcggcggcacgctcaacatcaagcacgtccgcgcccattgggacgaaatcctgcggctggccacctcgatcaagcagggcacggtgacggcctcgctgatgctcaggaaactcggcagctacccgcgccagaacggcttggccgtcgcgctgcgcgagttgggccgcatcgagcgcacgctgttcatcctcgactggctgcaaagcgtcgagctacgccgccgcgtgcatgccgggctgaacaagggcgaggcgcgcaatgcgctggcccgtgccgtgttcttcaaccgccttggtgaaatccgtgaccgcagtttcgagcagcagcgctaccgggccagcggcctcaacctggtgacggcggccatcgtgctgtggaacacggtctacctggagcgtgcggcgcatgcgttgcgcggcaatggtcatgccgtcgatgactcgctattgcagtacctgtcgccactcggctgggagcacatcaacctgaccggtgattacctattgcgcagcagcgccaagatcggcgcggggaagttcaggccgctacggcctctgcaaccggcttag

SEQ ID NO: 198463 - DNA, 255 bp, Klebsiella oxytoca
atgagtatgcataacaaaaaaagtgattcttactttagtcgaaaccaaaaatggttgagcccgcttgttattctagctttttgcctgttaagctcacaggtcggcaaaaaaactgttgcaaccattgcgcttttcatctgcgcatttaatgcaaggatgacaccaaccgtgtctgccagaatcattgttgctacgttctattttagtgtatttggtgtgtttggcttgctaatttttaactattttaatgggtag

SEQ ID NO: 198464 - DNA, 315 bp, Klebsiella oxytoca; identical to SEQ ID NO: 35584

SEQ ID NO: 198465 - DNA, 660 bp, Klebsiella oxytoca; identical to SEQ ID NO: 35583

SEQ ID NO: 198466 - DNA, 1191 bp, Klebsiella oxytoca
atgaaatctaacaatgcgctcatcgtcatcctcggcaccgtcaccctggatgctgtaggcataggcttggttatgccggtactgccgggcctcttgcgggatatcgtccattccgacagcatcgccagtcactatggcgtgctgctagcgctatatgcgttgatgcaatttctatgcgcacccgttctcggagcactgtccgaccgctttggccgccgcccagtcctgctcgcttcgctacttggagccactatcgactacgcgatcatggcgaccacacccgtcctgtggatcctctacgccggacgcatcgtggccggcatcaccggcgccacaggtgcggttgctggcgcctatatcgccgacatcaccgatggggaagatcgggctcgccacttcgggctcatgagcgcttgtttcggcgtgggtatggtggcaggccccgtggccgggggactgttgggcgccatctccttgcatgcaccattccttgcggcggcggtgctcaacggcctcaacctactactgggctgcttcctaatgcaggagtcgcataagggagagcgtcgaccgatgcccttgagagccttcaacccagtcagctccttccggtgggcgcggggcatgactatcgtcgccgcacttatgactgtcttctttatcatgcaactcgtaggacaggtgccggcagcgctctgggtcattttcggcgaggaccgctttcgctggagcgcgacgatgatcggcctgtcgcttgcggtattcggaatcttgcacgccctcgctcaagccttcgtcactggtcccgccaccaaacgtttcggcgagaagcaggccattatcgccggcatggcggccgacgcgctgggctacgtcttgctggcgttcgcgacgcgaggctggatggccttccccattatgattcttctcgcttccggcggcatcgggatgcccgcgttgcaggccatgctgtccaggcaggtagatgacgaccatcagggacagcttcaaggatcgctcgcggctcttaccagcctaacttcgatcattggaccgctgatcgtcacggcgatttatgccgcctcggcgagcacatggaacgggttggcatggattgtaggcgccgccctataccttgtctgcctccccgcgttgcgtcgcggtgcatggagccgggccacctcgacctga

SEQ ID NO: 198467 - DNA, 129 bp, Klebsiella oxytoca; identical to SEQ ID NO: 33085

SEQ ID NO: 198468 - DNA, 279 bp, Klebsiella oxytoca; identical to SEQ ID NO: 33086

SEQ ID NO: 198469 - DNA, 708 bp, Klebsiella oxytoca
atgcttgcgtcaaaatcgctgctggtgatgcccaacggcagcgtgacgctcaatatgcccatggatgaagatgctcagtccgttcctgaggtggttgagcgggtgctgcgtaaacacggtctggaaggtccagattttgaattcagactggagcatacatacccaccgcgtgaaattatcactcagtggcaggagacggatctgcaattcatccagcgcattctgtctgaggtgggaatttactggcgcacggagatggacgacgtgcgcggtctggatacgtacatttttgccgacagccagctgaactaccggtttgacgtgcgcctgccgtacagcgagccatcgggtctgttcgacggcgcggcagaattggtctgggatgtacggacctggcacaacatagccaccggaaccgtcgccacgcgggattacaactaccggactgccaccacgccgatggatgcgacggtcagcgtgcgtaacgatgcggtcaccaccggggagcattaccgctacgcggcaccgtatcgtgacgcgggtgatgacaccagcccggagccggaaacagaatccggcgcgttctacgcccgtcttcatcacgaacgggagctgaacaggttggcccgcattcacctgttcagcaaggccgcccacctcatgcgcgggcaggtgctggagtcacagggcgatgtcttgccgccctga

SEQ ID NO: 198470 - DNA, 1284 bp, Klebsiella oxytoca; identical to SEQ ID NO: 194600

SEQ ID NO: 198471 - DNA, 300 bp, Klebsiella oxytoca
atgagccagcgcacgaaagggatggtgcgcatggtcagccagacgtggctgaccatcgtgctgatctccgtcctgctgatcgcgtcgagcgcgggcattctgtggtggcaggggaaccggatactcgagaactacacgaccatccgggagcagaagagcacgcaggccatgctgtcagagaggaacagcggcgttcagctctcgacgtgcggagagcagagacgccgatgcgtgagggtgaatccgcaagcgggcggattcggagaggactcgagctggatgatactggcggggaaatag

SEQ ID NO: 198472 - DNA, 216 bp, Klebsiella oxytoca; identical to SEQ ID NO: 156084

SEQ ID NO: 198473 - DNA, 444 bp, Klebsiella oxytoca
atgattgctgtatcacttccagacgagttactaaaaagactagatgatgctgtagataaaactggtaaaaaacgctcattcttgatacgagaatcaatatctatgtatttgaataacatagaaaacatacatgaaaaaaaagagatcatcctgaacacctcaaaaccgttctatgaggtcctcattgaagaatttaaaaatgaaaaaaaactaataactgaggccagaaaaactgagttcacgatgtttagtgataacggaaaactctatgtcataaattcgaaagggaatacgcgcaggctagaacccatgtatgtgaataatttctttgaagagtataaaaagacaggaagtatgagtacatctagctatcaagatataaccttcaactcatcttatcttttagctgcactacagtacctgatggaaaaagaactgatttaa

SEQ ID NO: 198474 - DNA, 183 bp, Klebsiella oxytoca
atgtggattgtcatccgtattatgatcgacttcctcctgaaaaaagcgatgattttcagtatgatgaatacccttctgctattcatgtggctgcgtgtattgatcaagctagcaaagaactcgacgaactattgtttggtggtggatatggggaaaatggtgaggggcatgcaagcccgataa

SEQ ID NO: 198475 - DNA, 345 bp, Klebsiella oxytoca
ttggcagacaaacgcagcaaaatgctcacgatgtgggtaacggaagatgagcaccggcgtctgctggaacgctgcgacggtaagcagctcgcagcctggatgcggcagacgtgtctggatgagaagcccgcccgcgccggcaaacttccgtcgatctcgccggcgctgcttcgtcagcttgccggcatgggtaacaacctcaatcagattgccaggcaggttaacgccggtggcggcagcgggcacgaccgcgtgcaggtggtcgccgcgctgatggccatcgatgccggactcgagcgcctgcggcatgccgtactggaaaaggaggcaggcgatgatcgttaa

SEQ ID NO: 198476 - DNA, 180 bp, Klebsiella oxytoca
atgctgccactgcgatcgttccagctccagcgctttctggtgctgcaccgcccgctcctgctgccggtgagtttctatcgcgttcagcctttcgacaaccggcgcagctgctcgctcaaactctgcacctgcctgctcaagaccgtgacgcgctcgttcagcgccgcgttctcccgttga

SEQ ID NO: 198477 - DNA, 333 bp, Klebsiella oxytoca; identical to SEQ ID NO: 99331

SEQ ID NO: 198478 - DNA, 171 bp, Klebsiella oxytoca; identical to SEQ ID NO: 34003

SEQ ID NO: 198479 - DNA, 345 bp, Klebsiella oxytoca; identical to SEQ ID NO: 118661

SEQ ID NO: 198480 - DNA, 486 bp, Klebsiella oxytoca; identical to SEQ ID NO: 99332

SEQ ID NO: 198481 - DNA, 693 bp, Klebsiella oxytoca
atgattaatacccaatacctccagtatgttcgccagcagctgatagtggccaccgccgatctgagcggcgcgacgaaagggcaactggtagtctttgcagaaaacgcgcaattcaccgctacggcgcgcagccggggaaggaagaaagtttatagcgaggccaaacaacgcatggttaacccggatgggccgccgatgagcggcaatcagtcacgcgctaagggttcatcgatcgctctcgttctgcccgttgagtattcgacggcaagctggcgccgggctctgctgtcgctggaagagcatcagaaatcgtggctgctgtggaactacagcgagaatatccgctttgagcaccaggtggcgatcacccagtgggcgtggacggagttccgtggtcaactcggcgctaagaaagtggccggcaagacgatggagcggctgaagaaactgacatggctggcggcgcaggatgtcaaagcagaactggcaggccgggagacttatgaataccaggcgctggcggaactggttggtgtagcaaagtccacgtggacagaaacctaccttcctcattggctggcgctgcgcagcagttttgtgaagcttgacagcaatgctctcatatcggtaacacgatcacgttcacaacaaaaggcgacaaatttagatgtaagtcttgcaaaaccgaactga

SEQ ID NO: 198482 - DNA, 231 bp, Klebsiella oxytoca
atgaagatcacctatagcgacgaaggggcttacgcccgcatctggctgacaggtccattttggcagttggctaaggccaggcgtattgcggatgcaggtctggacgagtccccggtcaatacctgggagtctcgcggactcaccttccaaatcaccctgtacgggaaaagcgcatatgtgctcagagcctataaggcgatggctaaggccatggtgagggcatccaaatga

SEQ ID NO: 198483 - DNA, 1305 bp, Klebsiella oxytoca
atgaagggaatgcaaaaaatccgcaggggtaagagcttcgcaggggtcgtgctttacgcattaaaaccagcttctcatcataaaaaagatccgatagtaattggcgggaacatggatggaagcgatgtcggagagttgattgcagaattcaatgcgactaaaacgcttcgcacggatgttgctaaaccagtctggcacaatgcgcttcgcttgccgaaaaacgaagcgctgacagatgctcagtggtcagggattgctgatgattacatgtcccgaatgggcttctctgaaacgcacctcagatgctatgtccttcatgatgatgcggccggccagcacatccacattattgccagtcgtatagatctatccaatagaagtctttacttgggcaaaaatgaaaacctcatcagcacccgtatcatccaacagttagaaatagatcaccatctgaccaaaaccaaagggccagaatcggtagcatcaccatccccagcttcgctatccagaaaatccccgccccaaaaaccgataatcgcaataccgaagcctaaaaagctatcgcgttacgaagcgatgatggagaagtataaaggagagctatcacccaaatcggttattcaggaagccctggaagcattacttgtcgataaaccatccaccactgattttgtgatgcagcttgccgtcaacaatatcaaagcgcttccgaatattgcctcaacagggaaaatgaatgggttttcattcgaatatcaggggattgctttcaaagcttcgcagttaggtaaaggttattcctggtctgccttacaaaacaggctagattaccagccggaacgcgacaatgctttcctgtttgcattgaaaatgccatcagtcagtaaggcatcggttagcgaagcgcctgatagtgccatagcaacacatccccatgaaatcacaacagaagacgttaacagtcctgtcgaatcgcttatcctcgacaaacgagctgctggtcaggacgaatacactaacgcttctgtaaagcagtttcacttagaagatggtgctggtgctaaagaatcgttaaaagaagcccccgaccgaagctatgcagtttcagccttcaggtggttggaatacatcccctacctcgatgtaatttatcgtatgttgaaaaacctcaaagtccccacgctgaaacgtcctcgaaaacacaaaaccatcacttgtgtgaagacgatagatataacacctctccccaaaaaaaatcccattgaatcaatatctcaatctaaaagagattcgctttcgatgtaa

SEQ ID NO: 198484 - DNA, 300 bp, Klebsiella oxytoca
atgagccagcgtacgaaagggatgctgcgcatggtcagccagacgtggctgactatcgtcctggtgtccgcgctgctgatagcctcgagcgcgggcattctgtggtggcagagtcagcagatactcgacaattacacgaccatccgggagcagaagagcacgcaggcaatgctgtcagagaggaacagcggcgtgcagctctcgacctgcggcgagcagagacgccgctgcgtgaaggtgaacccggaagcgggacggttcggagaggattcgagctggatgatactggcggggaaatag

SEQ ID NO: 198485 - DNA, 210 bp, Klebsiella oxytoca
atgacggagctggaaaaacagttgctgagcgcattagagcagctacagcaggactactcgaaaaggctggacgagtgggagagcgccttcgcggaatggcggacgatgtctggtcttatgcaacgggagaacgcggcgctgagcgagcgcgtcacgggcttgagcaggcaggtgcagagtttgagcgagcagctgcgccggttgtcgtaa

SEQ ID NO: 198486 - DNA, 1071 bp, Klebsiella oxytoca
atgaaagctatggttttttatggtgaaaatgatgttcgttttgaggaacgaaaaaaaccagagataatcaatccaggcgacgctattattcgcatgattaaaaccacaatttgtggaacagatcttggaatattaaaaggaaagaacccagaaatagagaaaaatgcaaaagaaaaaacaggatcttttaatgggagaatactcggacatgagggagttggtataatagaggaaattggctcagcagttaaaaattttaaaataggtgataaggtaattatttcttgcgttagtcgttgcggcacctgcgataattgtcaaaaacaattatatgcgcattgtagaaatgatggtggttggattatgggttatatgattgatggaactcaagctgagttcgtcagaacaccatatgcagacaactctctttacttattccctgatgaattaaatgacgatgccggagttttactttctgatgcactacctacagcccacgagatagggatccagaatggaatggtaaagcctggtgacactgttgctattgttggggcgggtcctgttggaatgagttgcctactcaccggcatgctttattccccatcgcagttgatcatgatcgatatggatgaaaaccgtttggcaatggctaaagatatgggggcaactcatactattaactctgcaaaagaaaacgctattaatagggttatggaattgacaaaccagcgtggtgtcgattgtgcaatcgaagcagttggaatcgaaccaacatggaatatttgtcaaaatattataaaagaaggcgggcatttagcaaacgttggtgttcatgggaaccctgtgagttttgctatcgagaagttgtggataaaaaacctgacaataacaacaggtctcgttaatgcaaatacaacaggaatgttaatgaaaacctgctgctcaggaaaactagcaacagaaaaactcgccactcatcattttaattttaacgatatagaaaaagcctatgatgtttttaaacatgccgctgatgaaaaagcaatgaaagttatgattaatttttaa

SEQ ID NO: 198487 - DNA, 210 bp, Klebsiella oxytoca
atgcatccgtttactttgtttgtatattgtatcatttgtttgttttttgttgttttttttgtgctttttgtgctttttgtgctttttgtgctttttgtgctttttgtgctttttgtgcttatgtcgttggggctgggcgggggcgaaaatctggaaagcgaatcagatctttgtgagaaccttcttgagatcctttttttctcgtcgtaa

SEQ ID NO: 198488 - DNA, 207 bp, Klebsiella oxytoca
atgagcaaccagttaaagccttgcccattctgcggtagcaacgacgtagaagcattcgcacaggatgaggacgattgcccgcatcgttctgcgattgttcgatgccactcatgcgatgcacagtccgcgcagatggttggcagcacaaaaattgaaatggcgattcgagcctggaataagcgcgtggaggccaagcatgacaactga

SEQ ID NO: 198489 - DNA, 591 bp, Klebsiella oxytoca
atgacaactgatatcaccgaactggcgcagaggttaaaacttgaggtccatcgtgcggtaagcaatttcaaccctcagatgaatattaaaaccagagacctaaaggagctggtaggggcgctggagaaggcgcaggcaggcgagaagcaatggcgagaagttgtcgatgcgttctgcactgatgacgccgactggcacaatctgactaactcaaacaatgagctgattgctcttttgtctcaggccttgtgcaagcaagcagaccgcatcgccgagctggagtcccgcaccgtctccgccgccgctgctgatgtgttggcagagcgccagcgacagattactgctgaggggtggacacctgaacatgatgatgaatatgagcatggagaattagcagatgcggctggttgctatgcgctttcctctgaactgttcgattgtgccggtgagccgcccagaccgtggccgtggcctgatgaatggtggaagccaggcaatcgtcgccgcgacctggttaaagctggcgcgttaattctggccgaaattgagcgtatcgaccgcgccgctggcatcaagtgggaggctgagtag

SEQ ID NO: 198490 - DNA, 1512 bp, Klebsiella oxytoca
gtgattgctgatgaaggcaaagatacaggcattttgactttatcgcttaccggggatgatcaagcacaaatcaaggatatcattgatagtataagcactaattatctggcgcagaatattgccagacaggctgcgcaagatgcaaaaagtttagaatttctgagtgagcagcttccaaaggttcgcagcgaactagatttagctgaagataaattgaatggttatcgtcagcaaaaagattcagtcgatctgtctttagaagctaaagctgtacttgaccaaatcgttaacgtcgataaccaattgaatgagttaacaatcagagaatcagaagtttcacagttgttcactaaagaacatccaacatataaggcgttgatggaaaagcgtaagattctgcaggatgagaaaaataagctgaataaacgtgtatcagcaatgccagaaacgcagcaagaagtgttacgcctgagtcgtgatgtggattcggggcgggcagtatatatgcaactcttgaacagacagcaggaattaagtattgcgaaatctagtgcgataggtaacgtccgaattatcgatactgcaataacgcaacctaagccagtaaaaccaaataaagtattaattattttgttaggtgtggttattggtctattaatatctgtaggtttagtgcttgcacgtgtggtattacgtaaagggattgaatcaccagaacagttagaagaattgggcataagtgtctatgcaagtgtgcctgtgtcagaggaatttgcaaaacgtatagaacgctcgagcaaattaaaaaataaaaatctagatgaggcctctgtcttccttgcaattgaaaacccggcagatttagccatcgagtctattcgtgggctacgtacgagcctacactttgcgatgatggaagccagaaataatgttttaatgattacaggtgcgagtccaaatgcaggtaaaacatttatcagctcaaaccttgccgaggtgatctcacagaccggtaagaaagttcttttcattgatgccgatttacggaaagggtatacacataaattatttaacaccgataacaatagtggcttatcagacatattgtctggaaaaacaccaatcgaaattgcggttaaaaatttacctaagattggttttgattttatttcacggggcatggcaccgccaaatccagcggagttactcatgcataagcgctttggtgagcttatcgattgggcaaataatcattatgatttagttatcgtcgatactccaccgattcttgcggtaacagatgctgcagttatcggaaactatgcagggacaacgctattagttgctcgctttgaacaaaatactgccaaagaaattgaggttagtattaaacgttttgagcaaagcggtgtgaacattaaaggttgcatattgaatggtgtagttaaaaaagcaagtaactattatggatatggttataatcactacggctacacatatactgataaataa

SEQ ID NO: 198491 - DNA, 252 bp, Klebsiella oxytoca; identical to SEQ ID NO: 30842

SEQ ID NO: 198492 - DNA, 888 bp, Klebsiella oxytoca
atggtccgggcctttcacctgctcgacgtagttgaagctgcgcaccggcacggtgtccggaccatacggcaggcggcccagcacgcgcggcatcaccaggccgatatagcgcgcgtcgtcggtgtcgcgaaaggatttccatttgatgtactcggcgcggtcgaagtagttgccgatatccttgatggcggcaacctcttccatggactctttcagaaagaaggccgggccgacggcgccgataaacggcatatgggccgcggcggagacgccggagatgttgcgcagcagcgccacgtcctgcgggctggcgtcgaactcatacgcggagatcaccgagccaatcggctcgccgcccggggtgtcgtactcggcggtgtaggtgtgccagtagagaccgctctgaatcagctccggcgcgtcttcgaagtcctggcgcagatcgtctttggagacatccagaatttcggttttgacgttctggcggtagtcggtgctgtccaccagctgcttcagtccgcgccacagggattccaccttctggaactcaggatggtgcatcaccgcgtccagctggcggctgatttgataatccagttcagcgatatggtggtcaatcagggtcttgtcgagcttctccacggtctttccggactgacggatgcagtccataaacacctgcatcgccgccgtcagtcgttcgcccgccggggcgtcggacagcgcggcatcatccagaaagtcgttaatatcgcccaggcgggacgccggggtcaggttgattttgtcaaacagggaagcgtaaacgctctctttttccagtacagcggtctgcccctgcgcgggggcggtttcagtatttacagacatcagcatattcccggttaa

SEQ ID NO: 198493 - DNA, 657 bp, Klebsiella oxytoca
atgaccttcgttgccatttcagatacgcacctgcacaactggtcgcagttcgcgataccaacagagtcgggcattaactccaggctgttgcagattcttaaagccattgaagaagcggctttcgccgccgattaccacgccccagcgggcgtggttccaaccgtctatcacggcggcgatctcttccatgtgcgaggttctttgaccccttctgtgctaaacgcggtgctcgacttttttaagaccatccaccgtgactacggcgttcgctttcgcatgatcgccggcaatcacgatctggaaaccaaagactcatgtcctatgggcaatgcagctgcggcgcttaattcgttgccgtttgtggaggttgtatccgaaaaaacgctgttcgaggaccacaaagtcgctctgctgccatggcgcgattccatggacgatctgcgtgcggatcttgcgcacgttaaagacgcgatcggcgctagtgttgcctctaagtggacagcaatcatccacgcaccggttaacggggttgttcttggcattccagaccatgggttcgacggaaaagagctcgcctcctatggcttcgggttagtgctcgccggtcactaccacaaccacaaaaaaatcggcactgttgcaaatagtcggtggtga

SEQ ID NO: 198494 - DNA, 510 bp, Klebsiella oxytoca; identical to SEQ ID NO: 9982

SEQ ID NO: 198495 - DNA, 1383 bp, Klebsiella oxytoca
atgacagaaagtattcagcgcatgctcaggaaaaataaaactgatgtggatcgtcttcgtaaaagagggatgattcttgatgcaagggattgcggcctgaatgtaaaaactggagaggactctcagcgagcgttacagcgcgggtatgactggctgtcaggaaacggcggaggaaagctttacactccccctggttatttcaagctggcgaaaccggtcaatcctcgttcgggcgtggctctgttgggtgctggagtgggtgttacaaacttcctgccatttgggtatctggccgcttttacgtatcagggggcagagacctacattgaaaatattcagtttactgattttacaattgacggagaaaaccagcagttacacccggtgaacggatatatacccgatataaaaggtatatatctccagtattaccggaatactatttttgaccgcataaagattcagaacacgggagccactgggcttggcgtggatatgcctgataacgtttcaatcatgcgtgtggttacggaaaattgtggccgactcggccaggttggttctttgggagcttcaggcattggtctgggaaccgggtaccttgccagtgaaccgatttatatcggtcagaccgtgaataagggcaataaaaattacggtatatttttcgagccacaacgtggtgtcggtgtggctcgcgacactattgctatcgggaatgtgtgtgagtacaaccatgcggggatggccgactgcggcatagatggcctcatcgcgatcggtaataacctgcgtttcaatgaatatgggtttaaaggttctccgggaacaaacggcgcggggaaccccggtaaccgtggcattctgaaggacaaccacatcaacggtaatactaaacacggcatttatctttatacggataaagggcttgctatagagggggaatacaattattccggtaaccgtatcgctgataatgagctcgacggcattcatgttgaatatgctcatacatccgcgaagttactgaacagtaagtttgcggataatgatatttatcgtaatggtcgtcatggtcttaactttgtcagcggcaatctggtcaatgttgacattatggataaccggctctggaacaatggacgtacagaagtgggggatgccatcgctggcgcagcggatatggtgaaatgcgggattaccggcaataaaatccgtgacacgcaggacactgcaactcagcgatacccggttaatctctccggagcactgacagataccgatatctcattcaaccattgtgttggaaatgcccagaacaccttaaatcttaccggcacacaaacccgagttaccacgatcaacaacccagggattgcataa

SEQ ID NO: 198496 - DNA, 276 bp, Klebsiella oxytoca
ttgaaaaaaatattcatcctatcggcagcgctgatcatggcaggatgcgcaacaaagcaatatccacaggccgcgaacgtcaccggtccagaatcttccgcaatggattgcaaagcggtagctctggaaatcgcaaaaacgcgcagtgtacaacaagaaattgaggcaaccggcgaatttgacgggcgcaccgtattaggtttcctgggtgattttgggataggaaatggcatggcaaaaggcgaagcccgcaaaaaagcagctaacggggtctga

SEQ ID NO: 198497 - DNA, 1122 bp, Klebsiella oxytoca
atgggctatttacctgcttttcagtatcgcggcaagcccactgacaatgctcctgaagtttatcttgagaacattcagtacttcgatttcacaatcgatggcgagaatcagcagttgcatccagtaaatggttatatcccggatattaaaggcatcttcctgcagtattaccgcaacgcggtatttgaccgaattactatccgcaacaccggcgctacggggttcgggatggatatgcatgacagagcgtccatatttcgctgtatgactgaaaactgtgggcgactggctacagtcggagcccttggtgcatctggcttcggtattggaactagcttcctcagtagtgagcctttctttgccagccagcttattggacgaaataacaaaaactttgggattttctttgagccgcagcgtggcaccgggacgtcgcaggatgccatcgtgactgacagcgtattctacggtaactatgcagggctggctgattgcggtatcgaagggcttaccgcgtctaatcttaatctccggggaaaccagtacggttttgttgccgagccaggcactaacgggggaggtaacccagggtttagagggaaactgaataaccttaccgtcaaaggaaatgcaaaacatggtatatatttaaataccagtaaaacagatgccattgtcggtgaatataaaattacaggtgggcaaatctctgaaaatggcgaagacggtataaatgttcggtatgccagtgaagtaaccaataaaggcctcaggatatctgatgtcgatattaacgataacggacgtcatggcgtcaactttgaggccggcccggtagtcaatgctcgtatcacgggatgcgacttctggaataacggaaaactgatgccgggtaatggcattaacagtaatcgtagcgtcaagaaaagtcgtttctccatgaactcattttatgatttgcaggatatccctacccagcaatatccggtatccatcagcggagatatggaagacgtcgatatctcgtttaaccacggcgcaggcaatgtgcataacgaactgaacctgaccggaaacaaaacccgtgtcaccacacttagcaacccagggattgattcatga

SEQ ID NO: 198498 - DNA, 255 bp, Klebsiella oxytoca
atggcggcggttcgcgatagtgagcagtcctgcatctttaattttgatggcgcagccttaacgacacgactttttgatggctacagctggtattcccgttcggtgactgcttttccaccggcgctttcacgtctgtgtattggccgctcaaacatggatgcgaacaactatttcaacggtcatatcaggaaaatcatctactggcccactgcgttaggcaatgctgaaatggaggagattctctcttatcagtga

SEQ ID NO: 198499 - DNA, 276 bp, Klebsiella oxytoca
atggctgagttacgcgcaggtggcatggcgttaatcattaactcccaattccctgaaaatgtggggaaggccgtaaggctcattgagctcatagggtttaacgagtccctatgtgggtatgattgggaagttgctgcgctctcagagttaacggggactctttacccagtaaaggcaggggatagatgcactggactggacaggaacttaatgcccatcgacagcgacgacttcagcaatgaagaccagcaccagaaggtacgggagcatgcctaa

SEQ ID NO: 198500 - DNA, 189 bp, Klebsiella oxytoca; identical to SEQ ID NO: 20846

SEQ ID NO: 198501 - DNA, 201 bp, Klebsiella oxytoca
atgaacctttgccccgatgaacgtctgctctttgtgcggatgatttccgctatgcttcgccgttcgggcggtgatgcgggtgctgttatgtttgaggcgtatcgccatattgtgtccgataccaatcaagctcgtcgttcctacatgctcgacctgctcgaaagcgtcaggcatgactatgtacacggtggatatacatag

SEQ ID NO: 198502 - DNA, 519 bp, Klebsiella oxytoca
  misc_feature (250)..(259): n is a, c, g, or t
atgaacgcaaccacccagaatcaacgctatgccttacaggaactggaaaaagaggcgctgatgggcgccgagggcgaagagaccttcgcccgcgaagtgcgctgtatcgacctgtcgaactttgccgcaagaaaaaatgatattgccgaacaactgtgggaggcggcagtggagatcggcttcttccaggtcagccaccatggtattccgctggcggagatccgcctggcgttcagcacgaccgaggcgnnnnnnnnnngtcagccatcacggtattccgctggcggatatccgccaggcgttcagcatgaccgaggcgtttttcgacctgcccgacgaggtgaagcgccagtatccgctggccggcaacgccggctgggagagcaaggcgcaggttcggccatcgacccgcacgccggatcaaaaagagtcctatcagataacccgtccgctgatggatggacgctggcccagcgatcgggagctgccaggcttccggcagacgatgctcgggtttga

SEQ ID NO: 198503 - DNA, 297 bp, Klebsiella oxytoca
gtgcgctggggcagcgccggcggggcgcagatcctcggcttagcgcagagcggcaccctgcaggtcggcatgcaggcggaccttgccatttaccggctggacgatccgcgctacttcggcctgcacgatatggccattgggccggtggcctgcggcgggcgcgccgcgctgaaggcgctgctgctcaatggccgacccatcgtggaagatgacgccattcccggtctcgaccttgacgcgatgcgccacgacgcgctggcggccgtccgtaccctccaacagcgcgccgctgtttaa

SEQ ID NO: 198504 - DNA, 384 bp, Klebsiella oxytoca; identical to SEQ ID NO: 51105

SEQ ID NO: 198505 - DNA, 345 bp, Klebsiella oxytoca
ttggcagataaacgcagcaaaatgcttacgatgtgggtgactgaggatgagcaccggcgtctgctggagcgctgcgacggtaagcagctcgcagcctggatgcggcagacgtgcctggacgagaagccggcacgcgcctgcaaacttccgtcgatctcgccggcgctgcttcggcagctcgccggtatgggtaacaacctcaaccagattgcccgccaagttaacgccggtggcggcagcgcacacgaccgcgtgcagatagtctccgcgctgatggccattaatgccggactcgagcggctgcggcatgccgtactggaaaagggagctgacgatgatcgttaa

SEQ ID NO: 198506 - DNA, 402 bp, Klebsiella oxytoca
atgaaggtggaggaaggtgatgtcattctggtgaagaagctcgaccgtcttggccgcgacaccgccgacatgatccaactgataaaagagtttgatgctcagggtgtagcggttcggtttattgacgacgggatcagtaccgacggtgatatggggcaaatggtggtcaccatcctgtcggctgtggcacaggctgaacgccggaggatcctagagcgcacgaatgagggccgacaggaagcaaagctgaaaggaatcaaatttggccgcaggcgtaccgtggacaggaacgtcgtgctgacgcttcatcagaagggcactggtgcaacggaaattgctcatcagctcagtattgcccgctccacggtttataaaattcttgaagacgaaagggcctcgtga

SEQ ID NO: 198507 - DNA, 276 bp, Klebsiella oxytoca
atggctgagttacgcgcaggagggttggcgataatcatcaaatcccaatttcctgagaatgtgggaaagacagtacgactcattaagcttatgggatttaacgagtctttgcgtgggtatgagtggatgcttactgcactctcagagttaacagggacgattcatgcagtaaaggctgggggctcatgcactgggttgggacaaaacctaatgcccatcgacggcgacgatttcagcagcgaagaccagcaccagaaggagcgggagcatgcctaa

SEQ ID NO: 198508 - DNA, 324 bp, Klebsiella oxytoca
gtggagagcctgcgtcagcgcggggtgacctacagcgcgctggtggcaagcaatgacgatatggccatcggggcgatgaagcagcttcacctgctgggcattaaggtgccggagcaggtctcggtggtggggtttgacgatattgtgctggcgccgtacatggtgccgtcgctcgccagcgtccgggtgccggtgacggagatgattaaagagagcattaatcgcctgatatttatgctcgatggcggggaattcaatgttcagcagagtttcccaggggcgctgatcgagcgtgagtcgctggtggcgggtccctgcgcctga

SEQ ID NO: 198509 - DNA, 213 bp, Klebsiella oxytoca
atgtataaagttaatgtctcgctcgtctttgttgatagctacaacgcccccctccaacattgctgtggatttaccatcaaaagtaacttttacgtttttgtagacttgcttattatggtgctttgtttttttatctttcagaacagcctcacgagtaaggcgaagaaacgccatacacaaagcgatcacttcatcatcactcagctttgttga

SEQ ID NO: 198510 - DNA, 246 bp, Klebsiella oxytoca
atgcatatccatcccgaaccccgtagcgccggtgttgcggatagtaattcggtcaaataccgcgttgcggtaatactgaaggaagatgcctttaatatccgggatatagccattgaccggatggagttgctgattttcgccatcaatggaaaaatcaaagaactgaatgttctcgaggtaaatctccggcgatgcttcggttggcttccctcggtactgaaatgcaggaaggtaacccatcggtaa

SEQ ID NO: 198511 - DNA, 1401 bp, Klebsiella oxytoca
atggcaactaatgttaagagtaataaatcctatcagggagatgttgctgcgcttccttcgccacaggcaccgatgccgaaactggccagtctttacctggactttgagaaagagctttatattgcactcggcagaacaacgggttatgccattcgctcccgccgtctggctgacgtggtaacctttatccgggcatcggaaactacccgcgtgaacaaaagcggcttgatagaatatctggcgtccggtgaagctgcgatcgaatatgatccggttactggtgagtgcctggggcttcgcgtcgctgcaggggtaactaaccttgcggccaacagtgaaaacttttctggcacgacctggacaaaatcgggcgtgtccaccacggccgccaaaacaatcgcacctgatggtaacgtctctgcatcacccttcaatgaaagcactgacagcgctgatactgtgcactttatgcaggaaaattccactccgaccgccaccgtgggaagtcctgtcacattcagtatttttgcgaaagcgaataccgcgagtgttatccagctggtcgctcagggtgcagtaacaacgacgcagtttgcaaacttcgatctggtcaacggcttgagaacccgtagctcgtccggcatcctgcagacaagtatgcggaaatataaaaatggctggtaccgtctgagtatcaccattacccctgcgggcacagcctccccgcagttcacactggcgcttgtgaatgacgtgacatcagccgctgcgttgccagcctatacaggttcagggaagggtgtttatatctggggggcgcagattgaaaactgggacggggcgacgccttacattcccacatcaggcgcaacggtcaccagaccggacgaagtgtgcaccgtacgcaccgaccttgattttatggctgttgatcgcggcgctatctttgctgtttacaacatgcccgccagcctgcaggcgattagtggtgtctataacgccgggcaggcaattgtctgcctggataatgattcgttggctgaatacgtcagttttctgaaccgccgcatcagtaacagtatcaccaaccagaatctggcggccgccgcgaaaattgtcggcagttctgaagttacggttgaggtaaaacgtctcggccaggtccgaaacggccatcagtcctttatcagttcatttatcaacggcgacatgcgtgtatttgacggcatcaataaatacagcggtgcgccgctggtatcaactcagctgaatcggttaatggttgggcgggccagaacgacacctgcagcagtttcaaatgcatacctgaaacgcatggtttactaccccgtaactttgactgatgcggatatggcttcacaatttaatgcgctttcctaa

SEQ ID NO: 198512 - DNA, 2163 bp, Klebsiella oxytoca
atgtcaaatttgcaggaaactccagaatgggtcgagtttatttatcagctcacggaagagacgccggtactgggtaaacaggaaggagttccgggcgatggtccatcaaacctgcaggcgtttcagcttgcctgcagaacactgtatttaaaattacaacaggcttacctggaaaatcagcttgatgcttataacggtattataaaatcaggagagcttccgtttaccaatattcctgctgcacaggatgctattaatgccggtaagatcccggagggttcccttttctccgtgcgttcggcaaatcctgattactgggttgatgaatataccaatcaggggggagcgcccgttgcaacgggtaagcatctgatttctgaagcggctatcgctgccagaataaacattgacgaactcgatgagaatctgtctaaatctctgtctttggatggttttacaaccgaaattgaaactgagtcgggagaaaaatatttttccggtatggatggaagcctgcaggagctggcctctcgaagtgggaaagacaataccgaaaacctgcattctgagacggataaaaacgggttgctgctcgttatcaccgatgctgaagggaaaatccgcatccctcttactgattttccgctgcaggatctgctggcacaggtgcaacctgtcccggggccgtttctcaacacgctgagctccgctgataaggcggcatatggctatattgatgagctgggcggtcttaatctcccgggtcttccgacatccgttaacaatatgctgaacagcctgtcccgccgcgtgcagcagcaggcagatggccggtttctcaccagtatcaaggactatggatgggacccgagcagccaggaagatgcacgacaggtgattcagcgcgcgattagagacatggcccgcaatccgtatggcggggttatttatctgccaccaggtgtataccggctgagttccttcctcacgccagcgccgaacgtatcgattatcggagccggtaccggtaaaacgttactgatgccgtatggctcgtattcagccctgcagttcaccacctctccggcgaacgcagtcccggagttgacggattttgtgtactccgattttgaagtggattgtcaggaccaggtattgcctgatgaagggtatctccccaggactaagggactgtattttaacttctaccgccgcggccacctgcaccgcctgcgcgtgcgaaactctggcgcgactgggattggcatcgactttgcgcgcgattccgccattactgaatgcgtggtggagaatttcgggcgtctggcaccatccgacaacgataaccccgccggtgcatccggtcttgggttaggggccgggggaacacagagtgagccgctgtatgttgctggtaacttctgccgcaacgggaagaacttcggcatcttccttgagaaacagcacggaacaaatgcgccttacagctctgaacacacgatagtcaccggcaacacatgtacaggaaataatgctggcctgggtgattgtggtgttgatggcatgatcgctaccaataacaacttctcagaaaataattatggcgtgattatcagtccgggaactgtgctggcatattccggttcgcgcgggcgtctgcagtgcaatattatcgccaaaaatgctaaacatggcgtctattacaacagcacgactgagcagcgagacggcgaataccagattgacagcaataccatccgtgataatggcgaagatggaattaacctcaaagcgccaggccaggaagtccgcagcatgtttatccaggggaatgacgtttatcgaaacggacggcatggcctgaacctggaagacgggacggctatcaatatggacgtggttaataaccgcttctggaataacggcctgaccgctgccgggaacggtgttaaccttgcatcagatgtcatattgagttcgttcagcgccaataaaattcgcgacatccagtctacgcctactcagcaatatcctgtttatgccagcggtacgcttaccgatgtcgatatttcatttaaccactgcgtgggtaacgcgcagaacacattaaatctgaccggcacgcaaacccgcgtcaccactctgaacaatccggggatttga

SEQ ID NO: 198513 - DNA, 210 bp, Klebsiella oxytoca
atgattattggcgcactgattttaaccattatcggccttttactcgctatcatggctgggtctttatcggcaaataatctaagccctgtaccagccatgctgggagtcatcggttcagttattgttattgcagcacttgccctggctcatggtccgggcaaggtcaatgccccggattcgccccttgttactcaggaggcaggtaaatga

SEQ ID NO: 198514 - DNA, 129 bp, Klebsiella oxytoca
atggctactagcaaactgatacagggcgatacgctgaccgaaaccagcaacgccgcagacggctttaacccagcgaaagaagtcagcgcatacagcttgattagaagtgagataaatgaacagggataa

SEQ ID NO: 198515 - DNA, 234 bp, Klebsiella oxytoca
gtggcgcagctcatcgttgctcacgcctttaccttcaacggaagtgccaggcagattgcgctgatcgtcggcgacggcctcaaggcggataatttcaacttcaagcgcatcagcctgagcgcggagttcgtcgaactgcttgccctcttcatcgttcaggcttcgcttttcgctgtcggctttatccagcatggaacgcatctgggttttgagtgcggctttctgctggcgtaa

SEQ ID NO: 198516 - DNA, 741 bp, Klebsiella oxytoca
atgaacataaacaacaataaggacagaataaaagaaatagagagtcttggtgtaagcggggaggaaactccccttactccacctgatggtattataggagcgattaacgagttaagggaagaagagtgttctcttcccgatcctttgttcgtcggcaagctggttaaccctctcattatgaaagataagccaggttatgctaaaaaaatgaaggagagaaagcatattacttttaaacccaatgaagacggtttagatttgcttgaatgctattataatgatttttatatagagctttacactcgtgattataatgaacatttacaggcaatccctaaaaaaaatttagaaaagcttgcaagagtcgataagaaattccaaacctatcttgaagaaactgaatacacattttacgaaaacatttccgagttgtttgatttattcggtgatacgatttatgaatggggaatggctacaccttcagtagatagcagtgttatattcacaaaagcagttttaacagaagccgtattaagaaatatgcctgtctatcctgatttaatgaatgaacaacaaagaagaattttaagaaagttgtttatcgacattaagcatgaatacaaaatggtttaccattcagagatgacaaaagaagtaaggactacacactatatttgtggtaaaaattattatgagtctatgagtaaaaataaaagctatttattatcatcgggttattga

SEQ ID NO: 198517 - DNA, 1914 bp, Klebsiella oxytoca
atggcaaaagttaatgcaaaaggtttaaaaacatataaccatcagggttttttaacttcaaactcaggagcaaacagcagtgatagtcctctatacccaacacaagaagatgcttattatatcgatgcctggtcaggtatagagattacagatccaaatcctgcaaaacttgttaaagatatagaggaaggtgtatacgataaagttaatttccctacaaaaagatttcttaacgatttaaaagtgaaagatcttgcaggtggtttaaagaaatttaataagcttcacgagcttgatgaacaaccggaaggtgagcactttgtcttttatcttgatggtgttcccaagcacctacaatcaaaaaccagggaaattatcataagagaaatctctcaccccgattttatattcagaaaagaacagaatagtggcagaaaaccacagattatagtcaataaaggtctgcaaagtgtgcttgcctgggggattcaccgcaaccagacagatcatttgggaaatgtaattccagaccatttccacctcttccgttctgctcattgtatcactgataagaattatggtgtttcaacgaatgataaaggagagtttattccatttataaatgcagcaaatcctaataaaagaattgtcaatgctgctttattactaaaagataacaaagtaagaacgattgttgaaaaccagataaatatggctttggcagcggctgggatagaagcaacggtaacccttggttctttacaagaggaaattggtgcgacagatgaaattaaatcagaaaaattaaaaaaagaagcagaagaaaataataagcctcttgctgatgtagcacaagaacatatcaatgacgaatctcttgatgatgaagaaatttccgactctttaatgcaacatggaaatctttcagaacaatccatagaaaaacttgagtctataattaataaaacagcatttgacagtaatgaacaagtaagaagaaaacaggctcagataaaagagctaatggctgaacttgtcgaaagagaacaggaattacaagctatcaataaaggtatcctttatgaagctaaatacattcatgctaaaaatcttttaaatgaaacttcaagaaagcttgaatcagtaaataaagagcttgaagagtctaataaactgaatgacgagttcaatgaaaaaatcattgaaaacacaaataccatctctaacttaaatgacgaattagcaagagaaagaaaatataacgaagaacaggaattacaacttaatcagttagaaacagagcttgaaaccgaaagaaatataaatgcgaaaaactcagcacttattacaacacttacagacaaaaatactgttttaaccgctaatctggaagttgagcaagagaagacagcagaactgacagcggaaaatgcagaactcaaagagaagcataaagttgagatcgctactctccgtagtgagttcgctcagaaactggttaaataccgtaaaaactttgtggctcgtgttagaaacaaagtggcaacggctgttgaacatgcaattcaggcatttaaagataaccaattgccatcattgcttaaagatgcaacaaccaaagcagtgagtgaatataaattaaaagaattacctggcaagcttaaaaaggtaagagaagaagaagctacaaaatcagcaaaagaaattaaagcattaaccaacgatgttaataccttaacggctgataaagatacattgcagaaagattttgacgaattgttcaatgccagcaaagaaaaagcaacggaaatgaataatgaaattgctcgtcttaaagaaattcttaaaagcaatggaataaaccctgatggtgataactcaccaaaaaagcctaaaaatgacaataagatataa

SEQ ID NO: 198518 - DNA, 336 bp, Klebsiella oxytoca
atgagcaagaaaaaaaactcatggcttgatgatatgcagtcgtttgaaaagattgccgttgaaacagctttcaatgccggtgactcttactggtcgcacgaatattttgcacatagtaataatgctgctcatgtcgtcactaatgtaaaaataagagcaaaagaagacgaaacccgtttaaccaatattcgtattcctgcacaactggaagctgttcttgcacagatcgcccctggtgttcctattgctacggctttattagtgttggcagatttaaaagccagcgagcttgttaaggaaaataaagccgtgaaaatatcaaataaaggtgagtga

SEQ ID NO: 198519 - DNA, 627 bp, Klebsiella oxytoca
atgattccgtattccgtctggaactataagggaggtgtaggcaagagccatactagtctaactctctccgggtatctggccaatcagggtaagcgtgtggcactggttgattatgacccacaaaacggggctatgatctgttcagacattgccaaagcaaatggaagccctttaccctttttggttgttaaaagcctgagtgaaataaaccgcgacgagatagatgctgttgtgttcgatcactccccaggtgttaaccctggcggtcagcttgcccctatcgttatcattccgactatcctcgatgcagcaagccattcaatcactatcaagagtgttcacgaactggacggaacggacaagctctgtatcgtcattcctaatcgtgtagaactgcaaaacaaagagcataaagacctgctcgaaatgcagtttgaaaatgtcccctacatgaaaaagcgagtctcttactctcgtgcctacggcatgggtgtaactatctattcggaaggtacaggcttaccgaacctggggatcactcgccaggagttcgacggtgtagctaaatacattcataaacgaatcgaaaaacacattgctgatatgaaagcaaaagagaaggcataa

SEQ ID NO: 198520 - DNA, 1128 bp, Klebsiella oxytoca
atgggattcggaactaacgaagctttaaatgcagaaaaagaacaaaacacagaacacttcaacactcaacagctcgaaaaaacttatgctgatgccgttaacaatgtcattaagctaagaagagatctgaaaggatatgaagagacaaacaatcaggaagcgattgaccagactaacgaacagatagcagagcttaaaaacatacagaacacgacttttaatgctctcggctatgttccacagtttgacgacctggaaaacgaagaagaagcaatccccgacgaactgaaagtgtttgctcaacagaaagacaataaaagtttaaccgctgccgttgtatcaccggcaaatgacgaacccgccacacccgcaccagtccatagcagtgcagaaccaacagaagaagaactgttccccgtagagccgaaggacaacggttttactgataaagcaccagtagcagctatgaccgtggcgaacgacgatccagagcctgccgttaaggacactactgaacaggatattcttgaactggaagaacttcacaatgcaaacaagggtcagtctttcaattcaaaaacccgcttcctggacgacgaagattaccacaggctttttgataatgtaggtcgtatagctaaatcactcgacgggcaaaagagaatagtttacttcaaagacaatacacagttacttgaaaaaaccgattctattgttgtcatggcaagaaatcagatcgacagtgcaagaagactcgttcttgtcgctaaggaaaaaggctggaatacggttactttccagggaaattcttcttttcttgaaaatgcttacttacaggctgttcagaacggtgtcggggttaagccattaagtgaagaacaaagacagttttataaagaagttcacgacaggtttaaacttgatgaattaaatgttccgtttttaggaaaaaaatctcttaaagaacttgaagacgaaaaaaaggagagggagttagcgaaagtcagtaatgccgaacccgaaaaaaagcctgacattaaacaacagcaaaaagaacctgaaacacctaaaccagaaaacaaacccgatgaaatcaagaaaaaaagaagttttggtcgtagtagataa

SEQ ID NO: 198521 - DNA, 306 bp, Klebsiella oxytoca
atgaatactgaaaaatatcaaaccattgaagaaaagatcctggctatctattctggaaaagctgaaaaattagctcaaagaaaaagtgctgttcttaaagaactgattacggctaacagtgcgaaagctattgaagaacttaccagagaaagaatggttatcgacaaaaggctttttgtctgtaaaaacatactcaacagtattcgtaatgcttcatctaagaagaatgaaaacttttctaattatgttgtcgttctttctaccgaagcagcaagattaaatatgctgacaccgtacaccgtttaa

SEQ ID NO: 198522 - DNA, 345 bp, Klebsiella oxytoca
atggagtatacaataaatttctttcataaccttgacgatatattaaaaggtactcatttaaggcttatctttgtggctatcattggatttgctatttttatgaaaggtatcagacatgttattaatgattttccagtgctggtaagctattacaaacgagcaaaacgagaaggatatacagatttccagttttttattaataatgctcacaacataggaatgtatcttttagttttgtttgccactcttttaagtgcctatgcaatttatttcagtgcagaaagaataaacacaattcaggaattgcaggaaaacactgttattaccacacccaaaaataaataa

SEQ ID NO: 198523 - DNA, 1152 bp, Klebsiella oxytoca
atggcattttacaagaaaagaacttccagtgatcccggaatgagtaaagaagataaaatgaacttattcatggaaacacgaaaagcagaaattatagaatctcttaaccaattacccgacgataaacctatctggcaatcccccgtttttacaaccaaatacataaaccctgtgagtggtgctaaatataatattgaaaactccgttttgctgttaggtcaaatgagagaacgagctttaaagaatccagacgaaaaagaaaaacttcccttctttatgacttttaaccaggctaaaaattcgggtctaatcgttccgaaaggaacaaagtcttttgcgatattaaaaagattcgggaagaagtacgaagtaactaagctggacgaagcgacaggacaggaagagatagaagaaagattcaggagagcagcttcaatagatttcgtcttcaacatttcagatctggaaggagagctatcagcgaagctacaacgaaacatgagtatggggtttagtaaagccaccaatgaagaggcaaaagtcattctggaagcactggaagcgacctcaccggtgaagatcaccagggtaaccgactttaacagttcgtcaggctcttactatgtgccgtcagcggagtttatcaaccttcccccttcttctctgttcaggaatgtcatagaagagatctccaccctggcacacgagatagcccactcctgggggcatagcagccgtttgaacagggaaaccctgaatacatacagccaggacaacaaagcacgagctgaagaggaactggtagcgaatgtggcaagccaggcagtcgttaatcattttggtctggaactggacgacaagagacagtttgagtcatatgaaaagaaccatgacacttatgattttggctgggcgaagcttcttaaagacaacccggacagcataacaacggctatccagaatgcagataaaacagcgggtaaaatgattgcagaagttgaattatggttatcgaataaattgaaagataatccagatcttgcagtatcggaatttattaaagacagaataaataaaaaacaggaaaaggaagaaacaccagaagaaaaccccactcctgaaatctccaccaggagaaaaccttctatctga

SEQ ID NO: 198524 - DNA, 606 bp, Klebsiella oxytoca; identical to SEQ ID NO: 159100

SEQ ID NO: 198525 - DNA, 549 bp, Klebsiella oxytoca
atggcattaagaatccgagaaaaaaaagaaagagtaaatttattcctggaatactttgattgcacttatgaagtaaaaccacgaaccccatttaatcagcctgatgtgcttacaatgaatttttactatgccttaaagcttttctgtaaaaattacaatgaaatctatgatgccccgcatcactggaaagataaaataccagctttattcactggatataaaatgctttttgaaagtaaagagttaaaagtgtcttttatttgtggaacaatggcaaaaaaggcaagaataagggaaaagtatcatgtatctcatgctgttactttccgtgttccttatcactggaatggttcaagagaacccgtaggcattgccacctatcacctggcgattgataaaactttaaacgacgaacaaatagaacaagaattttacaaactactcactctttttgaatactcattaaagtatcatcaagggaaagtacccgtctttaaaatagatttgaacaatccagaagtgataagaccgaaatacgaaaaagaataa

SEQ ID NO: 198526 - DNA, 354 bp, Klebsiella oxytoca
atgaatttactacacttcattgaaaccaaagtctttcagagagtgatcgatggattgctttcacccgacgaactccgggagtttcaggaagtgttaaggcaagatcctaccgctggcgataccatatcaggtacgggcggttgccgtaagattcgctgggctttgcctggtatgggtaagagtggtggtatcagggtcatatactactatctgacagcagataacgaagtattccttcttatagcttatcccaagaacgagaaagacaatctcactaatgctgaaaagaaccagttgaagaaagccgtagaaggtatagagcaagcctcccaggaggcaagggggaagaaatga

SEQ ID NO: 198527 - DNA, 291 bp, Klebsiella oxytoca
atgagaaaagaactctttgacgacctgatcgagagtgttaacgaagccgtagccatcaaacggggtcttgtagccccagctcgtgttacgacttttgagatgcccgatgtgaaagctatccgcacgaaagcgaagctcaaacaaaatgagtttgcccaggtagtgggtgtctccccttctctggtgcaagcctgggaacagcaaaagagaacacccaccggcagcagtcttaaactgttgcgggtcattgaaaagcatcctgacatgcttaacctgttcagaacagcataa

SEQ ID NO: 198528 - DNA, 711 bp, Klebsiella oxytoca
ttgaaaaatttaatccgtagaattgaaaaatattttaatcaggaaatggatttcaatgatatttcatcgactactattgacggaaacgaaaatcttttatctggtgctattactttcttaatgcacaaaaacattgatagtgaagtctcattatctttacttcaatatttaatcgatcatggtgttaatgttaatcataaaattgaagagtctaacagcccattaataaaagttttcctgtatcaatggaagaacagcgagtttaaagcaaaggtcattgaaatacttttatcaggtggagcagaccagaacatacccggtcacaaccttcttgaatatgcaacggcgaaagaatgtaagctcttactggcttatggtgcagatctggaaagaatcgctgataatcgctcacagacggctatctttgattgttattgtctcgataagctgtctatgctgattgattcaggggcaaacattaatcactcaaacaaaaagggtaaaacctgcctggcttgctattacaagaaaagcgaatatgtaagattcttactggataatggtataaatgcagccagcttcctgaatgatagtgattatacggaagaacaaaagaaaactgttaatgcaataattgctcaaaaagagagtgagcagttaaaaacagtatttggaaataatcttgaatcaaaagggatgattaggatatga

SEQ ID NO: 198529 - DNA, 651 bp, Klebsiella oxytoca
atgactagttttctaaaattgggtattttcgagcgagaagccaaagccccggaactaaatattaaacaacttgcactacttatgtgtggggtagatccgacagttaaaactgctgatatccctgaggcaaaagttgaagcttacaatatatactatcgacaactgagtagatggttatcagcatctaaattatttcgaggtggaaactcaacagcatatcccgcagactatatgtttgctctggcatatcctcttattgatgaagatattacaccacaacccataaaagacagatgccttgcggcggtggctataattgctaatcaaaacaaagggaaagagcatctttatgctatgggaggggatgagcttttacaggtcggaattgcattgaaaagcagcaaacgcggcttgcatcgtaaagaagatgaaaaggaatataatgataaattaatggggatgctggtcaagcttatagcacataagataggccattcgtttggcacctctaaaaaaccaagcatctcggctattttaaacgaactatataaattagctgatgaggaaggtatatctaaaactggattatccaaatcagcaatatatgagaaaattcgtaaggcattaaattctatttattatacggaatga

SEQ ID NO: 198530 - DNA, 285 bp, Klebsiella oxytoca
atgcaaaatataacctttaccccgccaaatcctgaacaacgccgcacccttttagaagagtacggctttaagtttgatcgccgaatccgtgaagatgaatgcagcgagatcaccagtctttcccgttccagccgctggaagatggaacagcaggggcgcttccctccgcgctgtcactttggccgcaatagctgtgcctggcttctttcggatgtgctctggtgggttcgtaatccgccagcagtagagaacgtcaataacccatacagccgtaaatctgcttaa

SEQ ID NO: 198531 - DNA, 693 bp, Klebsiella oxytoca
atgaaaaagattaatgccctccacgggcagggattcgctcaccctgtagccagccagcacgatatttcagcgaaccgtaaacaggttatttccggtgactggtcgcccattaatcgcggtgaatttacgcttgccgatctggggttgcgccacaacggtaacgggctggtgtggctgcgttccggcgtgtccgtgcatgaggcagaccatgatgcagggataagcggcaaggacaagaccaaaggaagggttaacggccttccttttgaatttgtcggccagtggcaggaatacccgactaaacgcagctttgccgtttcagtatctacggaactacggcgccagtattacccggacgatgccgcattcagtaaggcaatgcgtgaggctggttatgttccggtgcgcactcgcaaactgaccggaaaggatgctcgtttttggctgtaccgtgtaacgggcaatgataagggggttgtcgcagcagaatccgcgccacacaaggcttgcgcgccagttgtccagaccatatctaagcctcatccgtggtttaagcgtgtggcactcgatggtaaatggcagtacgtctacgcagatcacatccgctttctgacgaaaaagcgtcatcgcgtcgatggtgttcgggttcaggggtataccgctggcgggctgaaagtggaggctattgtatga

SEQ ID NO: 198532 - DNA, 219 bp, Klebsiella oxytoca
atgagacaggttccttttgaagtcctgatgcacgctgaaaatgccctttctgaaagcgaaggagcctatgaggttctcagcatgtggctagacagtattcctgaaagcgaggagttccacggtgaagcgtgcaaggtaagcgcaatcatgtcgctgctgcataaatctatcggcgagctggtgaaagcgcgggaggcttacagtgaaaaacgcgcctaa

SEQ ID NO: 198533 - DNA, 234 bp, Klebsiella oxytoca
gtggcgcagctcatcgttgcttacgcctttaccttcaacggaagtacccggcagattgcgctgatcgtcggcgacggcttcaaggcgggtaatttcaacttcaagcgcatcagcctgggcgcggagttcgtcgaactgcttgccctcttcatcgttcaggctacgcttttcgctgtcggctttatccagcatggaacgcatctggattttgagtgcggctttctgctggcgtaa

SEQ ID NO: 198534 - DNA, 423 bp, Klebsiella oxytoca
atggacaatgaagataaatacaatatatgtgaagaagagttagaggaaatgaacttctataagaataaacattaccattccaaacaaaatggcgatattgtttccagaagtaaggaatttgatgattttttaaatactgttgaaacaaaaatcagctttttaccaaaatacatatatgaagatactaatattcgttcatataatataacaccagtatactatcgcaatattaacattgaaatccatgacattatcaatattattaattttaatggcggcattacaaaggatttaactactgatgcatgggaaagtgaacatttaagcagtgataaatttgaaaaaaggatcgcttcaaaacaacagcagatattagagatattaatcccagttacaggcaataagaaaatgagaagaatatag

SEQ ID NO: 198535 - DNA, 192 bp, Klebsiella oxytoca; identical to SEQ ID NO: 159151

SEQ ID NO: 198536 - DNA, 192 bp, Klebsiella oxytoca; identical to SEQ ID NO: 159151

SEQ ID NO: 198537 - DNA, 423 bp, Klebsiella oxytoca; identical to SEQ ID NO: 198534

SEQ ID NO: 198538 - DNA, 2292 bp, Klebsiella oxytoca
atgtacgatccttcttcagggaatcttgttgattctgtatcagaggaaactaaacaggaagaagaacaacttcaaattgaagaaaataatacttataacgaatctgaatatgaagaagagtatcaggaagacgacgagtacacggaagaagaagacgagcagaacgacgaacaccaggcttcaacagtaattggggaagcacaggaagctgattcagaagatccgtctaacaaactggacggactacctgcccctatccgcagaaagaaaaaagaaaaagaaataactctctatgaaagttttgtagggaaaattactacacatggtatgtatcatacttcaagaaaatcagttaaaggaaagattgttgttaaagatattcttgttcataacttcccgattttcccggtagaaattattacggctcttgatggcacaattgacgaatcagtaacttatattaaatttgttttcaagagtatcgatggcgaatttaaagaggttattattccttctggtgctgccaacgattttaaagaagttaaaaaagcaggtttccttgctccttctcctttaaaccattcaaaagtattagctcttattaacgatgtaatttcaaatggttcattaaataaaaagacgggttattctcagtgtggctggacaagtgatttaatgcaccatatcagaccagataatgatctttatgtgggtaaaaaaataaaagtcacagaagtgaagggaagtgctgatttatatttttcaatgctttctgaatttgttttaaattgccctcaaatggcttttggtcttgcatttgcagccgctggatatatgcgtggatatattaccgtgacatcattaactccattctatatcttgtatggtaaagctcacatgggtaaatctaaaacttgtcagcttatagcaagcttacaaggaaacccaatgaaagggaaaggtaataatatcgactggaacactactatgattgggtttcataaatttcttgcaaacaataatcatggtgttttagttgttgatgaattagataacctttttcttaaaaataatattactcatgctgcaacattgattatggatattacaaacggtggtggtcgtgcttactctgaccaatatcgaaatacccatcagggtgaaagctggaataactctgtcattgcctctactaaccttcgtattgaagatgtggcaggtggaacaatgaaagaacaagctttgttcactcgtttaatgcaaatcgatgtcgaagattctgttctccataactacactggcggtcaatacagacttgaacaactaagccagatcatgagtgagaactacggtcatttctatccaaaagcgattgagaaaattaaagccaaaggtaaagaatataaagcaaggcttgacgaactgttaaaagaactgaccactgacattaaacttgtagatttgcagaacgaacctcgttcactggaaatgctggctcttgctcaggttggtgctgaactggtcggtgatgtattaggtgaaaaagaaggtgcagcttgtcaggcagccgttgacattatcattgaacgattcaagagatcggaagacgaacttatatccaaaaagcaaaatgaagatgctaacacttatgaaatgttaaaaagtttcataacggataatgctcaaagattccgttgggaaaattatgcttattgccagggcaatcgcttagatatgaaaaaatctcagattgatcaggcgattgaattttccagtaatgcgacaaaagcaagtaccggtgcattaggtgttgttgtgcaggaaacggttatggatcatgccctggattacaacgggtatgtgttacttaatccgagtgcatttgatagccttgctcgttatgggatttcaaaagataagatgatttcagcagccaaaaatcttggaatgttgagagagcagggcggtaagaacactaaaaaacttagtgacaagtataaagcaatgctatctggtgttagtcgtgcttaccaaattgagcttaaagatataagcgatatcctggaatttgaagtaccagaagttgcaccagaagaaaatctgaaggaaatcaccccggtgaaagagccagatttcacgacagagcacctttcagagaacgagaacgggcaactttcccctgaaattgaacaacagttagacaaaatcatggaagactatgacaaattcggctttacggattgggataacataggtgcttctatacaaaataagaccaacaaaggagagtga

SEQ ID NO: 198539 - DNA, 261 bp, Klebsiella oxytoca
atgaaagacagatacacccttaaccagggcagaaatgcccttatagacagtgaagcagatcagccagtcaggatttttttcaccaacaatgtttatgtgtgcaagactccaacaggcatgtttaaggagcgaagcccagaacaactggcaaggctgcttaaccgaacggctaaccagcaaaaggtatcggcgggttttaagttaggaagacccagaacggcagaggaactatcgaagctgttagagaagaaccagaaataa

SEQ ID NO: 198540 - DNA, 252 bp, Klebsiella oxytoca
atgactacttcacacgatttatcaactatcttaatggcatggggtgtattgtttttatgtgtatggcttactaagcattatacccgtttagaacttagtaatattctgacttctggaaaagtttctatccaatatgttgttgccaaccttgcttatcgtgctggcttcattgctttggttgttgcttgcctggcttcgttagcggtgtcaatcgggttttctgtcgggtatttcggttcttattacccttaa

SEQ ID NO: 198541 - DNA, 2292 bp, Klebsiella oxytoca
atgagtacaaaaaacataacgaggtatttaggaagtatattcttacttctttcactaacaataacacaaaatgcttatgcagaaggatttgatctctttaaaccaaatgatgataactggttaataaagaatatattcattcctttgttttatcccgatacttcccctttttcccccatatctggtgtcttccttgcgggtatacttgcttttggtggtgttcttgctggttataccatgcttgccggcacactcaacacggctcacgatggggagatgttaggtaagaaatggtcttctctctggttgcctgtgagaacgactcttggtgtctctatgattatgcctatcaaaggcgggttctgtgcaatacagattatcgtcgtatggcttgcagtgcagggagtagggcttgcagatcagacctggaatgcttttgttgaaaacccattaaaaggttctgttttgcctcaacctgttattgacagacagatcagcacactttaccaaagtgctgtaagtggatatgcctgtatagcagctattaagaaagaccagggcgaaaatgaagctgacggaaaaagtgctggtattattgataaattattaaacataacaaaagaagaatggaatccaggagttacaacctcaacaaccagcggcactaacaatggtaaaaaacttgttatcgagtttggtaataaaaatagagaggcttcaagaaatgcctgtggttctataatttatgatatgtatgctacttccgataaagttatagcaaatgcaccccaggcagcacttgaccttgttgatcttaacaaaattcaaagaagcttgattcctgttcatgtaacagcattaagtgctttattagcaagagcaagcgatgtaggaaacagaattgctaatgatgatgattctataaccgctgattacatagctaacgatatgaaagttgcaggtgaagcctataaagtcgctattgctcttgcagctaatacggcttaccaggattcaatttcaaaagatactgttgaatcattgaaaaaagacgggttcgtatcagcaggagcatggtttatcagaatcgcaatggctcaaagtgctgttaacaatgtagtaaataatgttcctattggtacaggtgttacaggtagtatgttggaagaatcaacaagctggtttggtggttctgataaaacagattatccttctgttgataaaatcaagaaaaaggtaaaaacatactttgcaaaagcaaatatgttgaataataacagtgcaagtggtgccggtgcaggaacagaaggtgatcaaagtcttttagataaattaatggctgttttctctccttctgagcttgctgctcttttcactgcacaggcatttactgcaaatccagttgtagcaattatcaacattggattatctttaattaattttgctcttgtaacatatggagtcatgacaactgttgttttaggtattggtaccgctgctaatgttatacctggtggggttatttcagctacgacattggttacaccattggttacaggactattatttgcactgttctgggcaggaatcagaatggcttatgttattgcatggaaacctttcatagtctggttcggtgcgattataggttggttggtgttagtagtcgaatctatgtttgcagccccattatggatggttgctcaccttgcaccagatcaagacggtgtagtgggtaaaatggggcaaggatacatgttgatactgtctcttatcctccgtcctgttcttatggttatcgggttcgtagtagctctatcactcatgaccccatgcttaatgttgataaatgctttcattgcttttactggcgatacgataggagtcggtgcagccgctttcataggtaaaatcgttatgattacgatctatctaaaagttgtagaagaaactatgaacaagctctttggcttaatccactctataccagacagtattctacaatggattggtggtggtttatctcgctcaatgggggattatgcaaatggtatcgaaggtggttcttctcacacgactgaaaaaatcggtggcggtagtaaacaagctgttatgagtatgagtagtgcatctacaagaggagtacaaagggctcaggagcttagggaaagaaacgaagaaaataccatgaatgcagctaacggacatgatggaggtggttctggaaatgataaatcttctgataatgcaccaaaaacaagatcagcaggtaatacagatacaccagaataa

SEQ ID NO: 198542 - DNA, 1395 bp, Klebsiella oxytoca
gtgtctggaaatatagggtcaaatacagaatccgaatcgctgtccgaatccgagtcactgtcagagtccgaatcgctgtcagagtcggaatcgctgtcagaatccgaatcgctgtcagagtccgaatcgctgtcagagtccgagtcactgtcggaatccgaatcgctgtctgaatcggaatcgctgtctgaatccgagtcgctgtcggagtccgagtcgctgtcagagtccgaatcgctgtctgagtccgaatcgctgtccgaatccgagtcgctgtccgaatcggaatcgctgtcggaatccgagtcgctgtcagagtcagagtcgctgtccgaatccgagtcactatcagaatcggaatcgctgtcagagtcagaatcgctgtcggagtccgaatcgctgtcagaatcggaatcgctgtcggagtccgaatcgctgtcagaatccgaatcgctgtcagaatccgagtcgctgtcagagtcggaatcgctgtcggagtcggaatcgctgtcggagtccgaatcgctgtcggaatcggagtcgctatccgaatccgaatcgctgtcagaatccgagtcgctgtcagagtcagaatcgctgtcggagtccgaatcgctgtcagaatccgagtcgctgtcagagtcggaatcgctgtcagagtcggaatcgctgtcggagtcagaatcgctgtcagagtcagaatcgctgtcagagtcagaatcgctgtccgaatccgagtcactgtcagaatcggaatcgctgtcggaatccgagtcactgtcggagtcggaatcgctgtcagagtcggaatcgctgtccgaatccgagtcgctgtcagagtcagaatcgctgtcggaatcggaatcgctgtcagaatccgagtcgctgtcagagtcggaatcgctgtcggagtccgaatcgctgtcggaatcggagtcgctgtccgaatccgaatcgctgtcggagtcagagtcactgtcggaatcggaatcgctgtcggaatccgagtcgctgtcagagtccgagtcgctgtccgaatccgaatcactatcagaatcggaatcgctgtcagagtcagaatcactgtcagaatccgaatcgctgtcgctatccgaatcgctgtcgctatccgaatcggtgtcagaatccgagtcactgtctgaatccgaatcgctgtcagagtcagaatcgctgtcggaatccgagtcgctgtccgaatccgagtcactgtcagaatccgaatcgctgtcggagtccgtatcgctgtctgaatcggaatcgctgtcggaatcagaatcgctgtcgctatccgagtcgctgtcagcatccgagtcactatcggagtccgaatcactgtccgcatctgagtcagtttctgaaatcgaagagtgctga

SEQ ID NO: 198543 - DNA, 513 bp, Klebsiella oxytoca; identical to SEQ ID NO: 159124

SEQ ID NO: 198544 - DNA, 402 bp, Klebsiella oxytoca
atgacaaatttcagacgatacacactatataaaggaatggtaattattgataaagtagcgaccgggaaaacaaattttctaaatcgtattgttaaagaccatccagactcaattttaaacttagacagtgatttttattttgctggtaaatcttcctacttgtcagcaatcaatgaagcagaagagaaaggaaagtttattattatgtctggtagctatattggtgatacagaaaagagtgaacttattaataaaggctatctggtgttccattcaattactcaggcgatgttttactattcagaacatttaagccctgaatcaatcgcaaggaaagaacagcaagccattaaacaaataatgacgggtgaaagaatcacccgtaaaagaaacagactataa

SEQ ID NO: 198545 - DNA, 645 bp, Klebsiella oxytoca
atgggaagaaatatagaaagtaaatcatttacaagcatatggaaagaagtcaaaagctatacctgtactgtgaatgaaacagagacatttgaaatgttattattagtaatgaaaggtcgagggtttagatttaacaaacatgagagggttatattttcaacaagaatacaaatgagaagccagcaaataaatagatgtgacttacacaaaaaattctcctacaaatcagtagaagaaaaaatgaaaactgtgtttaggacattaaagcagattcatgataaaaacgaattggaaagaaatagactattaaacggaagggataaaatcattagccgtttcaacagaatcaaaacatttaacagtatctggaaggaattaatagaattagagatcactactgacgagatagatagttatgaatgtcttatttttatcatgaaagtcagagaaattaaaatacctaacactgcattagccgctatggaacttaccttttttgattcgttaaagatgaaaaaagcatacagggaactacattccattccatttgtaattgattccattaaaaaagaactaaatcacatatataacatacttacggataacattaaatatgacaaatttcagacgatacacactatataa

SEQ ID NO: 198546 - DNA, 444 bp, Klebsiella oxytoca
gtggaagccgataaggagataaaaagaatcgtatcaagtaatacttttatatatgaagaggtgacttgtaaacagtatcgcaataaaaagacgggtgagtacaagttaagtgtagatgcacaggaaaatctggacagaatgttatctgtatttaataacaccagagaaatttgcaaaataatgattcagtattttataagtcagacaaacagaactgatagcataaaagaagaattaaaatccgtttcgattgaaatcactgataaggtttttaataaggttaaagctgacgaccagactttaatacttatcactcacaatgaagttatgaagcagttaatcaaaatggattggtggaaagataatgaagctaaaagaatggaaattcttaaagaaatagaaatgagaaaagaacagttagggggtgtttatggcgaaatttaa

SEQ ID NO: 198547 - DNA, 594 bp, Klebsiella oxytoca
atggcgaaatttaatctcattggtaaaaatcccgaacaagcgaaaaaatatcttactttctggacaatcgttaatgcaggggaagaagaaagatatcaggaagctatgcagttatctcttgaaccaggattcactataaacaagacaaaaaccaatggcatgtttttcatggaagacatgatgatttcttgccgtaaagagttcttctctctgttcatggacacacaccgtcaaacggtcaaataccacttatcccgcagatcttacactatcccggaactggtcattgcaagatacatgggtagttataccaggcttgcaagtgatgaagaaaggatagaccacttaacagcaaacattgtctgttttctcgatgccatgttggccaccggcacacataagcgattacagcacctggacagctacgagaagcttatagcgaaggtggaagagtattacatgggggttatagccgatttgccgtctgtaaggctctatgaggctctcaaagcgaaagcggcaggtaatgagcaagcggagctgaaggaagtcatagcagcgacgacaggaacgacgaagaagagaagactgtaa

SEQ ID NO: 198548 - DNA, 864 bp, Klebsiella oxytoca
atgatattcgaagatgctgcatttgacagagcaattagtttcggtgcctgtatcaaagctattgaaaatgttcttgggaatgatattgatcaacaaattaagaaaatttattccaccagtgctgaaaagaaaacttaccctcttttaagagataaatcctgggatagtggctttccgaaagtgttggagatcgaggatataaatgttccaacacctggtaaaggaagaatacctgaagaggaacttaattcagaaaatataacgcataaagattattcaatacaaagcctaatcaaacctcgtctatgggatagaacacgctggcaaggagtaggcttcgctcaattaaaatcgtgttatccagggttatatctattatttaaacaccccgatataggtgaggatatttttaaagatcttatatcatcagtaggcttggtagatagtaaagccagattacgggtttgtattgtcaagggtatttcagttaaaaacccaactcattatagagtactgatatctgaaaatatgatgacaacgccattaactaaaagaatgacaatgatcagtagaattaatacgatgactcctgatagcaatgtcaatttagaaagatttcttgctgtgtatcaggcctgtggaaaattctatcttggatgtgatgcgatgttaaaaaatattgttcctgagcatccacaaagagacagtttagggatagaaatgagtacgttagatgttaggtgggcttgggaaattgggttaaatgatgttgattgtattggggttaatttaaaagaagatgacccctatattcctagtgatgtagctgagatcccattattgcaattgataaacagtaaataa

SEQ ID NO: 198549 - DNA, 1053 bp, Klebsiella oxytoca
gtggaaggccacctcaaaactgcggtcgcgccgggcgcggctgtggaggtgggttatcatcaccccctcccggaaggtgccggtgacctcttcgccgccgctcaccttcagttcctgaccgggggcgagcgtcgcgcagctgctctttccgctcagccgggtctggtcgttcaggtagcgctcgtgacgcaggcgggcataaaacgccccgctctccggcgccgggtcgcgcggatggctgtcgcacggcatcaggtagttatccccccagtggtacgcctcgccgtaagtggtgctgtcgccccggctgacatcgatgctgaggctcatctccgccggcgcgttgcggtagttatagtcccgggtgaacaccgactgcggcaccacgcgatgccggcttttcagcgcccacacggattccaacccgctgtcgtgctggccggaaggcggcacagacggcagaaccagcccctgcccgtcgtgccgctggtcgtcgtaaaactccaccacgtcgatgttcagccgggtgtcggcggtgaagcggaaccagatacccacctcactcagcaggcgggtgataaagcgcaggtcgtcctcgccgtactgcatcacctgctcgcgacgcgggtacgcctgcgccagcgtgaagataaagtcctccccgcgcatgccgtggcgggtgcgcaggatatgctccacgatatccggcaccgacatatcctggtaaatccggttctggtggctccgggagagcagcgccagacgcggctgcagggtcagggaataatgcgtttcgtcccgggaggcggaaaggcgcacaaacgccgtcaccacgccctgaatcgtgcgtaccggctgccggatttttaccccgaagccctggtcaaccggggcctgcagggtgaaggcggcatcctgcatcagcatctgctgcggcgtgagggttttgtcggcgctggtgaattcaatctggtagctgaacggttcgctcagggcctcatcgccttcaaaggccagcacgtccaggagggcgcggcagccgcgcaccgttaa

SEQ ID NO: 198550 - DNA, 618 bp, Klebsiella oxytoca
atgacacaggttgatgattttggcataccccatattgctaacttcggtaaggaagcactatcagaagtgataaagaacggattagatatgagtcaatttacaagagatgatcattttgattttaatcataaccatagattctctcgttttataaatacaagtgaaaaacttgaagtctttcttcagtctggattaataacacctgacaccataaaagactatgaatgttttgaacatcacaaactttataacaaacctgatttaaatctaactgataagggattcgaactgctttttaaatgctatgacaccatatcattaaacaccgaaatgatgagttcatatagtatattttcaggggaaaccagaactaacccggcagtatttatattaacagacaatgataaacatttagatcatttgtttaaacgatatatagaagtgagtccagataaaattgaagctgttaacttcataaaagacctgttccagaaatcagaatctcacgatttgaacagtgggaactatcctaatacagttacgacaatagaagataatgaaatacagaatgtattcaaacaatcacaaccaaaaaccattaccagaagacgaatgtag

SEQ ID NO: 198551 - DNA, 207 bp, Klebsiella oxytoca
atgcctgatgctgatgccggagaagcgttcctcgcggttggcgacttcaagcgcggttacttcatcgtggatcacactactggtgtgcgtacccgccctgacaacatcaccgagccgggcttctataaggttcacaccgataaatatctgggcggtggcgtggtggactccaacgcgatcaagattctggagcttgcaggttcctga

SEQ ID NO: 198552 - DNA, 153 bp, Klebsiella oxytoca
atgaatgagaaagacgtagtgaatctgtatcagtcgctggcccgatgccgtgatggcttcatgcagacccgcaccagacgcgatgagcgccagcctgtgcagcgcatgagtgagcgtgaccgggagttgcgggaatgcttccgcaaccgctga

SEQ ID NO: 198553 - DNA, 531 bp, Klebsiella oxytoca
atgcaggaaatagttaaagcagtgctgctgttatgttttttactgctgggctgtgatccggcagaaaaagaagcaccgcgcggcagcgggaagaccagctacgtggcggctaatctgctgggctataaccatatggcaggcacgaatatcaactggttctccgtcaacggctatcgggggcacgccggggggtttacctgctgcatatcgctgccggaaaaatggcggcccaatatgcaggtggcagtggagtgggaggtggatcctgacccgtttcccaaaaatatgcccccaatgggaacaaaagaatttcgtgattatgcgaaagatcatgaagcaaactatcgccattataaagcggtggccactattcccgaatatgaagattcctgcggcctgcaggtgcatttcttgccctgtcagcagattaaagtaacggccacctgccacgggccgactcatcctgaccacccgattaaagaacctttcgatctgccggagcctgcccagtgcccgccagaaacgccatga

SEQ ID NO: 198554 - DNA, 378 bp, Klebsiella oxytoca; identical to SEQ ID NO: 101384

SEQ ID NO: 198555 - DNA, 1377 bp, Klebsiella oxytoca; identical to SEQ ID NO: 177934

SEQ ID NO: 198556 - DNA, 183 bp, Klebsiella oxytoca; identical to SEQ ID NO: 101388

SEQ ID NO: 198557 - DNA, 1377 bp, Klebsiella oxytoca; identical to SEQ ID NO: 177934

SEQ ID NO: 198558 - DNA, 267 bp, Klebsiella oxytoca
atgggccgcacgctgggcgaactgcgacaaaccatgacggttggcgaattcagaatgtgggctgaattcgaccgtatcagcccgatcggtgatatccgtggcgatattctcaatgcccagctggtttcagcgatgtacggggcgcagggcggtaaagtcaccatcgaagatgctcaactcaagtggagcacagaagaggatgaggtaatcgatagtggcgatccatttgccggattagaggccgctttgctcgcagcatcggaataa

SEQ ID NO: 198559 - DNA, 540 bp, Klebsiella oxytoca
atggcgtcgttcggcggtggggctggtggaatgttcgggagtcttcttggcggaggtgggggaggtggcagcaccgggacggccattcagagcgctggcgctaatttttcgtttaatgctctgggtggtgtctacgattcgccttcactttccgcatacagcggcggtgtatacagcactccgcagtattttgcgtttgcaaaaggggctggtgtattcggtgaagctgggccagaagccatcatgccgctaacccgtagtgctgatggttcgctgggggttcgtgctgtaggtcgtgagtcccctgcggtacagagcgcagcaagccagattcaggcacagccacggattgctgtcagcgtggacgcacgaagcacgttcaccggcaaacccgatgacataacgatgcaggctgtagagcgaagaaatgatgctcttgaacagcggatagttaacaccttaaccgccgaggtaaataacccacagaagaaattcggccgggctatttactccaatctacagccaaaaaaaccacgataa

SEQ ID NO: 198560 - DNA, 198 bp, Klebsiella oxytoca
atggacaaatgccagggggtttttggaaagatatttggtcactcttacagggcggcgataacaaaaggctctccagcgcttagcctaaaatcgggtgaagccgatatttcgtcggttttagcaatgatggaaaaatccagaccggaaacctatcacggaatctactgtaagcgctgcgggaaagttatttatggctaa

SEQ ID NO: 198561 - DNA, 165 bp, Klebsiella oxytoca
gtgagcgataagaatcaacatttgaccatggaacaacaggaattcattttcaaaaccaaagtggaattactagccgagcttattcagatcaaaattcctggtaaatccgacgcggaagaactggccgaagtggtcaatgccgcattctccaaattaactgcttaa

SEQ ID NO: 198562 - DNA, 501 bp, Klebsiella oxytoca
atgactaaacatattggcatcaaattaattaatgcgttccctatgacccgtcaggcgtataacgattttcgcggctggcaacttcctgccgacgagaacggcgcggacgaaggctatctggttgaatatctggatggtggaaaacctaataccgatcgctttgatggctacgttagctggagtccgaaagaggtattcgaaaaggcttaccgtccggtatcagggctaggtttcggcctcgccattgaagcgctcaagcagggtaagaaagttgcccgcgctggctggaatggaaagggcatgtggctgaagttagttaatcccccacaatccgctactcctgctgattggcgctatgacgtaaccgtaggggatgaatataccttcgtgcctggggttaacttgctcccgtttattggaatgaaaacggctgacggtggttttgttccgtggctggctagtcagaccgatattttggccgaagactggcaaatcgtttaa

SEQ ID NO: 198563 - DNA, 2121 bp, Klebsiella oxytoca
atgtcggtacctaaccaaataccctataacatctatacggctaacggcctgacaaccgtttttacgtaccagttctatatcattagtgccagcgatctgcaggtaagcataaacggaaatattgttaccagtgggtattccgtcgcgggggttggaaataaagatggtggtgatatctcctttctgacgccgccggcgaatggcgctgtcgttatgttacagcgtgttgttccgacgttccggttaacggattatcaggataacggggacttactggcggatactattaataaggactttgaccgtatctggatggctatccaacgggcattcctcgaactcggactggcaataactcgcccactgtacggtggcccatttaatgcgcagggataccgaatagctaatcttgctgatccggtagacaatcaagacgctgtaacgaaaaagtttgtagtccagacgggacaagttaatttatcacggacgctacgagtccctgagagtcaagtgggaattatggcatctgtacgtgcacgttctaatatgctgattggatgcaatgaccagggcgatcctgttccgattgcagggcaaactgaaacggcagatttggcaatcaagctagcatcaaaagacggtgctggcttagttgcttcggaaacaggaagaacggtagaggcttctattcgtgctgcgtctggctcatcacaggctctgtttccaaagtttattaataaattaacagcttatcggcatggcgttaccggctatcaggatttgttcagagcttacggtttcggtagttcagtgcaagtgggtgcaacacttccagatcctgcaacgcaagcccctatcgctaagtttttcgaatacttaaataaaactcttaacaaacaaggaatttatcctcttactttcgaaaacaggggggttaatggttcgtcgataaataacttcattgtaaatcagtggcctggcgtcgtcgcagaaggtgtatatcctgatatcgcgctctttgtctatggtatgaatgatttcccaacggcaaactataatgccgggcaaacgttcaatgaaaatggatttaagcagcgtcttagaaccgcgattaatttagtcagggaggctggcggtgatgttgttttgacaaccacaccgcatccaaatataggtgagtacagctggagcatgccgccgtctgttagtcaggtctggccatcattttcgccacttcctgtttctgatgaggacattatcccttcagcggcagagtcaaacgtcacgtttgaatggaatggtgtaaacatacaggcaggtgttcgcttcctgcgtggaaacgatgccatcaggcaaatcgcggtagaaatgggctgtgtgctgattgatgttgaaaaatactggtttgatgctgtagctaaatatggcgaaacggcattattcaatcggacgccggaaatacagactgttcaccccaatttgcttggtcatcagcaatcgtactggcttgcctttgaagattttttcagaaacctcgatagaaatggctggataccagccgtagcaaatcattatgcgatgtttgatgtgggtggatctggtttatatcctaacccccgaacagcagatatagatcttcaaagcaatggtatacgggcgaatgcatacattcatcgcgatcagtttgctcgtcctctgctgacaataggtcaaacaggtgtgcgcaccaagacctggtatacctctcaaaatcccacaacggggtcgccagggtacagtatcagctggatagattacggaacccgttttcaggggctggtaaatacaggggaagtgaaatccatcacaattccaaaccgaactactcagcgtatttttattgacgcatggtcgtcagcacaattcacctgggctgaatgtttagagctactcgttgctaaccgtgagggtaccatttcaatatcgatcacaggtgaactcgataccactccaccggcggggggcggaacgtcaggcggacggcgcttattctctatttcagcggggagtggtgtattaaacataactgctaatgttgacctctctacgctgaaagttcgagtcggtggtttcaacgcttaa

SEQ ID NO: 198564 - DNA, 276 bp, Klebsiella oxytoca
atgagcaatgaactcgaattgatgaaaacgcgcgatatctgcgaacaactctgcattacaccgagaacactggatcgctatcgcaagcgtaaaaagagcgaaaaccccttccctgatccagactgttcatatatgggcggcccaaacaaatggctgaaaagcaaagtagtcgcctggcagcaaaaagagatggttaggaaaaccagacggccaatgtcacatctgaatctgccccgcgataacaaaggtcgccttatccggcctgacgcggcgtga

SEQ ID NO: 198565 - DNA, 633 bp, Klebsiella oxytoca
atgatttttaacgctgagatggtgcgggcgctgctcgacggccggaagacgcagacacgccggattataaaggactgcacggtcggaagagacccaatttcaaaattcattaagatcgggaagaagtttatcggctgttacccggaagatgttcctgaactaatcagggaatgctgcccatacggagtaccaggcgatcgcatctgggtgcgcgagacgtgggcggaagctggcgccagcgcgccggacctaaagctttatcgtgctaattaccctgagcatgttccttcgatttatgaaaacgtgccgccggctgaagaaattcgctggacgccatccattcacatgccacgcaccgccagccgcattctactggaaatcaccgacgtgcgggttgagcggctgaacgctatcagcgaagaggatgcggaggcggaaggaatcgacatggaggcactttatgactctcaggactgttacgactgcattgcagaccacaatatgaccggaaggccaactgtaacaggcgcattcaagtacctgtgggaatccatctacggcgaggagggctggaaatccaacccctgggtttgggttatcgagttcaagcgctttgaaggcggtgcagcatga

SEQ ID NO: 198566 - DNA, 231 bp, Klebsiella oxytoca
atgaacgagcaacttaaaaacaaagttaaatcaatcactacacaaaccgcgcttggtgaggcaatgggtctttcatctcaggcagtaagtcgttggatgaattcgggaaaagtccccacatcacgggtgcgcgcgctttgtaagtttcttaattggcaggttacacctcatgaaattgatcctgaggcgtacccaaacccaactgacggcctgccgaaacaggaaggctga

SEQ ID NO: 198567 - DNA, 402 bp, Klebsiella oxytoca
atgactatcacattacaggcagtaaacgagcttatcgcctccctggagagtgcaggagagctgtcaatcaaagagcggaagtatctggagttggcgaaagcgtatttggtgatggcggcggagaataagcgactaactgatgtcgctcagggtggcgcattcgtaatgcaaaaggcgctgatgaaatatgaatttggcgtcggcatgaccatgcaggcagaggattttattcgtgacgccagagaaaagcattccgccaccgatcgcatttttgcagagaccgaggcgcgcggagtagaaaaggccattgctcacctggagaagaagttcagcaatatcggcgtgcagatcatgaatctgcaatggctggcagactcgctgcgtgagggagcatcagaatga

SEQ ID NO: 198568 - DNA, 519 bp, Klebsiella oxytoca
atgaccaaatcaaccataaccagagaagaaagcgttcaggccgtatttgatttaaaggttggctatcggcttgggtttgccgacttagagattctcaaacgagtggcccgcatggcgctggccgcaatggacggcgagcctgtggcgtacatgtacgatggcgaagatggtactgagtacaacgggcataacgaattttccggtggcgggaaaggtatcccgctctatcgccacgcgcagccagcgccggtagtcagcgcagaactgcttcataccgcagcatcagcaatcgaagacctgcttactactaaagacaggacaggtgcatgtgtgtggttcgacttgccattccggctccgctcggcggctaacgcgcagccagcgccggtagtgccggaggaatggactattgctgatgccgtgaagttttgcaaagaaactggtaggcaagatgccggagctgcaatggacgcctggaacgcctgccgcgccgccatgctcaacggaggtaagtcatga

SEQ ID NO: 198569 - DNA, 498 bp, Klebsiella oxytoca
atgaaattcgaagaatggttatcgcaacaaaacggcgtcattgaggttgattgcggctgtgttaccacagaagctttttatcactggatgcgcgtagcttatgaggctggcaactctccggtgattccggatggttggacatgcaacgataaagcaaacgcagcgctgatgatgcttgatcggattgaaacggcagaccctgttgatgatgaccgtatcgacggcattaagcgcattgttagtgagctagtagccgccacgcaaccccaaaacgcaccacaaaatattcctgaaattattccgggatggattgcggtaagcgagcgggtgccggaagttggcgacatcgtgcttaccacaatgggaggggcagttaacgttggcgaaatggagtgctctgctgcaaattgtcgtttcttcacgtcagttatttccggtagagagttaccggcaactcactggatgccgctgccagccgcgccgctggaggtgaagtga

SEQ ID NO: 198570 - DNA, 216 bp, Klebsiella oxytoca
atggatatgtgccaaggtattttcggaaagatatttggtcattcattccgggtggcgataacaaaaggcgcacctaacttagggctatgcgaatttcggggtgggcgcggtgctctgttagcgcttatggaaaaaacaagacacgaaacctatcacggaatctactgcaggcgctgcgggaaggttatcaatgccgcagagaagggggtgaagtga

SEQ ID NO: 198571 - DNA, 180 bp, Klebsiella oxytoca
atggaatggtatttctccatcggtctttttttgtggattttggctcaaataacaagggccgatgtaacaactggtattaggaataacatcctgtgcttgttgctcttcatcgtgtcgtggccgcttgtcatttcaataatcgcttacaaagcttacaaacttattggtggggaggactga

SEQ ID NO: 198572 - DNA, 138 bp, Klebsiella oxytoca
atggtcaagaggttaagggctctttttgcaaaggctatgagtctgtttaacatgatgtttttcactattaaaaaacccgccgaagcgggctttatcatgctgcaatgtcttttttcaggctcatctccggtaagttag

SEQ ID NO: 198573 - DNA, 261 bp, Klebsiella oxytoca
atgtctgttgataatcagaaacttttccagaaaatcgtcgaggagctggaatcactcaaaggtgagaccgaggtactatctatcgctatatcttgcctcttcagcgagatgccatcagatagcgtcagtaaagtgaggcttaaattcacaaaggccgtgaatgaactaaacacccttaaaccagcagcagctcctagtcgaaggaggtcgcgtcaagacgtgtattcaaaagcgctgtcaatgatgaccaagcctgaataa

SEQ ID NO: 198574 - DNA, 189 bp, Klebsiella oxytoca
atgccggtatgcacaatttcagtagaggtcaaaatccgttggtggctgccgttctacctcaggactctggctttattctgcctgatgttccagcgagaacctgattaccgaaagacaaccgcactcatcactaaacacggtatcagccagaaagcgaaggcggaaccagtgcgaaagaatacggagtaa

SEQ ID NO: 198575 - DNA, 222 bp, Klebsiella oxytoca
atggccggattaaccaaagagcagcgtgctgaacgtgctgcagcaaaacttgcggccgcgcaggttgatgccaatgatcctgaacagcaggaacagcaggaacagcagctggtggcgatgattaccgatttcccggcattccccggcggccccaataccgccaacgttcaccctgatgaagtggagaactggaaggcgcacggctggaaagaaatggagtga

SEQ ID NO: 198576 - DNA, 483 bp, Klebsiella oxytoca
atgctgattatttcttctcaaattgatttgaacggagaacgctggtttttcccttacaaaaagccagcaggaagtaaaaagaaattcacgccggaagacgaggcgctgtttaaactccgtctgctggtggccagtagcgagaattcacaataccgctcacgcaacgcgctggtgcggcgccatatcgacaaaatggacgcaagttaccaggtcggtacggatgctttcgatctcgccagtgtgggcgagattgactcggttgatgatcttctcatcgacaattgcgcgcgctttcttctgaaagactgggaaggcgtgggggagctggtggatggtacggagacggccgtagcgtatacgccggagcgtggtgttgcgttactgaagcaaaacccctctctgtactggcttattctggctgaggcggcggccattgctcagggtaaggagcagcagactcaggaaaccgtaaaaaagccatag

SEQ ID NO: 198577 - DNA, 522 bp, Klebsiella oxytoca
gtggaactaatcataatttgtgcaattattgggtgcataccagcggcgatagcgagcagtaaagggcgctcgttttttgcttggtggttatacggagcgcttctcttcatcgtagctctaattcactcactggtaatcaagaaggacattcgcgccctggaacagagccagcttgatagtgggctggttaaatgtccatattgtgcagaaatgattaagcctgaagccataaagtgtaagcactgcggaagtgatgttaaagaagcgatagaagttgctaggctcaaaaattttaagccgagcgacatcccatttgatgcatttttcatcaggaaaaaggtaggctttgatgttaatgaagaggcggtaactaacttggtatcacgcttgaaacaagctaatcctgaattaggccccgagagcatcaaagaaaaatatattatgcaaattgatgagttggtaaatcagctacctagtggaattcgtgatgaattcatacgaacttataatgcaaagctttga

SEQ ID NO: 198578 - DNA, 3426 bp, Klebsiella oxytoca
atgacagaacaaacttcccgcttggccattgttatagatagctctggggcagaaaaacaggctgacagccttgcagttgcgcttgataagatgactcagtctggtgataaagccgtaaccagcatgttcaaagtgacaaaagcgactgacgaggaaaaggatgcgctcaataaattgcgagcagtcattgatccggttggtgctgcaattgatacggttggccgccgctttagtgagctgaaaaaatacttcgacaaggggctaattgacgaggaagagtttcgctctctctccaaaatgctgaatgatacgaccgatgagttaagcggcgttgcacaagctcaacgagaagcagaaaaggccagcaaattagctgctgctcagcaggaggcgcaggctgatgcattccaaagaatgctcgataaaatcgaccctctggcagctgcgcttcgcaatcttgaacaacagcaaagtgaactcaacacggcctttaaatcgggggcaattaatacttctcaatatgatgcctacagcaaaaaactgcaggatactcgccgagaagtaaccggcgaagcacaagccgagcacgaagctgcaaaagcacatgatgaacaggtaaatgcactgcgtcgtcttgaggcccaaatagatcccgtaggtgaagcattccgccgcctgaacgagcaacagcgccagcttgatacagccaaaacatccgggatgctgtcgcccctggcttacgatcgcctcaacagcaaacttgcagaatcccgcgatgccctggagaaaacccaggcgcaattgggtaaaacaggccagtctgcagctcagactgccaatgctatgcgcatgatccctgctcaaatgacagatattattgtcggcttatctacaggtcagtcgccattcatggtgctcatgcagcagggcgggcagttgaaagatatgttcggcggtattggtcccgcgattaaaggtgttggcggatatgtgctggggttgattaaccctgtcactctggctgcctcggctgttggtgttcttggtcttgcctattacaaaggctcacaggagcaggacgagttctacaagtcgctaacccttggcggtaatctggttggtaaaacctccgggcaactggcagatatggctgcccgtgtatcggtcgcagctaacaccacaaccggtgcagcagcttcaacgctgaatcagttggtgtcatccggtaaagtagctggcgattctctggagcgtgtgactactgctgtcgttgaaatcagtgatgtggctggtattgctaccgaaaaactcgttggtgacttcaacgatattgctgccgatccggttgcggccatcaccaaactgaacgaccagtaccactttctgaccttggctacctacaaccagattaaagccctgcaggacgaggggaatcagcaggatgctgcgcgggtggcaaccgacgcatatgcaaatgcgttaaagcagcgggctgatgacatccacgataacctcggcctgcttgagtcggcctggcgctctcttggtcataccgctaaagatgcatgggatgcgatgctcgatgtggggcgtaagcaaacactcgaagatcagctaagaaccctgaatgaaagcatagacgaagcccaaaaaggacagtctgaaggtgggttttggaatggacttagtgcaagattcaccaacctccctgcaatgattaaactgcgagatgacttgcaggctcaaattaccgttcagggtgtgctgaatgactctatcagcacctataacaagcggcaacaagaagggattgaagcccaggagcgcattaataagttaacagaccaaactctaacaaatgcccagaaacggaaaaaggcactggatgaattaacaagggatttggtaaaggcaagggcggccggtaactcaattagtgcagaagaagaggcaaaacttcgcgcaaatataaacgagaaatacaaagatcccaaaaagccaaaaacaccaaagggtaaggcttatgttgaggatgctggttctcggctattacatcaaataaatcagcaaaccgctgcgctacaggaacaattagccagcacagaaaaaattaatactgccactcaggcacgtgtaaagtttgagcagcaaattgctgatatccagaagacagtaagtagtggcgggaaactaacggctgcacagaagtctatttttcagcaaaaggaccagatattacaggcctataaacaacaggaggcattagccaatcaagttaaaacccttgatgattatcgtaaaatgcaggagaaggttttcgataagtcggagcgacaaaacgacaccttgcaaaaaaggcttaaacttctgcaaaagatggtagacataggaaggctaacccctgatgccgctgggaagcaggccaatgaattgatcaacaagtctgttttgcctgactcagttatttctggagtaaacaaagcaggcggtacacttacttcaggtgcaaccaacgatgatttgtccaggcaggggatgaacttgatcgggcttcaagtagacccgcagcttgagattatcgacaggttaaaaaaggcacagacggactatgcaacttggctcaatcagcagcaacaggcaataactcaaagtacagttggtaatgaggcccaaagacagcagcaattgctggctttacagcaacagggctccaagaatcaggagatgctgagtaatgccacctacatagctcaaatgcaatcagctcagaactcattttccggtattaccgactcaatgggcacaatgttcggcgagcagtctgcgatgtataaagcggcctttgtaacacagaaagcattcgctatcgcccaagctgctttgcaactccccatggcgatggggcaggcgctggccgggttaccgtttccggctaacctggctgccattgcccaagttatcgctcttatgtccacaatcacttccagcataacgagtgcagcagccgtcggcttctcctctggcggttataccggaccgggagggaagtatcagcccgcaggcgtcgtccacaagggggaatatatctttgaccaggcatccacgaaccgcatcggggtttcaaaccttgaagcgctacgaaacgggcagccgcttgatgcaacgttgggccgttccgggtttgggactggtgttcagaacgttaacaacgacaacagcagcaagaccaccatccatgctcccattgagcagcatttccatacgccgcccggtgtgacacctgatcagatggcgctctccatggctcaaacgcagaagcgggcgacaacggaagcccttgatcaggttgctgcgcaagtgttgagaggagatgggaaagttggtaaggcaatgcgcagtaaatatccaggcagagggttagagtga

SEQ ID NO: 198579 - DNA, 276 bp, Klebsiella oxytoca
atgtcatttaaattgtcagtattaaaaacagtccagattcattatctcggtggatatctctgcgacaaggatgttgaaatagatttaatttatgcagttgaaagcgtccgtcaggatgacactggtcaggtaaaagcaacattgtcagtgcgttatgatgacaatgcaaagatcatcgtcggtgattaccctatcttgctggataactcatcacctaaatcatgggcagagcaggctgaaatacagattatggacatggcagaattttcacaataa

SEQ ID NO: 198580 - DNA, 903 bp, Klebsiella oxytoca
atggaattatgtcattacactactttagatagccttcttggtataattgaaggaaatgctatttgggcatctcaccttagatatttaaacgatagcaccgaactactgcatggtattaattgcgttaaacagtcgctcgataaattgagagaagaatcaaatttagattcaagatggatagatgaaattgagaagcaagtcaacttgcaaataaccccaggaatggaagatatatacgtaacgtgcttttatgcaggcatatacgcagatgggaaatacagggatgcatctgatttattaagccagtggagaggttacagcaaaccgaaacaaggtatttgtatcgtttttgatagtgaaaaactgattgactttatctattcagcccaacaatataaacatgaatacaaaggtgaatcctgtcactcaacttcatttgatgtagtacatggtcttgttaactacgtatcaccaaagaatcacaaaggtgcgaaaaaaatttacgacattataaccagtgaacttgagatgttcggttcacattctgaaatttttctctcttcggaattagggaaatcaggagtaatagcttcacttctaattagaactctgccattttttaaagatagtggcttttctgaggaaaatgaatttagaatagcaattaacactgtaactaacaggtcattagtgaattttagaaacaatcaagagcttctaacgccatatatatcaatcgggacaaatgaaagaaccaacacatataagttcataccaatcaagaagattgttgttggtcctggacccaattcacaaatcaatgccattagtatttctaacataattagtgagcgcaatcttaacattaaagtcgacgtatctaaaataccctacaagggttag

SEQ ID NO: 198581 - DNA, 270 bp, Klebsiella oxytoca
atgttgaaatttcaacgttgcattactgatgctaaaaccttatcccagttagatagtaaatatgagaaaagcaccaaagagctgtataccttagttaataatgcaaaattttatgcgtctatagccgatgagtcatcgacaaacgtaagttcaacaataacgccattttttgattataaattaaatgaaatatgtaacaacatatctcttatgttaattgaagaatttcaaaaaaatactattaattcgatcaacaaagccaagagctag

SEQ ID NO: 198582 - DNA, 933 bp, Klebsiella oxytoca
atggatgtacctatcacggcgctaaatgactactattggtcatattttcgcagatatcagcttacccgtaataagttgcaattgtataatgccttgaaactttctgatcccatggtgattgatatgcctgatgatgaatcgaaaagcagtaatgtcactgatatagctaacgcagtggcggcggtagctaaagaagtacccatatatcaagatgcaattcagcctgcagcgcaggaggtcgggaaagccttggggactgtggcaaagcttgtgaatgttgccttggcaccagtcagtgcattggtgtgggggtatgagcagattcgtgtgtttatttctgtaaagattgcggaaaagttaaaagatatcccccctgagcacattgtatcgcctaaacctaatgtggctggtccagccattgaagctctaagatatacaggatttgatgaacaattaggtgacttatatgcaagtttacttgctacgtcgatggataaaaacactgcagaacttgcccatcctgcctttgttgagataataaagcagttaacctctgatgaggcaaaaataatatcaacttttgagagggattctgattttccagtaattaccattcgaatggggaataaggatggaacaagatatattgattactatcgaaatttttctttaattggaataaatgcagggtgcgataggttagatgctatacctgaatatttagataatctttgccggttggggatttgctatattccagaaggtaaatatttctcagaacagaaagtttacaatgatattattaacagtgacgaagtattaattataaaaaaagagatagagtccaaaggaggttttttctcccttgcaaaaggaggattatatgttactgacttcgggcgtcaatttgttcaggcctgtttacgaaaataa

SEQ ID NO: 198583 - DNA, 276 bp, Klebsiella oxytoca
atgaagaaggaagaagctctcgccagcttcgtctggtgtggggccgtggttcaggtctacacgaagacggtgacgtttgccgggacggttatacagcggcatctgctatcgaagaacctaaggcaggcagtagataaggcggcgcaggctgagtgcttggcggtagacagcccgcgccatgttcaacaaaaccgacggagagtcaggaatgaagaacagcaacattatggcgttagcgctcgcgcttcgcaacatcgaagccggtcaggcgattaa

SEQ ID NO: 198584 - DNA, 438 bp, Klebsiella oxytoca
atgggaaaacttgggaaacccgctcttttagactttaccagcgctacagcaaacgagatcgtggaggcaatcgacgctggcattacaactgctcaaaatctacacgcattccgcacccgcatgggcggagctgcaaaagccgataaacattatcccgagacgcgaaaagcgttgaatatcctaaagcgtctgaaatcacagaatcgcggcgctaaaaacatcaaaaaaattctctctccgtataacgccgaactggcgaaagagcgcgatgtcttggacatcatccaacccgtgttgacggcgtggcggttgcattacgcccgtcaaggtatcgggctgattaacgaccagatcttgatcctgaaaatggttgaggcggctggcgaacttgagaagctgaccggcgaacctgtcccggacatggtgacggcggactga

SEQ ID NO: 198585 - DNA, 210 bp, Klebsiella oxytoca
atgtcactgagtataaagctaccgaaccacgtttacgccgggctattagccgaggcaaagcgccgggacacaactgttcccgcgctaactcgtgacgtgctggcggtagccgcacatctgttcgacaacggaaaaacactacacgaagaaaccttacccggcatggggaaacatggagaaaataacaatgagcgcagcaggaaaaactaa

SEQ ID NO: 198586 - DNA, 828 bp, Klebsiella oxytoca
atgagcgcagcaggaaaaactaaaaaatacgacgtagttcctaccagcgtccgccggatgacaaagctacacgctccagacggggatattaaatttacttccctgatgaaacttatttatgcctacatctggacgttccaggagaatgacaagcgcggcaataaggatccgattcataccaataccgacgttatcgcctgggaaatgggtgtatcagaaaaggcggtgattgctgcacttcaagcgctggacgctgcgaaggtggtgataaaacacaccatcaaggttcgcggcaacgtcaaatcaagcaattatgtggctgtcccgcctacctcagttgttgcattgggtgagaccccgccgaaacctggcaatgagaagaaaaagagcaagaaaaatgaggataaacaggaagatgggaaatctgaaatgcaggcagaacagcaagagccgcaggcaaaacaggcagcaaccgctgcgataccacccgcagacgaacccgctaatcagaatcctggcgcggagtctgacgatgagcgcaccgatggtaataatgctggcaccgatgatgatcatacagtgaaccagaacgatgatactgatccgttgtttccaccaaagaaaccagcgccagaggaaaccgcaggccgggttatagccccactcgatgatcttcgctactggtcagatattggctacgaaggcatggacgactacggagtaatgtggggtgtatcaggcgatgaccttgataatctgattcgtgaacacctcaaaataagagaagcggaagcagaaaaaaactttaaatcgcagaggacacattga

SEQ ID NO: 198587 - DNA, 594 bp, Klebsiella oxytoca
ttgattgagaaacgtaagccgctgaccggcacccagaacgacccagaagaacaactccccgacctacccgaacaagaattgcccgacccagagttgcccgcacaagatttacccgatttgactcgcctgtataaacgacgttgcagggatgagagcgtgatcaaaaaagcgaaatcgctccttgttcacggtatgaccgttagcaaagtagccttgctgctacgtcttcccttggagaaggtgcagcaactgcattccgaaggatggaacagtagatgcaggcgcgtgaccccgcacaatgcctggacatgtcaaaagcttgcgctccagtgcttccactctggggcgatgctggcagaaatttgctcacttaccgatatgcctctattcacaattatctcaatgctggaacgtgaaggtgtagcgtctgctgacctgctgccaaggatgccggaagagtctgacccattgatgattgagtatcggagaaccgtttcacgccataaaagcttgccgtgtagacgtaaacctatccagataaacccagtaagacgcaccagcaaacacgcagggcagaccgcgacgacacgttga

SEQ ID NO: 198588 - DNA, 354 bp, Klebsiella oxytoca
atgaaaaacaatatattaaagcagattaaagaatccatcgcctccgccatgaccggttgcaccgttgaagagatggaacacgacgctcgccaggctgctgtaaaaagcgccgtggatgcttttctcaaacttcatcccgccgactatttgaaaccagcagagccaaaggccgcaacaacctcacccgttaccaaaaagcgcgtaatgaaatcgctgggcggtggcgtctttacacctcacattgtggatgaagaagcgttacgccgtgcgtgtgaagcggcaagggcgtttcaggcggctgaccctgagcgttacggcgacatcatcaccgcagcgcctatcaaggcgggataa

SEQ ID NO: 198589 - DNA, 342 bp, Klebsiella oxytoca
atgaaaatgggtgaaaccccgaatacctataactcagtcgtgagttatcaagcggatgcaaattttgcaactcgtgtaatcaacatcccaaacctggccgtcgaggttcaaccgggcagcgtcatcaaatcagacggaaccgcttatacctccggctctgatgccttgctggttctgagtcatcaccgcgctgccgaagacgccaacatcatcgtcgctgaccgtggcgtctatatccgcccggaaacagtgatcgctgttatgggtgagaccgtgggcgctgctgccatcgctgcactgaccgcatccggcaacatccgcgttgccctggctgacaaataa

SEQ ID NO: 198590 - DNA, 306 bp, Klebsiella oxytoca
atgaagatttcattgcttggcgttggtaacgtgcctctgctgtctgcacgtatcaaaacactggatgatgcagggttgctgaacgtttccgcgctcgccagaattcttgaaattccccgaagcactttcctgagcaaggtcgccagcgtggggctggaagctgcaattctgcattactccgccatcaaaaagcagcgggatgtgctcgccactctgtcagagaaagacgcagccgcgtttctcgctgcctgcaacgctaacagcgtgagcaacaccaacagcacaagcagaaatgccaaacattaa

SEQ ID NO: 198591 - DNA, 231 bp, Klebsiella oxytoca
atgagcggtaaagattataacgtgtacaagggaagtgatggtgtctggcgcggtaaaaggcaggatgcaacccgcgcgagtgttactggctccacccaaagagaagtttttgagcaagtaagagatttagcgataaagaacggttctgaggtttcaattcatcgtggtgataacaatcaaatccgcgacaagaatagttacggtaatgacccgagaaaaaccaaaggctga

SEQ ID NO: 198592 - DNA, 162 bp, Klebsiella oxytoca
atgtcgagttggtcagctacgatattgtcggatgagggcgtaaaaaaaccgcctatgctggcggttttaagcgtgagaagtaaatcagcctttggtttttctcgggtcattaccgtaactattcttgtcgcggatttgattgttatcaccacgatgaattga

SEQ ID NO: 198593 - DNA, 1266 bp, Klebsiella oxytoca
atggatcacaagagggtaaaaccgaaggacaaacgcgatcgttatctgattctcgatccgtctggtgtgtacatggtacgcatagctgtcccggcatatatggcggcacacttcggcaataagacatacttcatgaggtcaacagcgactcgcgacattcgtcaggcgcgtttattccgggatgccatcgcgttggaatggtacaagttgcgcgatcagcttaaaccagtacgttcaggttcacgggtggagctgatccttgatgaacttcgaggcatcggcaaacaagcaaaggagacgccagcggcagctttgccacagcccacacaattgaacttccccgctcaagtgctggcttgcccttctcttctggcgatgcgggatcagtacattctgcaattcagcgagaaacgtaaactgaccaccctgtcaaagacgaacaaggccgtcgaggtcttattgtcccaccttcgcaagcgcgatattcaattgaaagatatcaaccgaaccatagttactggctggctggataaactgaaaagcgacagagcgccccagacgattcaaaactatatcagcgcccttgctcaaatctgggatctggcccgtaaccgatatcacgacgcaccacaggataacccctggcgtggtcatggcctggaagcgaaaagtagcaaggtaagttacgaagttttcacccataccgagttagcgcaggtcttcgctgccctggagggcgacgcagagatgcaggcggtcacgctgatcggcatgtacagcggcgcaagattgaatgagatttgctctttacgtgttgaaaatgttagggagattgagggcgtgttgtgcttcgaggtgacagaaggcaagaccaaatcagcagcccgtattattccggtgcatagcatgattaagccgttggtgttatcgcttcgtgagaagccccataacgggtttcttttctaccgtgcgtcaatcattgaccgggctgatggaaaacggtctacgtggcatacgcaacgatttacacgggctaaacgcaaggctttaggcgaagtgggaacagaaagaaaggtcttccattctctacgccatgaagtggcacaacagcttgataggaaccaagttccagaagaccgcgtggccttaattttgggccatgaacgcgggaagacagaggcgttcaagacgtactcaaaaaatgcggcgtcaccagttgagctatcaagatatgtcgagttggtcagctacgatattgtcggatga

SEQ ID NO: 198594 - DNA, 504 bp, Klebsiella oxytoca
atgctgcacccacgcgccagaaccatgctcctattatcgatacccgcagtcgtcattggtattgcttgcagtctggttttaatcgtggcgatgaaaatagccgccgttttgcaaaatatcctgtggaccagcctgcctgcgagcgtaggcatcaatgccgatggccctttgtggacgatggctattctcaccggaaccggcatcgccgttgggctgatcgtgcgctttagtcccgggcacgcgggaccggacccggcaacagagtcgctgataggcgcaccggtcagcaccagcgcgctgccgggtctgcttgcggcgctgatagtgggtctggcgggcggcgttagcctggggccggaacatcctattatggtcgtgaatatcgccctggcggctgcggtgggagtcgcctgtttccacgcattacccctctggactggacgattctcgccgcctccggcaccatcggcgcgctattcggcactccggtcgcggcggcgttga

SEQ ID NO: 198595 - DNA, 1365 bp, Klebsiella oxytoca; identical to SEQ ID NO: 173035

SEQ ID NO: 198596 - DNA, 438 bp, Klebsiella oxytoca
atgattgacaacagaactgtcagcgccattgacctggcgttgcaaaagcacccaacgccagttggtgatctgttcgccgcgatccgccacggacgcatgaagcggtgcttcagccgggataccgcaattcgttacctggcgttcttcatgacctcccgagcttttgggcgttctggtttcaagcagcgttatccggacgtgcaggtaattcatccactgaatccagaactgagtagctggcaacgtggcgccgtgaccactgagtatttcaacgcccaccagcgcaccgttcgccggctgcgtcgcatcctcgcccgcaaaagagaaatgcagaagtggtgcgaaaagtgggatgccatgcacgaccgctacgtgaaagagcgtgccgaccttcaggctggtaagcctgccggtgtacgtgaaggtggctgcctatga

SEQ ID NO: 198597 - DNA, 2712 bp, Klebsiella oxytoca
atgaatcaggtgattgatttcctcgggtttgaacaattgacaccacaaacctcagtacgtctggcaacacggttgcaggatgtggcaaccatatacaacaatccccgctatatctttgatgaatgtatggcctttttggggcaacagcgcattgcgctgccagcctattcatcgttacaggattttgtcactcaggcaatgagcaccgagcggcaacggacggaacagatcctttctcagaatatgtcgagaaacgcagtcaggacacttcagtccataatggctgataaaggacttctcaacagcctggccggatatcaggggtcagcccggggattttcaccatcggagctggatcgagagctacagacacatcagacgataaaagcactatatccagagctgaagcagttactcgatacactcagtctttcccggggaaacatgctttattatgcatccttggtgaaacaccgatccgtttacaaactacgacgaaccccaaaatggcagggtcgactttatttgatctgttacctgttttttcgctacagagaaaacaacgataaactggtgacggcgttcagttatctggtgaacaaatatagcctggcagcgaaagcctttgcccaacaaaaggtggcggaagagctggaagttatccggaaaaaactcaaggatgcaggcagtattttacactttttcgtagatgattcgctggacgatgcaacgccctttggtgagatccgcaagcaggcgttttcatttattgactcagatgatatcaggaagatcagccagcatcttcatcagaaagattttgatctggagagttatcaatggcagtacaccgatgatcaggcccgaaaaacagctaactccctgcgcaaactgtttatttctatcgacatcgagtgtgatgtcggccagcagctttgggctgaacagatcacacacgccaaagcagagctgacgcagcagcgaagtattaagacaatcgatcgcgagctgatccgtcttcgcgaccaaatttacctgcttgatgaagatgaagtaaatccccggcgatttgagatttatctctatcagaaagtagtacgtatgctggagcaaggccggatttttgtgagcgaaagcgaacagaataaacgcctggacgatgatttgatcaagatagatatctggaacagagaaaagcaggatctgattgagaaaactggtctggaaaggcttcatcagccgattgctcagaccttgaaggagctggaatataatttcaacaatcttctgacgcgggtaacggctaacatcaacgccgatgccaatgattttgttaaatgcctgccacgatccaaccggctgacatggagccttgcaaaccgtcgctggaaatccagtatcgataatcccgtatacagccagctccggcatatgggtattattgaaatcatggattatgtcagccggaaaacaggttacctgaatgcatttgaggggctttcatcccaaaagagaaataccgaagcaagagaaggcgatctcattgcctgcctatttggtaacggagctaattatggcctccataaaatcgcatctgtttccgatcgtagcgtcggcgcgctccggtcggtcaatgatagctatatccggccagaaacagtccacgctgcgaatgattccatttcgaacgctatcgccaggttgccgatattcaaatactacaccattaatgagactgcgccgtttggcagtattgacgggcaaaaacatgcctgccggatcaacacgttcaaagcccgattttctgccaaatatttcagaaagggaaaaggcgtgtcagccatgaccctggttgtcaatcatgttcccgtgaatacaactgttaatgctctcaatgaatacgaaggtcatttcgcttttgatctgctctataacaacagcagcgacattcaaccgggctccgtcgcaacagatactcatggagtcaataacataaatttcgcacttctggatatttttggataccagttttcgccgcgttacgctcggttcaagcgggtttttgaagaaatgtttgatgtttcattaggagaggaactgcatattgcgttgaaaaaaccgatcaaacatcaactgatcgaggatgaatgggagcacattcagcatattatctgttccctcagtcgaaaggcgactgatcagagtacagtggtgaaaaaattatccagtaacaaacgtagtagtcgaacgctgaccgcattgcgggaatatgatcggctgatcaagagcctttacgtgctggagtatgtcgataatcagacattgaggcagtttgttcagcacgcattaaaccgtggtgaagcctatcaccaattgagaagagcaatcgcttctgttaacggtaatcagtttcgaggcgggaacgattacgaagtggagctgtggaatgactgcgcccggctaattgccaattgtatcatctactataattccgcactgctgtccggactggttgaaaaattcgagacccagggaaatcaggaggtggtcagtctgttatcaaacctgtctccggtcgcctggaatcatatccagttcgcgggcaattacacatttgcccgacaacaagagatattcagtcttgaaagactattggaaaatgttgatcctctggctgaactggcatcagaggaaggagaagagatagagtaa

SEQ ID NO: 198598 - DNA, 1512 bp, Klebsiella oxytoca
atgaagcaacttcctcgtgacacaccagagcaatcgctgatcactcagtacaaaggatctcgccttgtcgttaaggcctatgctggcacgggcaaaaccaccacactggtgaaatacgctcataacaacctcgactctcgcatcctctatctggcatacaaccgggccatccgcgatgaggccagagaaaaatttcctgcaaacgttgactgcaaaacgtcccaccagcttgcctacgccactataggaaggggctaccatcacaaactcacaggcaacctaagactcaccgatattgctcaagcggttaataccaaaaactggacgtttgccaaagatattctcgacacactcaacgccttcatgtgcagtgcagatatgcggattctttatacgcattttgctcgtgccgatacaggcaaggtgcttacatccaaacaggagagataccaaatccaggtagtcgaaggtgcagaactgatatggaagcggatgaccaaccttcaagatccgttcccgaccgtacacgactgctacctcaaacagtatcagctcgggatgccgaatctgtctcgtcggtacaccaccattctttttgatgaggcccaagacgccaacccggtcacaagcagcatcgtcctacagcagaaatgcaaggtaatcttggttggagatcgccaccagcagatctataggttcagaggtgcaaacaacgctcttgatagcaaagagctcatgaacgccgaccaactctatctcacgcatagcttccgctttggccccaacgtgtcgctggtggcaaacgcccttcttgaactcaaaggcgaaacacgccctgtggttggccggggaccggcagatcaggtagtcatgttcttgcctggtgatgtcggtcatcgcgcaatacttcaccgaaccgtcatgggtgttatcgagacagcgctctctgcgactgaatccggatcacaagtgttttgggttggtggcatcgacgcttatcagatcaatgagctccaggatttgtactggttctcgatggccgagccagaccgtgtaaaaaacaagaagctgcttgatgaatatgaagactactttgagtatcaagaagtagcgaaggccaccaaagatcctgagatgatgagggccgtcaagatcatcaatagctatgatgaaatccctgagcgcctcaccactcttcgacgtaatacagtcaaagaagaatttggggccgacattacagtctcaacagctcatcggtgcaaggggttagagtgggactttgttcagctctatgacgattttccggatgtcctggacccggagctcgacccaatggcccgagacgatgaaataaacctgctctacgtcgcatccacaagagcgatgcgaatcctcgcgttaaatagcgcggttgagatggttatccgctatatcacccaaaagcgcatggtcgagaagcagatgaagatggccgcaatggcaacagaagttgaagggaacacgaccaaatag

SEQ ID NO: 198599 - DNA, 216 bp, Klebsiella oxytoca
atgaaggtaagggatctgaaagctctgcttgaaacaatgccaggtgaagcagatgtggtttggcaaaacgatgatagcactgaggatgccattcgctgtgagagtggcatgtactcaatcgtggatagcgttgaaaagatcaccaactccagactcacgcaggttttttggggccctgttgtggtcctaggtaagcaaaggaaaaacaccccatga

SEQ ID NO: 198600 - DNA, 489 bp, Klebsiella oxytoca; identical to SEQ ID NO: 102629

SEQ ID NO: 198601 - DNA, 333 bp, Klebsiella oxytoca; identical to SEQ ID NO: 102628

SEQ ID NO: 198602 - DNA, 540 bp, Klebsiella oxytoca; identical to SEQ ID NO: 102627

SEQ ID NO: 198603 - DNA, 501 bp, Klebsiella oxytoca
atgaaaaacctatcagctttggaagcagttcttgactacgacaaaccttctcggcgttttcttgatgagctcaacgaaaaccagatgaaggacctgtccggggaaatcttcgccaagctctactggagcaagcggaatcctcagtggtacgagaaagacaccaacagactgtttgcacgacttcgttgggttcggcgcatcatcaagaagcgcttgagttccggccaggttaaacctgaactgactgaaaatggttcagtgatggatcgcttcaacttcccttgcggtgacactctcgatttcttccatcggtacttgcaacatcccaaatgggctgttgtgtatcaagagtcgggttgtattgccttttggaaaaatgaagcaacgcttgagctatgcacctactgcgaaggtgatgtggtcatgatgaaggcacctgatgaaacggccttctttcgtgattgcaatcgcctgagctggtggtatgcagataacgcttga

SEQ ID NO: 198604 - DNA, 453 bp, Klebsiella oxytoca
atgaaaaataagaagttgatagctttgataatatccgctgccacatcatgctcgtcagtttacgcagctacattaccggacaatgaggtgggctcatatatacttgcaatgaacactatgtcaccgatcactgcaaagtacaccatccagtacaagcaagcagttgagcagaaatgcaatacggttcttggtgttgaacaactcaactcgacggcattcaccaatgttgttcaggcaatggtgagtagtgagactgtcgatagaatggggctggatgctgctggtggctctctccaagatactttgtctatgatcgggaaaaacgtcacttgtagcgacctgaacgcgccatttaaagctcttctggatgataaagacttcactagcaagcatcagcacttatcgaaggttttgcatacatgggatgatgtggtttcgcaaagcaaaccatga

SEQ ID NO: 198605 - DNA, 912 bp, Klebsiella oxytoca
atgacagcacgagtgagcaccaaagaccaaaccgtagatctacaacttgatgcactcaaacaagcaggatgtgaacgcatctatcaagaggttgccagcggagcaaaaacggcaaggccggaattggatcgtttattagtggatattcgtactggcgatacgatcgtgatctggaagctggatcggcttggccgttcgcttaaacacctggttgagctcgtgggcaaattggccgaacgaaaaattggcctgctcagtctgaatgatcctgttgatactacaaacgcccaagggcgtttggtctttaatctgtttgcatccttggcagagtttgagcgtgaattaattcaagaacgcaccctcgcggggttatccgccgcacgagcaagaggtcgggtaggcggaagacccaaaggtttatctgcaccggcggaaagtaccgcaatggcggctgaaacgttatatcgagaagggcggctcagtgtcagcgcgattggtaaaaagctgcatatatccaaaggcacactctatcgctatttacggtcacgaggtgttgaaattggtaagcagaaaaagaaccagttaacggatacgttacaaaccacagcaatgaatggatctccgatcaccaaaacagccaccgtaagcttgctgttcagcattgagaataatagcaaatttgtccgaggtaagaagcgcgcccagacaaacatcgaacaatacagcctggccatctatgacaataaacagttagcgccaggaaaatatgagttgcgcattccctatgaaaatgaacatgaattgaatgaaacgatgcatcaactgctgtcagatatacaccgagaggctgatttatgtaattgcaatgttgatgcaaatgcatgggaagatgggactgaacggcgatggtag

SEQ ID NO: 198606 - DNA, 558 bp, Klebsiella oxytoca
atggcaaaagaacctgatcgtacttttgaacaaaatggaaaagaacctgtgatcaaccgtatattccagttagtacagctccggtactcatctcggagtgaggcggcaagggtttggggaatcaatgtaaatacgctcaacaactactacaaacggtctgggcagaatcctgtacctcgaaaacagcaactgcaaaaaatagcagattgtgaaggggtttcgcttgagtggttactgaccggtgagggacatggtccaaagagtgatgaaagagctaaattgaactcatcgcaagatagactagctgaagtgctgtctttcctaactgaagaagaaagatcagctctagccgaggtgcttgcccgcaaaggtgttgaagtagcactccacttattagacaaggacgctatcgacctgttgaagctatctggtgatgtacggcaggctgcgctgatgctggatactttgccagaggcaagggtgagagagattttggccgaatgtggtgaaattcagcatgacccgaggataaccgtacaacacaaagcggccggttaa

SEQ ID NO: 198607 - DNA, 249 bp, Klebsiella oxytoca
atgagcagaaaagaagaaccggggcttgattggcaccctgaaaacattaaggcggagatccacaagcggggattgacgttccgcgctctgtctctccaggccggttacaaaaaagactcgctgaaaagcgttctccgcaccccctgcaagccttatcaggaaattgttgcgaatgcactgggggttgagccggaagatatctggcccagccgttataaaactgacagttacatgcgtaaggcgtcgtga

SEQ ID NO: 198608 - DNA, 2034 bp, Klebsiella oxytoca
atgttcgttacagccaaagagctggaaggctttcccggcctgccagtgacaatcaaaggaatacgggaatcactgacccgtcgcgtggctggctcgccggaactggtgcgcaaacgctccggttcaaaggctttcgaataccacattgacagtctgccaccactgacgcgggaagaagtccaacggcgacattgcgacgccctgctccagcagcagcccacaacgccacctgttgtaaaaaccaaaaccgcctcagctccgggggaaaaactggaagtgctgcgccagtgtccggccctgctggagcgtaaagtgtcagcgctgacggagaaacagcgaaagattgctgatgcccgctgtgcgctggtcctggaggtgttgcgtctgcaggatggtggcctctcgcgcatcaaggcgattgagtttatttgtgaccggtctcgcactggtgcgctgccggaacatgtgatgcggtgggtgaaggttgccaatgcccgtaagggacaacgcactggcgtcggttcccgctcattaaatgaatgggttcttaattacctgaaaacggatgacgccacggagcgtctggcgcttctggctcccggtcaccataaggccaggaagccggaagaagcggtgtggctcccccgattcatggtgcactggaacgatcacaacgggccgactatggcgcattgctaccgtaagttcaaagaagcatggcagcaggaataccacgatcagcccgcaatgctggcggcgatgccttcaatttacgccgtgcgccggacaatggataagctgcctaagcgccagcgtctgcgtggccgggtcagtggttcgtctgctcgggcgctggaggtatacagccgccgcgactggtctgcgatgccagtcaacggtatctggatctgtgatggtaagtcgctggatatgaaagtgaaacaccctgtcagcaagaacgctttcacgcccgaactgacgctggtgatcgacggcagaacccgttttgttgttggctggagcctgtcttattcggagaacgtgcgcggcgtgtccgaggcataccgctacgccatgagtcgccacggaaaaccgctgttcgtttatacggataacggccctggtcagaaaaacaaggagctggacgcagaggtggtcggcatcctcggcaggatgggtgttgaccatatgaccggcatccccggcaacccgcaggcgcgcgggattatcgaacggctgaacggcgtgatcccatatgttatagcccagaatttcgagacgtataacgggcgcggtgccgacagggagaaactgacgttgctgatgcgtgcagtggagtctgccgagaacgcagaaagccagggcaaacagctgaacaatcgccagcgtaaggctaaagatgccgtgcctgaatgggataccgtactggcgattattgaggaggaaatcgacaagtacaacaacagtcatgagcacagcgagttgccgaaatataacggcaaacatctctccccgatgcgctaccgtgcggcggtactggaagtcgagggggatgatattgagtatcccacagaggtcgagctgcgtgagatgttcatgcccgaagaagtccgaactgtagaacgtggttgggtgcgcctggataacaaccgctacttctcctacgacctggccgatcatgatggaacggatgtgcgggtggcttacgatccgcgtgacgcccgtgaggtcatcgtcagggacatgaccggcgcgtatatctgcaatgccatctggaacgggaatacccgtgcacctgtggcgaagagcaagctggatcgccagctcgaagcacgcaccaaacgccagctcgcgcggctggataaaaaagcgcagaaaattcgcgaagaaagtcgcccggttatcgaacacaagccggaggtcgatattaccaagtttatgccgcaggaaaatatcggacgtaaaaaggtgcatattttcccgtcagaattcgagcacgaagagaagttaaagaaagcgtcgagccatcgttaa

SEQ ID NO: 198609 - DNA, 909 bp, Klebsiella oxytoca
atgagcattaaagagcgtttaattcagttcattgccataaatggctacagcaaaaccaaagcggcgaaggccattgatatcagcaacaccgcgcttaccctgtatctgaacggtaactatggtgctagcgtgaaaaatgtcgaagagaaaatagctgacttcctgcgcagggaagaggaaaaagccaggcggccggtggtcagtaaggatttcgtcagtacgcggctggcagccaagtgtctgaatctgatgcgcaattcccatattgacggtgatatcggtgtactgtacggcaaggctggtattggtaaaaccatcattatggagcattacgccagccgttccactgacgtactactgattgaggctgatccggggtataccgccaaagtgttgttacaggtgctttgcgagcgtctgaagtgcaataaacgtggcaatatccatgagttaacggagaactgcgtcacagccctgaaaggtaccgggtggttaattgctatcgatgaggcagagttacttccctaccgcgcgctggaagtgctgcgccgtatctatgaccgttcgggagtgggtatcgtccttgcaggaatgccgcgtctgctgatgaacctgaaaggtggtcgtggggagtacgagcagctttacagcagggtgggcatggcgctcaacctggacgaggagagaatcaagaccgagcgcgatgatttcagcgtggtgctggacagtctgctgcctgacgattgtgagcgcagtggagccctggaggatgctttttatcgggagtcaaaagggagctaccgccgtctgttcaaactggcacgcggtgtggtgcgcgccagtcgcattgatgagcaggggtattccccggagttggtagaggagtattcacggatgcttattcattga

SEQ ID NO: 198610 - DNA, 270 bp, Klebsiella oxytoca
atgatgaaaggcccaacctcgtacaccgaccaggacatagaaaaaatgcaagatgatatcctggcattgaaaatggctgtcaatgcgttgctggtgttactggcaaatgacaataaacgtaaccttagcgaactattaaagtccattggctttgaagccaaccggatcgaaagggaatatcccgaattgtccggcacgactgaaacattggatatattccttgaacaattgaaacgaatttacctcgaatcaaaaaatatcaatgaataa

SEQ ID NO: 198611 - DNA, 408 bp, Klebsiella oxytoca
atgatgactaaccaaccaaccataatcagagatttcacaaaagagcagttaattgaacacgcgcagagacatatcgcccatcatatgtggttgaaggagaaatttggcgaagactgcaaaaattccgcaaccgtggcgctggctataattgcgctgacatcgctggatgattcagctcatctggataatggtcaaatgtcacctagcttatggcttgaggctccgtcacagtctgctgaccttcagaccagagctctggttatgtggattaagcgtctttcgctggcgcttcgctatgccagccctgataacaaattacctaaagcggcgatgagttatctgcaaaataacggccttgtcagcatcgctgattgccttcgggggaacaatgaagagcctcctgcgtaa

SEQ ID NO: 198612 - DNA, 357 bp, Klebsiella oxytoca
atgagttttttactgagcattcttattgatgtaattgtggcgattgccctcacgctgggcgttatgtgggcggacgaacggttactgaatattggctattttgctggctggttcatcggagttcttaacctgctgggactggcgagccctaacggccagattgtatttgagcgtaagtataaacatcgttcattggccagacgtatctatgatgtactgacagatattgcattcatcgtgttttccgtctggtccgggtggttcgtgatgtctgttgtatatgcactgcaggcagcctgcaaagcgcagatgatcgccacgcaagaacgcaagctatccgcaacggcggttacgtag

SEQ ID NO: 198613 - DNA, 2139 bp, Klebsiella oxytoca
atgcgtgctctacagcttgccatgaccctgatggctaaagaccagggctctaaggtgctgcgccagacgctggccgacatcttaaagcagaccaatgccaataaaaaagccgaggaagaagctgcacgtgtccgtgagcagtcggcacagagcggcattcgcgcatcccgaaccctgcagcaggagaatcagagggcagcgaatgcccgttctgtgctggggatccgttctgaacgcgacatccagcgcgagatagcgcagacgcaggccgcctataatcgcctgctccgaaccggcaccctcaccgctaatgaacagacccgcgcgtttcgtgcgatgacgaaccaggtcgcgcagctgcgtaccgagctcaatggtgccggtcagtcaatgtcccgcatggaacgcgctcgtatgtggggtggtaatgtcacagcgtttgccggcggcatcgcagctgcaggagccattgtcgcgccttcagttagtaaccagatgaactatgaacaacgtctggccagtatggccaacaccgcgttcgccgatgataacgttgcaggccggcgagctgggatgcagtcgatggataagttgatccggcgtgctgtagccgtaggtggcgggaataaggaaagcgcagcagagacacttgaagctttactggcatcaggttcaataacttatgactctgctgaaaagttactcccgaccctacagaaatattcaacagcatctggtgcgtcttcagtggacttagccacaattgctattcgactcaagcaatcatttggtatcaccgatgagcaaatccctactgcactgaacatggcaattaaatccgggcagttaggttccttcgaactaaaagaccaggctaaatggctcccgcagcagcttgccgccggtaatgcacttgggatgcgcgggcttggtgatctagctgtattgctcggcatcaaccaggcctcagcgataaccgcaggctcaacagatgaagccggtaataacgtggttaacctgctggcaaaaatcaacagtcaggacgccgctacctcagcagctaagatcgtttataacggtaaagggattgacctttccgggtcactgatcgctgcacgtggcaagggtattaatgcgttagatgctttcagcggtatcgttgacaagattgttaacaacaatccagcctatcaaaagcttgataagcaattgagcagcacctctgacggatctacccgtcgggagataatggagtcacaggcgaaactgctggagggttctgcagttggcaaaatcatagctgaccgtcaggcattgatggcacttatcgcataccgtgcgaatcgtaattacatgaaagatgtaattactggtgttaacaaagaaagagatttacctgctggccaaatgtctggtgacgtgaacttcgagctgatggaagggaccaaccgctttaaacttaaccagctcaataatacccgggactttgcgcagatggactcgatccagccgctgtcagatgtgctgggtaaactctctggcgagctcaacgattacgccagcgcataccccggcctgacgaaagcactggcaggagccgagacggcaatcaaggcaatggccgcagccgcatgggcttttgccggtattaaaatattatctgatatgggcagtggcggatcatctattccggggggcggtcctggaggtgggcgtacgcctcgtgcgggcggatcctttggtcgtatgtttcgtggcggtctaaggattgcaggccccctggctgctgtgtttgccgccgatgacctcaatgaccaatttaacagcgttgctggcgatgcatcgaaagccggaacaagcactggagagtttctcgtacgtgagaagcaacgccgagagcagaataaacaaccattattcgactttgatttttcctcgtggtggtcatctccgcagaatatccgcatccctcagtcagccaacggttacccggtgccgccgttcgcgcagcagccggcacagcagaccccaatcaacatcaccacccagttgcaggtcgatggccgtgtactggcagaggtcgttaacgaggcgaacggtcagtcggccgctcgtgggccgcagggaggaccgcactga

SEQ ID NO: 198614 - DNA, 159 bp, Klebsiella oxytoca
atgatgccctctgtcaggctctcccgcccggagagcctgagccatatcaaaaaagccgccgtaatagattgtgaacgccggcaaactattatactgtcgcgcgcacttttgaccgcccgcgtaagacaggagaacccaatgcaaaagaagccgtcataa

SEQ ID NO: 198615 - DNA, 1389 bp, Klebsiella oxytoca; identical to SEQ ID NO: 191774

SEQ ID NO: 198616 - DNA, 312 bp, Klebsiella oxytoca
atgtgtcttatgaagacatcacaaacatcggggagctggtcactgtgcatgaacgacatttgccgcttaggcatttctcatgtaagcctgattactttctgcataagtgtatttttcttttttaatagaaaggtgaaccagaagggtatccttatgttcaccttattgaataatttcttttatggaacttatagttctaaaaaacatatatcaaagtgtttatttttttatactttctaccagacaatctgttgcaagatacattgcatcatgaataatatttcaatttttagctggaaaaagaattattag

SEQ ID NO: 198617 - DNA, 1410 bp, Klebsiella oxytoca
atgacgttattaaccagctatcagaaagacccggatgccggttaccgtaacttcctgccgcgctacggtacggtggaaagcgtcgacggcagctatattccgcgtgattttaacgtcagcgatcccagctacaatcagtcgtggcgggaacaaacgatgattggctatgaatttgagcaccagccagacgatacctttactctgcgccagaacgcccgctacgccaccatcaaacagaagtatcgctacctggtttattccagtagccccgccaacagctcggtactctcccgccgcgcccagcatgaaacgcgccagaccgatgagtttggcattgataaccagctcgaagcaaagtttgccagcggccaggtggcccatacggtgattggcggtctggattacaaaaccagtaaagataagcagtatcttggccgggccggaggctcgcagtacgatctcgactggcgcagcccgacctacggcgttagcgtcgatgaaagcgccttcagccccgccactaatgaacagcaaaatctcgatcaggctggggtctatgttcaggatcagctgagctggcagaactgggaactgttagtttccgggcgctatgactgggcggaagtacgcaccaccgattttaccgatgccagcagcacccagcagaatgataataagttcacctggcgcaccggcctgctgtacgcctttgatttcggtctttccccctatatcagctacagcacctcctttgaacctaacctgcaaaccaaccgcgcgcctggcgttggaccgttcgatcccagcgaaggcaagcaggtggaagtcggcgtgaaataccagcctgacccaaacgcgctaatcacccttgcgctgtatgatttaacgcaaagtaacgtcgccacctacaacagcgccgccggatggtttgagaatagcggtaaagtgcgttccaaaggggttgaggccgaagcgcacgcgacgctctttgagaatctcaatctgatcgcttcatacacttataccgatgcagaaaccgtcaacactaccgttgtcggtaccgaagggaaaacgccagcgcgtattccgacccatatggcttcagccttcaccagctataccctgccggacggcgcgctgaaaagcctgactgcgggagtgggcgtacgctatatcggtaccagctatggcgatgcgaaaaacacctttaaggttccggcagtagatctgtatgacgccatggtcagctatgaattgggcgagctaaactcgagcctgaaaggcgcgcaggtacagttcaacgtaaacaacatcgcggataccagatatgtggcctcctgcgccagcgatagcgcctgcttctacggcattggtcggacggtgacggcaacggtcagctacgcctggtaa

SEQ ID NO: 198618 - DNA, 597 bp, Klebsiella oxytoca
atgcaaaacaataaccaggataaattagctgacctgagagcgactgtaattcctcgctctgaccagattaactttgaagatgttcagactcaaagcatcacagcgataatcaaatcagtccgtgctggcaatgctgagcagcctgtatttattgaccttgaaggttatgagggaaggccttacaagccatctaaatcaatgcgccgcgtgcttatcggtgggtggggtgcagatggtcattcatgggttggcagaacaattaccattgccggcgacccatcggttaagtttggcggaattgctgtaggcggtatcaagattcacgccatgagtgatattgatgctgacttttcaatgatgctttcggtatctcgcggtaagcgacaggagcaccgagttcgcaagctggaagtaaagaaaagcatgacacctgcggaaatccttgcgtggttcagcagtgaagcattaacggccgacatgacaaaactcaacggcatctactcccgcaccaaagccgcactttccgcacatcctgatgaatctaaaaaaatggaagaggtttattcagccaggaaaggcgaactggaggtgcaatga

SEQ ID NO: 198619 - DNA, 822 bp, Klebsiella oxytoca
atgaaaccaggcgtttactatgggatgccggatagtgaataccacgcagacccggccatcgggtctacctcggtaaagcaaatcagcattagcccggcaaatctatatttcaatccatttaagggcagtaaatcagcgcacattggaagtgccatacattcagcgcttcttgagccgcatgttttcagggagcgctacgtgatgcgtgaggatattaccactcgcgcatcaaaggattttaaggctctggcagagcggcattcacccgaaaacatcatcgttggtagcgaggtcgaaaccataacgcgcatgatggaaacggcgcagatgaacgaggacttcaccacctatatgagcactaaaggtgattccgaagtttccatgttcgcagagtgccctgagaccggcctgatgctgaaatgccgctttgacagattatcacaatcactaccctacccgctggatgtcaaaagctgccgggatgcttctgagcgcgggtttagcaacgccgtaggccagtttaaataccacattcaggccgccttttatctctatgtactcaagctggcaacaggattcgagagcaataactttgcctttttcgccatagagaataccgcgccatatcgcaattgcatgtattacatcggcgaggaatcgcttgaacttggtcgccgtgaaatgtgggccgcgctggaaaagataaaagagtgtatggcagatgagtccatcaggcatgaggggattgttctgccatcaaacgaaattaatgtgccggcgtatctgctggatgatgaatattcagatgaggtgattctctaa

SEQ ID NO: 198620 - DNA, 309 bp, Klebsiella oxytoca
atgaatctctcaatcaccgataaagcagaaattaaacgcatcattgacggactcggtgatgcagatatggaacatgtacacgctgagactgagcgccttgcggagtcctgcgcagctattttcgacatgatggaagagcataagcccgatgagttcacaaaggacgccgtgaactggctcagggaagatgactgtgatgctcaggagaaggccgcagagacgttttacgacctgttgcttgagcgggttaaggctgagtatgcaatcggagtttttgtccgtaggcatatgtacagggaggttgcatga

SEQ ID NO: 198621 - DNA, 492 bp, Klebsiella oxytoca
atggcaagcagaattgaagtcctgaaatcttcacttgctaagaaagaggctttatttgatgagcgacttcaaacgcatttcgacacggtgaagcaagcaaacgggcagccactcaacgataagcgcaacggacgcgccacgctgaacaaatgggataagcagagcgacgcgctcagggcgcagaaagatagtatccagcgaaccaaagacgccattgagcgcgaagagatgaagattgcattggctggctcggtaaatatccctgatttcatgcagcaagctattgatgatggtcttattagccagtggcgcaagcatcctcgtttcttctttgttaacggcgttaagcatgggcgtatcgtgttagacgaaaataccggaatgattgctcatcgttatttaagcaagatttcgaaggatgaatatccaatattcagggatgtatttaacaggcttaataagcagtgtagagaatcacaacgggctgcatag

SEQ ID NO: 198622 - DNA, 207 bp, Klebsiella oxytoca
atggaacgtgatgaactagcagatgacagaatggcatttatggctggagaggtggggtgcgttgttttcgagctggtttacaatgggattgagatcaacaaagacaacatcgttggatttttggaggggaagcgtaaggctgtggggaacgtgatccacaagggcttgctgagggatgcagccgagatggtgcggaagggcaaataa

SEQ ID NO: 198623 - DNA, 657 bp, Klebsiella oxytoca
atgaaaggtcggatggttatccgaacagcatttgtttataatggtgatattatgattagttacgcagctttagcagcctcactaaacggtgatttaaacatgggcgaaatcagaagatacgcagcagaggtatctcaggttattagcgctaatgccgaaaacattggtgacaacactcctatgcctgcggaagctgccatgcacgctgttaatcaatgccaggcaatcattgccgacgtaaacaaattcaatgatgagttctacgcctcgctttgtgagattggcgaacttggagaagaaagcgacaacgaagaggacactgtttcagcctcttatatcgacaatatttatctctgcgcgcaaattgttaaaggggatatagttcagctggaatctctttttaaactggcaaaatcaacccccgcttggcgacctcactctgcgatattagcaatccttgaaagggatgccatcttatcaatgactaggctacagcacaccatcaaggacaccgcaataacgctcaggcagcaccttgactccatcccgcacgccgatgaagatatgcaatttagtgaggaagaaattgcctcattcaaaaaagcggtatcagattcccataaggcgctagggatggagatgccaaaatggatgtag

SEQ ID NO: 198624 - DNA, 453 bp, Klebsiella oxytoca
atgtacaagtccgtatccactgatttagtggttagcaacgactatgactacccggtgttctcgcatgtgcaagcaggtatgttctcacctgaatttcgcacattcaccgaacgtgatgcagagagatgggtaagcacaacaaagaaagccagcgacaatgcattctggcttgaggttgaaggtcactccatgacggctccggccggctcaaagcctagcttccctgaaggaatgctgattcttgtagatccagaagaaccggttgaccctggtgatttctgtatcgccaggctgggtggtgatgaattcacatttaagaaactgatcaaggacagcgggcagatatttctccagccattgaaccctcaattccccatgatgccgtgtaatgaacactgccgggtcgttgggaaagttgttgcttctcagtggcctgatgagacgttcgggtga

SEQ ID NO: 198625 - DNA, 207 bp, Klebsiella oxytoca
atggaacagcgcataaaacttaatgaatacgcacaacgattcggtcaaaccaaagctgctcaagaccttggggtttatcagagcgctattttcaaagcgttaacagccaagcgagatatcacggtaatcgtgcatgcagatggctctgtttccgctgaagaattaaaaccgtttcctagcattcgccgcgacaacaacgcagcctaa

SEQ ID NO: 198626 - DNA, 300 bp, Klebsiella oxytoca
atggacaacacaatcaaacgcaataaagccaacgctcgccagattgaatcctggttactcagtcaggttgccattatcggtggtcgcaatgtcgctaaggcgatcggagtagacgaatcacaggtaagccgatggaaggtttcatggtttccgaagatttcaatgcttctgtctgtactggagtacggcgtggttgatgacgatatcgcaagactggcgaaggaagttgcggcggttcttacaaagaaaaaatccccggctgccaccgaggattctgagcaaatcaccatgcaattctag

SEQ ID NO: 198627 - DNA, 198 bp, Klebsiella oxytoca
atgcgcaccatcgaagaaattggcaagcgttcagcgctgctgaagtggaagcgtcagtttggcccattcgagaaatgccctgtttgttacggcctgctgcgctcctgcgagctatgtcgcggtaacggaaaggtaattcaggaggatatcgacgcatggaataacccaatcgcacagatctgtcgggagaaaaggtga

SEQ ID NO: 198628 - DNA, 411 bp, Klebsiella oxytoca
atgaagcaaacaatctttctccgaagtaaacaacagcagcaatcagcaataaactccattctcgcagcgcctctgaacaccgataaacccgtcaccatccgcatcaccgaatataaacgcaacctcgaccagaatgctcgcttccacgcgatgctgggtgatattgcgcgacagattcagtggtgtggaaaacagctaaagccggagcaatggaaagttttgctgataagtggtcatgcagtagccacaaagcagcaggcggagattgttcctggtcttgagggtgagttcgtcaatatcagagaaagcagcgcagagatgagcgtaagccgcatggcgagcctgattgagtacaccatggcgtgggctattggtcagggcgtcagattcacagacaggaggtatggatga

SEQ ID NO: 198629 - DNA, 2619 bp, Klebsiella oxytoca
atggctcgaattcctgtttatcagcgtcaggttggcgttaacgctggaccggcaacgcaaatcaatactccaacacagacgactgatcagcagatgtttcagcagggggttaatgcttttattgatggcgccgtgcgcattcagcgtcagcagcaggcagttcaggatactctagatctgacggactttgccaatgcgcagaataacctgaatgctgcattaaatgatgcgagacagcagtcaaaaacgggaattgactacattcctgcagcatccgcgctcgttaagcagcatgagaatgatttctatgctgctcatccttcaatgtcagagcagcagaagggggagtatcaactccgttgggctcagttgagaggaagcgtagataatcaggctatcaactgggggcaggggcaagcgaaagctatctccatagctaatctggaagatagtgcttctgcggtagggaatatcattcttcaggacccaacgcaggcaaaggctctggctcagtctcacttgcagacgatagaccagagcgaccttgacccggcaacgaaggcgcaactagcaagcaagtcacgtaacatgtgggctcttgccgcggcgcagtacggtataaacgccaatccgcagcatgttattgatcaggaatcgaccttccgtcaggttcagtccgtaggggctggcgatggagaagcgactccatcaggatcaagcgggactcttgcgacaagaaataataaccctcttaacattcgtttttctggaaacaataactgggccggtaaaggtagcgataacggctccgggtttgagaacttcgacagcgcagagcatggtctacgtgcagggctgaagctaatccgcaaccatattggcaacggcaaggatacactgcagtcgttaatcagtacgtgggcacccccaagtgagaacgatacaaagcaatacgcccaagtcgttagcagaaaaacaggcatccctgttgatgctcagttaaatcctaatgaccctcggcaaatgactgcggtagcaaaggcaatggctgagcaggaggggtatggtggaaatcttagcggcgggcagttacaacgtgcgtgggattcacttaacgacccaaatcaactcgctccaggaattccgtgggggcaactaacgccacagcagacgcaaacggtaatcaaccaggcacaagctaaagtagatcagcagaacacgcaaaccagaatgctgatgcagcaaagtattcaggatgatgttgcacgggtggaggccggggtgccggtaaacaaccccgtttcacgtgagtcgtggatggctactgctccgcatgatgcgacgccacagcaaatcgaattgctgtcaaagcagtatgaccagtatgcgttaaccatgagtatgcagggaacatactcagacataaacacaaaatctgcgacagatggacttgctgcggttcagtcaataaagcccactggtgatgaatctgattttgccgtgcggcaacagcgttatcagcaagcagcccaaaagtaccagcaagtaattactgcacgcgaaaaagacccaggaggttggctatcgcagaactcacctgcagttaaacaggcttatgctgcttatgcgcaagacccaacgcagggagctcagttcgcaaacgccattatggttgagaagaatcgccttgggattatgagcaaagacattctccctgacacgatggctgattctatcctgcagactatcgacagtagtaaagaacagagcgtcgccgccattcaatccgttgggcagcagtttggaccgtactcgcagcaagtcatgcagcagatacagaaaaaggctggcccggcgctacaggttgtgatggctactaataacccccgggcggctaatgcgttgtggcagaaccgtaatgttaagacctctgatctgcgtgattccatcaacactgccgcatctggctctgctgacagcgcggatactgaatgggcatcgcagtcgaaagattttgcggccactatggttgtgcagccaggaggagttggtatctggaataactttaatgaccagggccgccggcttacgtacctgaacattcagaaagggatgagtgtaggcgatgcagccaagcaggcgtttcaggatattttgggctcacagtatcagaccactggaacatggagactgcccacccgccttaacctcgacatgagcgacattaaagacggcgtaagtgcgtatatggataacctcaaaggtgaagacattcgccccttgattggtgatccgcgagtaagtgaagaggtcaaccgcagccagagtctaagtcgcatcaaagacaacgcggagtgggtgaccaactctgatgaaaccggtctgatgatgacgctaaacggccttgttgtgaccgacccgcaagggcagcccataacagcaacgtttagtgacctcgcaaaacttggccagcagaaccgcagcagaacaaaccgcttctctaaattcatcaataaccccgtgacatacaccccaggtcagactaaagggcagagcattgagtctcagcgcgagaatctgatcaaggtgttcaatcaggggcagcaaatcaacaggtaa

SEQ ID NO: 198630 - DNA, 1629 bp, Klebsiella oxytoca
atgccgatttatacagacgacccggggacaggtattaatcaaccgctgagcaacgttgaatctggtctcggtgaatctttgtcggcatcattcacccagggattcagagaaggcccgttgatgtctggcatacggtttgctcaggctgacaagtacgccaatgactctaactctcctgttgtcagtaaagttgaggcggatgcaaagctcaaagagcttggtgttaagagtataaatatacccgactccggcgttacgcagtccttcatggaccatgtgacacaggaaagaaaagaggcgcttgcaagacagcagattgctgcctcggctccctcagggtttataaacacgccgcttaactttatggccgggctcgcaggttctatggcagacccggcaaacctggcaattggtctggtgccgttcgctggcgaagccagggccgctactgcgctcggaaggtttggtgaacgctttgtgcagggctctatttatggtggtgtccagacggcggccgcaattccatttactgctcttgcagctgctgctgaaggggataacttcacgcttgcgcaggggatggaaaacatcttccttggcatggtgggcggtggagtccttcatgcgggcggaggggttattgcagatctggttagaggaaggcgaggtgctgaactttcagcatcaatcgcagatgaggccggcactccgagagcgacagaatcatcacaggcacctctttccaatgaagcaaactttgctgaccttgattcctacgtatatagccgcgcctatgatgatgtcactcctgcttaccaggctgaattgaatgctaccagagatagcatcacatcaaatcttgacgatattaagtcaggcattgagtccacccgacagcagataagtgacatcgagtcttcactggagaggcgcgtgtctgaatataagtctcaggggatgaaaagccgcgatgcaagagctcaggcaaagcaagatattgctgatgaaagaacgcaagttcaggagcgtcagggagagcttcaacaggaacttgagaagcatagccaggcatctcgggcggaggatgagctagggcaaatagaccggggcgatatacctcctgcattgagagagagaattgcagcccgtgctgcagaaatcggcgatggattcaagccaacagcaatagcccagggtgttagaactgcagcacaaagaataaatgaggctaactggacgcagcgagagaacgcctttcgcggtggtttatcgcacatgctccagggcaggacgcctgatattgagcccttctttgaccttggcagaacagaccttcgcgcaactgcgtttgaccagatcaaacaaggcccgcgtccggacattgacgaaccgacagtaagagccagtgcggatgcagatacgcagtataagcgagcgcaaaacaacgatgacctcatgaatgctcaggaagatttcgacgctgaaatagaactggcgcggaatatggttgatgacctcgactccccccagctcaaagaggcgttatctgccatccagaaagaagccaatgacgaaagctttatgaaaggtctgcaggcatacgccacctgcatgctcaggagaatgtaa

SEQ ID NO: 198631 - DNA, 2541 bp, Klebsiella oxytoca
atggcaaatcagtttctcactcaatgcgaaaaaacagttaatgctgctgccggccgcaatctgtcagaagatgaaatgggtcgcctcgtatctgacatggaaaacacagtcaaaaggatacgcgctgagaacgaagggatttctcttgaggctgcagcgttacgggctgccgaagaacttagcaatgctgagaaactggcaaacgttattgaagcacgtaacaaggctctgaatacgcgcattgcagcgcagcgacttgcgttcattcgtgactcatttccagatcgccctgatataggcctgtcagcaattcttgttggaagaaatgaagcccgcactggcagccgatcctctgcgtctgcggaacaatttcaactgcgatcaaagtatctgtccggactgaatcacgaccttgaacaagcgggagtactgaaatatctctccagtggctcaaatgatgctgaagtagccgatgcgatgtggcgtcttggcaaaggtgagtctacagatggcatgatgaaagagtcggttaaaatcgccgaaataatcactaaatggcaagaatcagccagacttgatgccaacaaggccggtgcctggattcgtaagatgcctggctacattgctcgtcagggccacgacatgatgaagattcgcgctgcaggttttgctgcatggcgagacgctattctccccaaactggacaaggcaacattcgaaggcgtagcagaccaggacgcatttctgagaagtgtttacgatggactggcctcaggggtgcacctggcgtctgaaaagccagactggatgaaaggtttcaagggttcacagaacgtagctcgtagagccagccaggagcgcgtactgcactttcttgatggccggtcatggtatgagtacaaccgggagtttggcgttggttccgtgcgtgaggctatctatggaggtcttgaagcatctgcacgtaataccggacttatgcgcattctcgggaccaatcctgagaacatggttaattaccttgcagataccatttctgcagatctgaaaggtaacgaaaaggctctggctgcatttaacgatgccaggcgttcaactataaaaaatgaaatggcagaagttaccgggcagacaaacatcccaggctcctctgcgctggctagatttggctcaactactcgcgcggtggattcaacgctgaaactcggcggtgccatgatctcctcgtttaacgatttggccagcaacgcccttgagcttcgctaccaggggaagaactttatgtcagccctgacggaatcaatccaggggagactcaagcgctattcgacggaagagcagaaagagattcttagttcacttggtgtttacgctgactccatgcgtgatgagatactgcagcggttttcaggggatgtaacgttgccaggaaaggttgcaagattgcaacgccagtttttccgtcttaacgggctgaattggtggacagatgcatcaagaaacaccacagcaacaatgacatctcattggctggcaggtaatgcaaagtcaccccacgccacgctgaatcctgaccttaaacgcgctcttgacctgcatggaatcggcgagccagagtggaacatctatcgcaccatggatatgaaaggctcagaaggtcgaaccttcatgacgccagacggtattgattctgttcctgatgatgtgattgctaagtatgtcgcagataaaaacgtcacagtgaatgagcgaagcattgcgaatgctcgttctgagctaggtgataagttgcgcggatatattctcgatcgcgtcatggtagcgatgacggagccaacagcaaggacgcgagcgctgatgaagcaaggaacacaaccaggtacggtgcatggtgaactcatccgctttattgggcaatacaagtcattcaccgcctctttcatgcagcaggcgttgggtcgtgaggtatttgggagaggctataccccggcaccattgggacaaagccggtggggtagcgtatcgaatgcgctatttaaaagcggcaaaggtgagatggtaggcctggcgcaagttgcgttatggatgactttttttggctatctttcgatgcagaccaagctcatgctcaaaggacaaacgcctcggccggcagatgcgaaaacatttcttgctgcagcagcacaaggtggcgggttaggcatcttcggtgacttcctttttggagaggccaaccggtttggtaacggtccaattacttctttggctggacctgttgcaggttctgctgaccagttagtaacgctgtttcagaaggccagatctggagatgcaaaagccggtgatttctttagattcactgtggaccatacacctttcataaacctgttctggtcgcgtccgatactgaattacttgttcctgaatcagttgcaggagtcgctatcgcctggctctcttcatcgatatgagcagaacattagaaagaatcagggtaatgacttcttgatccctccttctcagtttatgctagggagataa

SEQ ID NO: 198632 - DNA, 327 bp, Klebsiella oxytoca
atggcaaatgacataggtttttacgtgtctatatgtggcctgatcggatgtttagttttggcgcaaagtagcagaaaaatcattgcatcaaatgctgcaagattcttctgctttgccaacttggtgatgttttttgcgctaatggcaagaattgcgtctgaagttcattggtgggctatagcggtattctttgcgtgttcactggctgcggggttcatctttggttcagtttctcgttcaaaagataactcgattctatacagaacgcagacaatacaaggaattgctgtcatagcctttacggcaatctcatggcatttaaactaa

SEQ ID NO: 198633 - DNA, 1857 bp, Klebsiella oxytoca; identical to SEQ ID NO: 193643

SEQ ID NO: 198634 - DNA, 369 bp, Klebsiella oxytoca; identical to SEQ ID NO: 196714

SEQ ID NO: 198635 - DNA, 672 bp, Klebsiella oxytoca
gtggctgcgctgcagagtattaccgaggtagttcatgatatccgcgaaaatcgccatttctctcgtcgggtccccgaagagcgtattgaagagtttcacctctttgcccaggactttaatagtctgctgggcgagatggaggactggcagcggcagcttcaggctaaaaatgcccagcttctgcgtagctccttgcacgatccgttgaccggcctggctaacagagccgctttccgcaacgttattaatgcgttgatgaaagacgaaaccgtccatggtagttctgcgctgctttttcttgacggcgataatttcaagctcattaacgataactggggccatgctgccggcgacaaggtgttaattgaggtcgccagccgcctgatggcctttgtcggcaaacagcaccaggcgtggcgtctcggcggcgatgaatttgccattctgctgcgcaatgttcatacagaggctgaagttcaggcactctgcagcgcattgtcggaacagtttatcccgccgtttaatctccacaacggccacaccgtcaggctgtcgctgagtattggttacgcgttaacctgggaacatgcctccgcggaaaatctgcaagaacttgccgaccaaaatatgtatcggatgaaacaccagcgcttacagcgaacgcaaaaataa

SEQ ID NO: 198636 - DNA, 474 bp, Klebsiella oxytoca
atgccaggaccaccgaaaaccccgacacatctcgctttggtgaaggggaacccatccaaacgcccgattaacaagaacgagccaaagcccccgtcaggggtccccccaatccctaagcattttgataagcagggcaaatactggttcaagcgaattggtgaagagctcgatgctgttggcgtgttgaccacgctcgacgctaaagcccttgaattgttaatcgaggcttatgtcgagtaccggcagcattgcgacacgctggagattgagggctacacataccgggttaaaacgcagaacgaagacgttctcattaaggcccacccggccgccgtgatgaaatctgatgcatggaagagaatacgcgccatgttgagtgaattcggcatgacacctgccagccgatcaaaggttggtgtaattggcccggcggaagccgacccactggaagaatttctgaaaaagcgcaaatga

SEQ ID NO: 198637 - DNA, 318 bp, Klebsiella oxytoca
atgagcacaacgattgagatgttacgggctcagtgtcggatcgatattgacgatacaactgaagatgaactgctgacgctgtatttcacatctgcccgacgtcgcgccgagaacttcattaaccgtaaactgtatgaagacgctgtacctgataccgatcccgacggactcaagattgccgacgatattctgctggcgctgatgctgcttgtcgggcactggtatgaaaaccgtgagcaggtaacagacggtggaaagatgaatattcctttcggcttcacttctctattagtgccgtaccgcttcattcctctgtag

SEQ ID NO: 198638 - DNA, 339 bp, Klebsiella oxytoca
atgcaggcaggaaggttacgccaccgcatcaccattcagcgcttcacatcctcccggtcaccgtccgggcaaccggtagaaatttgggaggatggcgccacgatctgggctgaggttaaggggataagtggacgagaattgctagccgctggtgctgagcgttctgatgccacgattcgagtgtgggctcgttatcgcaaagatatttcctcagcgtcacgcctgaaggtactgacgggaccgtttaagggggcagtgcttaatgttactggtccccctgtaccggacatcaaaggaacccggcttgaaattctctgcaaacagggggctgaaaaatga

SEQ ID NO: 198639 - DNA, 450 bp, Klebsiella oxytoca
atgattgacgtcgatctggacttctctggattactggatatttcccgcgatctgcaggccctcagtaaagctgagaataataaagttcttcgggatgctacccgcgccggcgcaaccgttcttcgggatgaggtaaaagcgcgagcgccagagaaaaccgggaaactgaaaaaaaacgtagttgtcgtgacgcaaaaagcccgtagaagcggcgatatttcttctggcgtgcatatccgcggagtgaatccacgtaccggtaatagcgacaacaccatgaaggcaggcgataaacggaacgcattctactggcgctttgttgagctgggaactgccactgcgccggcgcatccttttgttcgtcctgcgttcgatacccgcatggaggaggccgctcaggctgcaattaaccgaatgaatacggctattgatgaggtgttgagtaaatga

SEQ ID NO: 198640 - DNA, 348 bp, Klebsiella oxytoca
atgacggaagacgatatatatcctctgctggcaacgctggctggtgggcgggtatacccatatgttgtgcccctgggtaatgatgacctgccagccgtacccgctccttatgtcatcttctcgatacccaccgatgtatccggggacgtgctctgcggccaggcagaatcgacacttcatattcaggttgacgtctgggccgaaacaaacgacgaggcgcgggccataagaacggaggcgttatccaaactggaagtcctctccccgacagaagtaacccggatcccgggctatgacacggcaacccatctttatcgggcaaccctggaaataacggttattgcctga

SEQ ID NO: 198641 - DNA, 246 bp, Klebsiella oxytoca
atgatgatctcatatcaggaacttgttcgcaccttccttagttctgcgttagaaagcgccgacgagctgcgcatgattaccggcggccgcattcagtttgtacccgcgtcaattactggcaagcgccagagcaatccaaaaggctccgtcttattcatctggcgaccgttcattaaacctcgccacattataacgtccgtttcgctggctgagttaaagcggatcggtactctggaggcagcatga

SEQ ID NO: 198642 - DNA, 222 bp, Klebsiella oxytoca
atgaccgcagaaattatcgatcaggccagcgagcttgaagagcttctccgcaataacgctatacaggcccaccgcattaaccacaacgcagtatcagcaacacactgcattgattgcggtgatgacattcctgaactgcgccgggtgaaggtgcctggatgccagagatgcgccagttgccagggtgattttgagctactgaagagacaagggaggatgtga

SEQ ID NO: 198643 - DNA, 180 bp, Klebsiella oxytoca
atgcgacgtttccgagttgtgattgaaacaccatttatcaatggtgagattgttgaagattttgaagtggaagatgatgctaccgatgaagatattgcggcagaagcaaaggatatatttgcgaatacttgtaactatggattccatgagataagcgaggcagaccaatcaccttcctga

SEQ ID NO: 198644 - DNA, 627 bp, Klebsiella oxytoca
  misc_feature (597)..(606): n is a, c, g, or t
atgtctgtaacacgtataagagtgaaagaacgcgacgctattattcagtcacttaaatcaggagtaacgccaaggataggtattcagcatatccaggttggtcgcgtgaatgagataactgccctccatagggatattgaacggatagctgatggtggggcgagcttcagacttatcattggtgagtacggttctggtaaaacgttctttttaagtgttgtgcggtctattgcgttagagaagaagttggtcacggtcagtgcagacctttctcccgacagacgtattcactcatcgggaggtcaggctcgtaatctctactccgagcttatgaaaaatatgtccaccagaaacaaaccagatggcaatgcgttacttagcgttgtggaaaggtttgttactgaggcaaggaaggaggctgatgcgaacggttcccaggtatcattagtaattcataaacgccttgccgctttgtcagatatggtgggcggatatgactttgcgaaggtcattgacgcattctggcgcgggcacgagaaggataacgaaaccttaaaatccaatgccattcgctggttgcgaggcgagtacactacnnnnnnnnnncctcattctatgattctttga

SEQ ID NO: 198645 - DNA, 966 bp, Klebsiella oxytoca
atgaagcgtgcacccgtcattccaagacatacagcaaatactcaggcagttgaagacacgacagcgccagctgcaccaatggtggattcgttaattgcacgtgtcggggctatggctcgcggcaatgcaattacgttaccggtgtgtggtcgggaagtgaagtttaccctagaggtgctccggggtgatgttgttgaaaatgcttcccgggtatggtcaggtaacgagcgtgatcaggaactactgaccgaagatgccctggatgatctcattccttcatttttactgaccggtcagcagactccggcttttggtcgtcgggtttccgatatcattgaaattgcagatggcagccgtcgccgcaaggccgctatcctgacagaaagtgattatcgtattctggtcggtgaacttgacgatgagcagatgtcagcattgtccagactgggcaacgattatcgcccgacgagtgcttatgagcgtggtcagcgttatgcaaaccgactgcagaatgaatttgccggaaatatttctgcacttgccgatgcggagaacatctcacgtaagattattactcgctgtatcaacacagccagactgccgaaatccgttgtcgcccttttctctcatccaggtgaattgtctgcccggtcaggtgaagcccttcagaaagcttttgcagataaagaagaattactgaagcagcaggccgtgactctccatgaacagaagaaagcgggtgtcatctttgaagcagaagaagtcataagtcttttaacatcggtactgaaaacgtctcctgcatcaagagtgaatctgagctcacgtcatcagtttgcgccgggggcaacagcattgtacaaaggcgataaaatggttctgaaccttgacaggtcccgacttccagctgagtgcattgagaagattgaagccattctaagggacctcgaaaaaccgatctcctga

SEQ ID NO: 198646 - DNA, 1167 bp, Klebsiella oxytoca; identical to SEQ ID NO: 181925

SEQ ID NO: 198647 - DNA, 1011 bp, Klebsiella oxytoca; identical to SEQ ID NO: 181924

SEQ ID NO: 198648 - DNA, 789 bp, Klebsiella oxytoca
atggataaacttccaaatttcatatttgaaaactatagtgacttaaaaattgaacgagatactgagggttggtctccggctgaggtatatagtgttacaaccaagaaaaaaaggtggtttctaaaaagaagtcatacgagatacaataaaactacatataatgtaagaagagagaaagaaattattgaatgggcctatccaaagtttagagtaccacaaataatacattatgaagaagcaaaagaatataattcattactaatgaatcacattggcggctctagccttgaaatgcttggtccatcaattactttagagaaatatatcgattactatgtacaatccttaaaattaatgcagtccattaacatcgaaaactgtccatacaataattgtataaagaatagaataatcgaattagaatatttattagagaatgatctagcagatattaattcaaataactgggaagaagatacgcgtgagcatttcagaaacggtaaagacttatttaattatatagtaaataataagccaaatgaagacttagttttctcacatggagatatgacaaactctaacatatttattgaaaacgaagaagttggatttatagatctcggtcgatgtggattagctgataagtgggttgatattgcattttgtgttagagatataagagaaataagtaatgaaaataaatggataaagatgttatttgataaattagaaatagtacccaattgggataaaatgagatactacattttgctagatgagctgttctaa

SEQ ID NO: 198649 - DNA, 828 bp, Klebsiella oxytoca; identical to SEQ ID NO: 28366

SEQ ID NO: 198650 - DNA, 633 bp, Klebsiella oxytoca; identical to SEQ ID NO: 16794

SEQ ID NO: 198651 - DNA, 333 bp, Klebsiella oxytoca
atgcagtccacacgccaaggacgaatacagatcctcaccgcgacagaaatcgatgatctctatcgacggccagagttcaatcagacagaacgtgaagagtttttctccctcgataccctggcgctcgggcatgtccgaaaaatggaaaaactcgaatcaaagatccatttcattctttttattggttatttccgctcaaaaccagtcattcctcagtttcacttaagggatgtcagacaagatgtccgttatatctgccagacctactttgccggtgcaaaaccgcaatacacgatattgcctaaggaaggtgcgaacaagttcctgatatga

SEQ ID NO: 198652 - DNA, 411 bp, Klebsiella oxytoca
atgagagttgttctggataccaatattctgttcagtgcgctgatttcgccacatggcacacccgatagaatttaccgcgcctggcgtactgcgcgtttcgaaatcgtcacctcactggtacaactggatgagatccgtcgagccagtcgataccctaaattacaggctgttttgcaaccagccaaagtcgggaccatgctcaataatttgcaacgggccatcgttttggagcgattgacaattgagcatgaagccgatgatcctgatgatgcttttttgttagcaatggcattggctggtgatgcggattatctggtcactggtgatcgacgcgcgggtttattgcaacggggccatattgggcggacgcggattgtaaccccagccattttctgcgcggaggcgctgtga

SEQ ID NO: 198653 - DNA, 240 bp, Klebsiella oxytoca
atgcaaacgactcgttggaatgttgctgtctctacttcgaccgatcaggctttacgcatattcctggccagtcagggacaagggaaaaaaggtgatctatcacgcttcatcgaagacgccgtacaagcacatattttggaattaacagccgtacaggccaaaacagccaatgcacacttggatgaagctgaaataacttccatggttgatgaagcacttgattgggctcgtcatcgttaa

SEQ ID NO: 198654 - DNA, 1161 bp, Klebsiella oxytoca
atgagtaaaaaatttctatccctggtcacaaaacaaggtacggaagccatcgccgccgccattgtaaacgacgaacgggtcgaatttgccgaaatggccgtgggtgacggtaacggtattgtaccggtaccggatgaaaaccagacggcgctgattaatgagcttttccgcacgcagcttaacagtgtgaaaatcgttgatgatgagaaaaatatcattgcggcggaaatgataatgcccccggaagtgggcggttttaccatccgggaggcggcgttatttgatgccgggggtgtctgcctggctgtcgccagcgtgccggaaacctataagccgctgcttgctgaagggtcagggcgttttaccgtcctgcgtatctggctgacggtcagcaatacggcgaatattgagctgatagttgacccggggatcgtactggcgacggtagaagatgttattcaggtcgggaacgatgcgaaggattacacggataaccaactgagtgagcacgcgcagtcacgcaatcaccccgatgccacgctgactgaaaagggctttacgaaactcagtaatgacacggacagtgaggacgcggatcgggcggcgacacctgcggcagtcaaagccgcgattgcgcaggcaatccgtgccgcctgggaactggataaccccgtcggcaccacacgattctttaatcagaatgtggatcccaatgaacaatggtcatggtcagagtgggtttacactggcgaaaacaaaacgatccgcgtcggcaaggctgacggttcaaacgtcgggcagaccggcggcagcgataccgtcagcattcagaaagctaacctcccggacgtgcagattgacgtcagcggagaaatcagcgaccacccggaacaaatcctgagaacgggccgcgctggcaaacataagcatggtggcgtccccagccgggaaaatccgtgggagattggcggcgatatcagccagcaatttaacccagccaacctgggggaaactgacgaagttgacgatcacgaccatgaaatgattatcccggtgcagacccacacctttagcgggacgacaaacagtctgggtagcggtaccgctcttagcgttgttgaatctcacatcagattgatgtgttgggcgcgggtggcatga

SEQ ID NO: 198655 - DNA, 255 bp, Klebsiella oxytoca
atgcagggttctgatgcgaagcaggccgatacactgtatcgggggattattgaatattaccgttattccggactgggcattaccgccgcgcagatttcgcagcgggatgcgctgattgcgcagaatgctgttgtttgtgacgactcactggatgagcgcgtgctgcttcttcaggatgaatatattgcagcggaaggcgacatggataaacagcggcagattattgaagatgttatttctttgctggctgcataa

SEQ ID NO: 198656 - DNA, 2106 bp, Klebsiella oxytoca
atgacgaacatgacagaatcgccatcgtgggaagacagcattgaactcatagccagaagcgaacgcgtttcaggtggtcaggatggtgtcgcaaaccggccattaaaaaaactggctaaccgcaccctgtatctgaaagagaaatatgacgggctgaatactgacctttccggcaaggttgaagcggttaaaaccttcgccggaggggcagtgctgaactctccccgtgaagaaattctctttgggatgctgcgtctggtctggacggggacttttccgaaagaagttgctccaggttcatccccgcagacgactggcggggttggtgtcggtgcatgggcgtacacttccgatgcggttattcgtcatgatctcgcctcttatctgggcccgtcctttatagggatgccggagggcggaacgctgtttgacctgctgggtggctgggtctgcccggaaatgtacgacgccaatgccgatgatgaatccgccgcgcatgcaaactcaaaggcattctaccgcctttttgaagtgctgcgtcgtcgtggcggcggggtgatttatatgaaacccggcgcgacatactgtgtcgattttatcaatttcgttcccgcaaatgtcaggatccacgcctgcggcgcgaccattaaacatattaatcccatctccgctttcgggcgcggcgggctggttatcggtggcgggcaggagtggaactacgcgacagcgaaggccgcgtatgaatcggatacttacccggcagcagtacgcgatgacacgctaaaagacctcgctatcggcgattatctggaattcaatgaagaccatgtgcaggcggaaaacgttgatatctatgatttacgcatggaggccacctttaccgacagcacttcatggggcggctatgccatcaacgtcgctaatgcgcggcatgtccgtattcacaatctcagggcgaagggctggacgcaggcctttaactttggctctgatgttcacccttccagtccgtcatgttatgacgtgcgcatttataacctggtcgtggaagaagccgaccccgtcaggacgtattacgcctttggttttatcgcaaactcgacagagtgtgaggtgtgcggcgctacgctgctgaagccgctgacggcaggcacgcgtaatggctccgggctggcggtgaatgcggtggagcgctgccgtatctccggtatcaacattcctgacctgggccggacggtttccagcgagggggtgctgataaataacgcccgcgatacctgggtggatgatgtgcgggtggggaatgcgaaatcagcgctgtccacgttttactccgttgacagttataacgatgccagtcatcgcaatatcatcgggcgggtctatgcgaataactgcgaccaggccgtcgccattggtgcaaaatatgcggttattcaggatgtgaaatctgagaactgcacgcaggatgtctacttcaggaacatcaacgcgaccgggaatatcctgaagtttgaaccgggaaaaatgattatcagtgattccagtgtaaataagcttttctggtatctgatttataacaccgtgaaaggctgggcgcgggaatatatccgggtcaggcccattgatatgttccgggggaactttgccaacctgtattcatgggacacgaataagtcagtcaaaatgaataccggcatcaccgcagaatttatctataagtttcccggtcatattaaggcactggacgctgtcacatttatggggaactttagcgtaggggcgaaggtagcggctgacccggcacagactgttccggcgcgccccacgcaactgacggcagcgatcaggtatatggcctcggatgacccctcgacagcggaagagccggttatcccggcaaccggaaaggttgtgatctcagcgctcactcagggcgacggggatttcaccaaaacctttgacctgcacggagaagccctggggtttctgcccctgaccggttcgacttacggggtggataattcgatggacatgcgtttttcatttgtgaacggtgtggcagcaaataccatgaaaccggccattttcagagtgtggagataa

SEQ ID NO: 198657 - DNA, 597 bp, Klebsiella oxytoca
atgagtaactctcttctgccgccgtcttccggggactggcttcgctataccgaggcgggcaccgccagactgtcggcgatcaccgtcgcgcttcgcacgctgtggacgccgaccgcgtgcccggtggatttactcccgtatctggcgtgggcgttgtcggtagaccggtgggacaaggactggccggcagagcgaaaaattgccgctatccagcgttcatactggttgcaccggcgcaagggcacgcgcgccgcagtacgccgcgtcattgaggacatggggttttcggcgacgttcgcggagtggttcgacgtcggcgacgagccggggacattccgcctcgaagtcgatatcaatgaggtaggactgacacaaaagacgctggccgaactcaatcgcctgattgacgacgcaaagcccgtgagccgccatctttcccggttttcagtcgctgtaaaggtgcgggggaatatccatacagggtcatcgctacactgcggggagatcgtcagcgtgtacccggaaacgtatgaaccggatgacggcattttttataacggcgtgatttttcacgatggtaattttagctacaggtga

SEQ ID NO: 198658 - DNA, 642 bp, Klebsiella oxytoca
atgagcaataacgacgcactgtttcagcagcttgacgaggtatttgcgaccatcctgtcgggcatgtctccggccgggcgccagcgtaccgcccgcagtatcggcaccacgctacgccggagccagagccagcgcatcggcaggcaagaggcgccggacggattgaagtacccgcaacgcaagcagcggatactgcgcgcgcaggcgggtatgcgttttatctggcagggggaaacccgccagctgcgcaactggcgagccactcgcggacgccacgggcgcatgctgaccggctttgatatcgacagaggaaatatgcgctcgttctatcgcgaagatattgaacgttacctcgatatcagtttccggccagccagtcggaacaccaccaaacgagagcaaatgtttcgccgtctgcgtaccgctcgctttctcaaggccagtgccacacccgacggcgcagaggtgggcttttctggcgtggccgcacgtatcgcccgcgtccatcagttcggcctgcgcgacaaagtcaacagcagcggggcgatggcaacctatccgcgtcgtgagctgctgggcctgagtaaagccgaccgcatggcaatagcccgccaggtgatcgactcgctgggggtgcgctga

SEQ ID NO: 198659 - DNA, 885 bp, Klebsiella oxytoca
atgaccttatcggattcaatcagtgccatttcttcgccggcatcggcggatggtctctcgcgctgcgtcgcgcaggatggcccgacagtcgcccggcatggacagcatcatgcccctgccagcctttcagccaggcaggcaaagggcttgggtttgctgacgagcggcacttatggccctccgcacattggcttgtcggccagcgccgccctgtcgtggtgtttggcgagcaatctggaagcgctgacgcaagcgactggatcgaccttgtacaagctgacgtggaagccctgggctatgccttcggggcgactgcgtttccgtctgcgagcgtcggtgcgccgcaccagcgagatcgcgtttattgggtggctgacgccgatcgccagcaatgggagaggtgcggggaatttcaaccgacagggggggggtaaaccttcagacagcagcgttattagctggctggcctacaccaacgaccatagacaacaatcaggtagcgggtacgggtgcggcggccaatgcaccaaagaggggaactacgctgggcggagctgccagattggcagcatggccgacaccggcggcaacggacgggaagggcggttatcagggtggacggctgcggaatgggaaactatcaacggacaggctggatgtggcggcacagctcgcagagccggtccggttaatggcttctggcgagacgctgactggctgtactgccgggatggaaagtggcggccagttagacccggatcattcccgctggctaatggggttcccgccagagtgggaaggctgcgcgcctacggaaacgccatcaacattgaagcggcggcagcgttcataaagtcttatatggcagcggtggatcatgtctga

SEQ ID NO: 198660 - DNA, 174 bp, Klebsiella oxytoca
atgaataccattgatgccgttgtaacccgcattctcgacgtgcgcccctatcgccatttctggatcgtcgaggcggaggtgttgagctggggccgatacagcagcacgaccatcatttgcgatagcgaaaaagaagcccgccaggttaagcccggcgacacggtgacgatctga

SEQ ID NO: 198661 - DNA, 150 bp, Klebsiella oxytoca
atgaatagctttgtagagtttatcgtcaaagatttgctcggccaggcttcgatattaattgcatttattgcgatgctgggcctgattttgcaaaaaaatcagcgggcaaaacggcggagggaacctttaaaacgctgctcggtttcttaa

SEQ ID NO: 198662 - DNA, 1401 bp, Klebsiella oxytoca
atggcaactcaaatcaagagcaataaaacttatcagggcgatgctgccgcacttccttccccgcaggcccctatgccgaaactggccagcctttacctggactttgagaaagagctttatattgccctcggcagaacaacgggtaatgcaattcgctcccgccgtctggctgacgtggtaacctttactcgcgcatcagaaaccacccgagtgaacaaaagcggcctgatagagtatcttgcgtccggtgaagctgcgatcgaatatgatccgattactggtgagtgcctggggcttcgcgttgctgcaggggtaactaaccttgcggccaacagtgaaaacttttctggcacgacctggacaaaatcgggcgtgtccaccacggccgccaaaacaatcgcacctgatggtaacgtctctgcatcacccttcaatgaaagcactgacagcgctgatactgtgcactttatgcaggaaaattccactccggtcgctaccgtgggaagtcctgtcacattcagtatttttgcgaaagcgaataccgcgagtgttatccagctggtcgctcagggtgcagtaacaacgacgcagtttgcaaacttcgatctggtcagcggcttaagaacccgtagctcgtccggcatcctgcagacaagcatgcggaaatataaaaatggctggtaccgtctgagtatcaccattacccctgcgggcacagcctccccgcagttcacactggcgcttgtgaatgacgtgacatcagccgctgcgttgccagcctatacaggtacaggaaagggggtttacatctggggggcgcagattgaaaactgggacggtgttacgccatacatcccgacagctggcgcaactgtgacccggcctgatgaggtctgcaccgttcgtaccgatcttgattttatggctgctgaccgcggggcggtttttgctgattacaatatgcccgccagcctgcaggcgatgagcggggtttataatgccgggcaagccattgtctgccttgacaatgattctgtggctgagtatgtgaactttatgaaccgtcgcatcagtaacagcatcaccaatcagaacctgactgcagcagctaaaattgtcggtagttcagagataaccctggaagttaaacgtttagggcaagtgagaaacggccatcagtcctttatcagttcattcatcaacggcgatatgcgtgtatttgacggcatcaataaatacagcggtgcgccgcttgtatcaactcagctgaaccgcttaatgattgggcgggccagaacgacccctggcgctgtttcaaacacttatctcaagcgcctggtttattacccggtcacgttagctgatgctgatttagtgtctcagtttaatgcattgtcgtag

SEQ ID NO: 198663 - DNA, 438 bp, Klebsiella oxytoca
atgaacaacgacggattaacactcaaccaactggcagaacgtaatgcagtattggtcactgaggtcgagaaattaagtgctgagcgtgatcagctggctgcggagaatgtggagctgaagtcttttggcggcacactccacgaaatcaaaagcagcctcgttggtggcggtcatgggcatatggcaaaagctgatatgcaggctcagagcgcggttatggatgtaatttttgatgcattcgacgctatcgaaacccccgccaccgatagcatcgtagccgggattaaggctgatggggtgatgttggttaagtctgcatttgagatgcatatccagtctccatcctgctatcaggatgaaatggttggaatggaatcagcgatgagcattgcatgccaagtagagtcgcaactgcgcgaggggccgacaaatgagtaa

SEQ ID NO: 198664 - DNA, 756 bp, Klebsiella oxytoca
atgtctaacattgtccctatgaattacgatgaccgttcattcccttttgcttcagattgctggtttaatgccacaattgccgcaaagcatcacggtaggaaagtcactgagtggttgcgcctaccttccacaaaagaatatatggcggagctatgccaagagcttggtatagaagggtttaattttaaaggtgggattttcccacctttagttcgcattgaaaaaggccgatacggcgggacctggcttcatccggagttggcggtggaattcgcccgctggttgtcagtcaaattcgcgcgcgcctgcgaccggcacattaaaaatctgctgctgagtaaaaacttccaactcaccgaagatcagattgtcggcctgatggtctgccagcagcctacatcttgggaaaagcgctttaaagacccgttctaccaggcactgtcgaaaatgtccggccttccttactttggccatgttggcggttgcccggccctgttcggtcagatcaccgcccggtgggtgtacggtgtggcgcttcctgattatgtctatcaggcggccaaacaagccgctggtgacagcggggagaagattcaccaacacctgaagcctgacgcgctggaaaaagttgaaaagcaactgattgctgttaccaatattgccagttgtagtattgaccagaaggacttcgaggcccgctgcatggctgcctttcccgttaaggggcagatgaagctgctgtatgcggcggcataa

SEQ ID NO: 198665 - DNA, 981 bp, Klebsiella oxytoca
atgggcactaccacaagagtaaaaggcgatatggacgagaaaaaaccgtttaacttcgcgctgttctgggataaatacggcaccttttttatcctcgctatcatcgtcgccatcttcggcaccctgtcgtcggagtacttcctgacgaccaacaacattacgcagatctttgtccagagttcggtcaccgtgctgatcggcatgggcgagttcttcgcgatcctcgtcgccgggatcgacctgtcggtcggggcgatcctcgcgctctccgggatggtcaccgccaagctgatgctggcgggcgttgacccgttccttgcggcgctgatcggcggcgtgctggtcggcggcgcgctgggcgccatcaacggctgtctggtcaactggaccgggctgcatccgttcattattaccctcggcaccaacgccatcttccgcggtatcacgctggttatctctgatgccaactcggtgtacggcttttcatttgatttcgttaacttctttgccgccacgccgctgggcatcccggtaccggtgatcttctcgctgattgtggcgctgatcctgtggttcctgaccacccgtatgcgcgtcggccgcaatatctacgcgctgggcggcaacaaaaactccgctttctactccggtatcgacgtcaagtttcacatgctgctggtgttcatcatttcaggtatttgcgccggactggcgggcgtggtctccaccgcgcgtctcggcgcagcagagccgctggccggtatgggttttgaaacctacgccatcgccagcgccatcatcggcggtaccagcttcttcggcggcaaaggacgcatcttctcggtggtcatcggcggcctgattatcggcaccatcaataacggactgaacattctgcaagtacaaacctactaccagctggtggtaatgggcggattaatcatcgcggctgtcgccctcgaccgtcttatcagtaagtaa

SEQ ID NO: 198666 - DNA, 243 bp, Klebsiella oxytoca
atgcttattggcagcgatagagatgccgacgccggtgccgcagatcaggatcccgccgtcgacctcaccagcggcaacggactcagcgacggcgctggcatagcgcggataatcggtacgttccgtagaccatgcgcctttatccacgacgtcaatcccgcgctggcgcagatgcgcaacgatatcgtctttcaggataaaaccgacatgatcgcagccaaatgcaatccttttcatacttag

SEQ ID NO: 198667 - DNA, 690 bp, Klebsiella oxytoca
atgacaatatctgtgcctgtcaggtctcttgatacacatgaactgatgcctggcgatatttacccacatcctgcggcggggggaatttattctctgtcacatcgcgaggtctgttctctcttcagtgaccacatcatgtatatctgcagcgcgttagttattcttctgcttgttttcatcgcaggtgtctttttccgaaaaataatgacgtcttccgtggagcgtaagcgaaacacggcgtcagttatttccgatgcaaagccagaagtacagagcaaaccggaatacttccatctttccatatgtgtggaaggcccggccagcacggatgactccgccttgtcctctcttgcctcccgtgttgtccgcgaagcagaaaatctgtatatccccggcgtcaatcgccgcgacagcgctgacgacgtgtttgcctggtccgtgcagactcagtttccttctgacaggctcttcggcacacggattttcccgtcaaccggctggtttgaacgtccggatatgattaaacatccggtgaaatgctactgcgtctgcctgcagtacacgactgaaacattgccatccacactgtatgccctggtcgatgaggccggacggcaggtggcgaagtcgtatattaaaggcgggcactgccctggctcagagggctataccttctgcataacctcttaa

SEQ ID NO: 198668 - DNA, 231 bp, Klebsiella oxytoca
atgttcgccctgtgtgacgtgaactcattttatgccagctgtgagacggtgttcagacccgatttaaaagggcggccggtggttgtcctttccaataacgatggctgtgtgatcgcgcgcagcgcagaagctaaagccgccgggataacgatgggagaaccgtttttcaaacaaaaggatcttttcagacgggctggcgtagtttgcttcagcagcaattacgagctttag

SEQ ID NO: 198669 - DNA, 348 bp, Klebsiella oxytoca
atgaaaaccctgtcgcgacactcagaactggcgaaagcgatcgcatacgccctgaaccagtggccggcgctgacgtactatgcagatgatggctgggctgaggcggacaataacatcgctgaaaatgcgctgcggatggtcagtctgggccgcaaaaactacctgttcttcggttcggatcatggaggagagcggggagcgctgctgtacaacctgatcgggacgtgcaaactgaacggagtggagccagaaagctacctccgctatgtccttgacgtcatagccgactggccgataaaccgggtcggcgaactgctcccctggcgcgtagcactgccgactgaataa

SEQ ID NO: 198670 - DNA, 348 bp, Klebsiella oxytoca; identical to SEQ ID NO: 198669

SEQ ID NO: 198671 - DNA, 558 bp, Klebsiella oxytoca
atgaaaattgcattcatgggcatatcgggtagtggaaaagactttcttgccaattatctgatatccaactatggatttattagattatcatttagcgatcaactcaaaaaattggccaattatatttatccttggatggaaaaggattacccccctgaaaataaaatgttaccactcaatataaccttacctaccggcgactttatcagccattcaccaagagatatatggctgagcttagacagcctaaggaaaattgaagaaaaaatatttattagaatgctatcagaagagttgaaaattttagaaaaaaatggagggatgaataaaaatataataattactgacataagatcaaatgaagaattcgcatggtgtaagaacaatcagttcactatagtacatatagaacgggaaaataacaattataaaaaatacgaaatcgacaagtatgtcactgagaataaaacaaaatcagaatatcattttgacaacaatgtgaacggaattgatagttttaaacatttcttcgaaaaggtattattaagtgaacagtaa

SEQ ID NO: 198672 - DNA, 414 bp, Klebsiella oxytoca
atgtctgctgttttacctccccgagcagagcggcgcgcaaaacgccccctgctcgcgctgtttcagggactgctgacgctggccctgacgctgctcggcctgctgctggtgacctttgcgctctctgcgctgtcgccggttgatcgggtgctgcaaatcgtcggcgaccacgccagtcagtccacctatgaccaggtacgccaccagctcggcctcgaccagccgttgccgctgcagttctggcactatctgctgaatctcgcccacggcgatcttggaatcgccagctcaaccggccagccggtgctgcacgacctgctcgccgctttcccggcaacccttgagctggccacgttggcgttgattatcggcgcgctgtcgggcgttatcgcaggcgttctctgcgcccgctaa

SEQ ID NO: 198673 - DNA, 1281 bp, Klebsiella oxytoca; identical to SEQ ID NO: 169062

SEQ ID NO: 198674 - DNA, 687 bp, Klebsiella oxytoca
atgtataacaccgatttaccgacccgtgcagaactgccttctgcgatgaaactgatgcaatcaaccattctggccgccattgttgcgcttacgctgctgattaccatcgtgatgccgtcagaatacggcatcgacccgacgggcgttggccgtctgctgggccttaaagaaatgggtgaaatcaaaacgcagctggcggaagaggctgctgctgataaagcgggcacgagcccactggcgcagcaaacagcaccggtaaatgaacgtccggtgccggacaacccgccgacaatcacgcaaaacagctacccggaactgagtgtcccggccacaacccgtgcgccggaagcgccaaccgccggttctcaacgtaatcagctgctgattacgctgaagccgaatgaagcggcagaggtgaagatggaaatgcgtaaggatgcccgggtagcttatcagtggatgagttctggtcctgtgaacgtcgatgcccacggcgatccggttaatgccccgaaagggttttaccacggctatggtaaagatcgtcagattacttctcgtgatggcgtgttgcaggccgccttcgacggaaaacatggctggttctggcgaaatcgtggttcagagacgattacgatccaactggataccaatggggagtacatgagtattaagcgcgtcatctga

SEQ ID NO: 198675 - DNA, 429 bp, Klebsiella oxytoca
atgcaaaaacaatacttcaataagattcgtcgtcaattcgtcaacgtcaccggtatgttgctcacttcattcaccgccattcctgccctggcagcgcagggcggcttctccgcagagaaagagccagtcgctactgagcgcatgtatgccggacataaagtacagcaggagaatggtcaaagccgtattcaggccgtatcgtcaatgcacgaaagggcgtgggtaacgctggaaggcaatgttatcagtcagcagcaggatgagtggtacaccttccgcgatccaaccggcaccatcaaagtgcgcattcctcagaaggtctggaacgggcagcacttcgatgctcaggatctggtgcgagtgagtgggctggtgagccatgagaatggcgcagcgcgcctggatgtaggtgtgattagcaagccttga

SEQ ID NO: 198676 - DNA, 2133 bp, Klebsiella oxytoca; identical to SEQ ID NO: 169063

SEQ ID NO: 198677 - DNA, 999 bp, Klebsiella oxytoca; identical to SEQ ID NO: 169064

SEQ ID NO: 198678 - DNA, 1545 bp, Klebsiella oxytoca
atgaaaaacgcgcctaatgtaaaaactctcccgaaagataagatggaagaggccattatctttgccgggactggggcatggaaagcggcaaaagcctaccagaccgaacagggtgaggggggagatgcgataccgccggtagtgctggatcacactcaactgactgagttgccacaccttcgcatcgttgataagtggcgtcgctttgcccgtgtttaccaggctgggcttattgagcaaaaccacatcagcatgatcgccaacaagctgcaagaggctggtgtgacaaatgccgaatatatcaacgagaagggggagaaagaggattggacagcgctgatgagccgtatcgaaaagcaaccacttacggttgtggatcgtggcggggctacactggcacttaaccagatgggggccagccagcgcggtgaagtattgctggcgcactatagtggcgaactggcggttcatgccgattctgacatggttcatcactacaacggtgtcatatggaatcctctgccggataaagagcttcagcgcgtactggctcagatttacattgattccgaaacgtcttactcacagaacgccatcaaatcatcggtggaaaccatgaaactgagcctcccggtcatgggtgtgacagcccgtaatcttatcggcttcagcaacggggtatttgatacccgaacggggcaattcagggagcatgataagaccgactggctgctaatcgctagcgaactcccgttcagcccaccagcggagggggagacactggcgactcatgcgccgaacttctggaaatggcttcgccgttctgtggccagtaatgaccgaaagactgatcgtgtactggctgcgcttttcatggtgctggcgaaccggtacgactggcaattgtttcttgaggtcacggggccgggtggtagcggtaaaagtgtcatggcggaaatctgcacgatgctggcgggtaaggccaataccgtatcagccagtatgaaagcgctggaggatgcgagggacagggcgctggtggttggttactcgctgatcatcatgccggacatgacccgatatgctggcgatggtgccgggattaaggccataactggcggtgataaggtgtcgatagaccccaaacacaaggctccatactcgacacgtattcaggcggtagtgctggccgtcaataacaacgctatgaccttcagtgatcgaagcggggggatatcgcgccgtcgggtgattttcaattttaccgaggtggtaccggaaaatgagcgggatacgatgttggccgagaagatagagggggagcttgccgtaatcattcgtcacctgctgacccgctttgccagccaggatgaagccaaacggctgctgcacgaacagcagaaatccgaagaggcactggctatcaagcgtgagggggattcgctggtggacttctgcggctacctgctggaatcggtggcatgtgatgggatgtttatcggtaacgctgagatagtggtaagcgtacagcgagaaccgtattga

SEQ ID NO: 198679 - DNA, 126 bp, Klebsiella oxytoca
atgatatctatcatcttctggctaaaagctaccctgaatttaaacacctctcagatgacgatcttgccgattctgctgatacatattccggggcgagttttgctatcaattgtgcactcacattga

SEQ ID NO: 198680 - DNA, 192 bp, Klebsiella oxytoca
atgactgatatgaacccactgaacatggccgataacctccactctctggagattctgttgtgcgctgctatggaaatggactggagaaaatccgatgagagcgaaattgctggtgagttgattgagatagcgattcagcgttgccggagtctgctcaaacaaccgggtggcgtgggggtgaaaaatgcatga

SEQ ID NO: 198681 - DNA, 183 bp, Klebsiella oxytoca
atgcttaaaacatttcaagtttacgggtttgccgttaataagcgcggccacacgataggcattaactacaccctgaccagcacaactcctgacgaggctaaatcagcggcacaattactggcgcagcaaggtggctataagcatatccgcatcaactttgctcgggaggtgtccaatgactga

SEQ ID NO: 198682 - DNA, 264 bp, Klebsiella oxytoca
atgaaagatcatacccaaactcgcctggaatttacatggctattcctggcaacccctaaacatctccctcacgtcgcacctgtcgtgctgcgtactaacgccgcaaccgaagaagaggctcgcgcagagttctccggctggaatatggttttcgctgcaaaaatccgttctcagatgcggtgtcatataacgtttttcaacgatgaaaaccgtactggcctgacacttgaggttgaggctgtagagggggtattccatgcttaa

SEQ ID NO: 198683 - DNA, 174 bp, Klebsiella oxytoca
atgtcaacaattgaaagcaaagaacgccatgttgtgcagcttaggcttgataaagaactgtcagagcgactcgccatagcaatgaaagaagatggtgacgacaataagtctggttggattaagcggctattgcgacgcgaattagataagcgaggcattgagcctaaaagctga

SEQ ID NO: 198684 - DNA, 210 bp, Klebsiella oxytoca
atgaatcaatttgaacaatccaccattccagctgagcgcatgatccgcgagggagagtgccgccagttaaccggcatttgtcgcacaacccgttacatgatggaaaaagaagggaaatttcctgcgcgacgcaagttaggtggccgtgcagttggctggcttttgtctgaagtttccgagtggcagaagagccgcagcaaagctgcgtaa

SEQ ID NO: 198685 - DNA, 747 bp, Klebsiella oxytoca
atgagaataagtaaaaaaagcaatatgccaaaatggtttaatttagagaattataataaatttattacattagatgatgagatgttcattacacaaataatcgttaggagtaatgacgagttgacgggggtatatgaacgggatggttattttgaggataaattatcctctgggttgtatccattgacttatcctcagtgtaatttaaaaaagattgctgacggcccaagaatagcagcaagcaggattttccaaccaatatcattgctttccctaagtttcattaacgaaaatgttaatacgactataggtgaagggaaggaaaatccctacagccatatagatgcgatatccaaaattccttgttttgatggtgatattcactgttctattaggttggatgctcaagacgatcttatcataaatgatttgaaacgattgttacctcaatggagaaaacagttaggaataaatcttgatgaagatagaattaaaaattcttgggcggtggtaagaagtaaaattataagctatcaggcaattgctttatatgacctgctactatggcaaaaggctactggtaaccagataacaaatggtgtattagcggtttctctttatcctgaaggcgattttgattccacaaacattgtacaaactataaagccatttgtagaaaatttgtttagtgattcatctatagaaaaatttgacgcagaaatatctaacaaaaaaaatgatagataa

SEQ ID NO: 198686 - DNA, 513 bp, Klebsiella oxytoca
atggacttcgattttgatgatatggcatacccggatacttttttaatttccggtaaagagtttaaaggaagccgcagcacaggtaagaatcaggtagacattccgtttacggacgaaccgcaaattgagttaggcgatatcctgattcagaagattggaaaccgtgagctaaaccttaaagttgccgatctttcaatatcaaagaatggaacactgggtgtgggtacaacgcatccccacttacttacattatccgtagagaatctttcttccgacgcacacaggacagcaaagagtatgaacacttttaatatcggctcagtccgtggtgagcaagttcaaataggtgaaagtaatcatatgctggtgaatatcagtattactgagcttgtcgagaaagtggttaaatctggcgatccgcaggctaaatcaatgttgaaacagttactggagaacagcactgttgcaagtattgttggtgcaggagcttcagttctgttaggtctgctgtaa

SEQ ID NO: 198687 - DNA, 261 bp, Klebsiella oxytoca
atgccaattactattcaagaaattaaagatcaccgcgatcaatatgggcttcatgacatgagtgccatgcctaccgttgagtatcggaaggctctcgcaaatggtgcgctgttctggatcgaccatcatgattttgtccgcagtacgttatcagaagagatatttgccactaatcgtgaacaattagatgccatgattgaacatttgctagaatatagaaataagatgttaacaccgcctgaatggatgagtgagaagtga

SEQ ID NO: 198688 - DNA, 168 bp, Klebsiella oxytoca
atgccatctgaatatgatgaacaacgggattcgactgatacgcagcttcccggcgaatatgacctttttgatttaatggcgcaggttactaacgacctcgttcatgctcgcatgaacggattgtttttccggactacaggtaaactacagaaagactacaaaagctga

SEQ ID NO: 198689 - DNA, 936 bp, Klebsiella oxytoca
atgacagcacaagatttaatcaacgttctcactattcttaaggccaacgactcaaccagttttagcaagattcaacgcgcgttaaagatgagtatttcgcagttggagggcatcattgatgggttaactgcaatgggaatagtgtataaatcatcattcacttcatacagccttactgagttaacctctaaacctgttgttagtgacggtgtaagaaaggcattcgaagatatcattaccaatcgcggtacttacctgtcagaagaactactacaaaaggtaagtacaccattcatcccactgatgacgcacgaatacaaaaatgccccagttaaagtgatgatcgtggggcaagaaactctgggaatggaagatgctttcagtaccatcgtttcggtcgatgactacattaatgagagcattgaatccttcaataaattcaattttggtgaagatttaaggaatagccacttttggtatgcatttgatgaagtagtaaagtattttaacctaccatccagaaggcatgcttattggactaatcttcataagtttcaattaattgaaaatgatggagatagtgtcagcatttccaaactaccttcaaaagatatcatgacaatgattcatatgcagcgtgaattattcttggctgaaattaaagataccaagccagatatcatcatctacttcacgggtgggcaaacctgggtgttagatcattatctaaacaatggtaaaaaattagcagttaaggcaatagatgaacgctcgcatctggggattatccagacagaatttttgcattgcccaatcgctatatgtaccgaccatcctagtagaaggggatatactcaagccatcgtagatcatagagctaatctgcttaaatatgctgctgacaaatttcatgcaagtgaatcggcatggttctag

SEQ ID NO: 198690 - DNA, 174 bp, Klebsiella oxytoca
atgagtgaagatattggtaaagttgttgatatttttaatgaatttacgaaggttgaacttcctggtggaggaggtttagagaccgatagccctgttgtagaggctgctgttgctgttggtgttttaggtgccgcagcatatgggctttataagctatttagtagtgatgattaa

SEQ ID NO: 198691 - DNA, 294 bp, Klebsiella oxytoca; identical to SEQ ID NO: 24078

SEQ ID NO: 198692 - DNA, 267 bp, Klebsiella oxytoca; identical to SEQ ID NO: 24085

SEQ ID NO: 198693 - DNA, 276 bp, Klebsiella oxytoca; identical to SEQ ID NO: 24083

SEQ ID NO: 198694 - DNA, 1506 bp, Klebsiella oxytoca; identical to SEQ ID NO: 24081

SEQ ID NO: 198695 - DNA, 381 bp, Klebsiella oxytoca
gtgaccattattctgatcgttctctacccccatttgatgggccagcattgtgtattcctgaactttccgggcggcttctgcctgtgcgtccctcaagtcctccagcttatctttgagcgcgtcaatggattcaccagaatcggcaatagagcctctgatttgaatttcgctcatggctttcgctttttccaccacctcatcaagggtggaggcatactgtatagccgactgtcgagcctgctcctgattctgataccacgtataccatgcaccggcacccagcatcagaatccccggaataccgccaaagagggaggatacgccagcccatgcggttctcgttacagaggtgagcgcattaagccgctgattggctattga

SEQ ID NO: 198696 - DNA, 696 bp, Klebsiella oxytoca
ttggaaaaaagaactggtaagccatgttctaaagtcataatccaggaagccattgaaaccttgcttgtcaaaaatctttcgactatagaatttgtacatcaactcaaagaaaagaacattgtagctgttccaaacatctcatctactggtcgtatgaatggcttctcgtttaaatatggaaatatggctttcaaagcatcgcaattaggaaaaacctactcatggtctgctctacagaacaggatcaattatattccagatcgcgacaacggttttcttttcaatttaaaagcatcttgcagtgaaactcttgatatgatacctccttctgggattgtaatagaagaggttaatcccacgatagaaatgcttgcactttgtaaaacttctcatgacgatagatacgataccgattataccaaagaatgtatctcgacaattcctagtaatagcgaagggctgttaactgatgctccaaaattaagcttagaaatacctaagtttagatggctagaaacaattccctatattgatgcagttattagtctactaaaaaacatcaaaatactaacacttaaacgcccaaaaaaccctagtattatcagcaacataaggattgcgaagatagcccctttatgcctcgccacaacagatgagcctgtctcggtacaccgcaaacgatcaccatcattgtag

SEQ ID NO: 198697 - DNA, 573 bp, Klebsiella oxytoca
  misc_feature (514)..(523): n is a, c, g, or t
atgaagggaatgcagaagattaaaagaggaaaatgtttctcaggaattattcactatgctttgaaatcagtatctcatcataaaactgtaccaagagtaatcggtggaaacatgctgggaagctctactactgagttaatcgatgaatttaatacagccaaaaagcttcgtgaagatatagtaaaaccggtgtggcacaattcacttcgattaccaaaagatgatacgcttacagattatcagtggtctaatatcgctgatgattacatggcacgtatgggtttctcggaaacacatctaaaatgctatgttctacatgatgatattagcggtcaacatatccacattatcgcctgtcgtattgatctcattgatggcagagtctacttaggtaaaaatgaaaatctcatcagtacacgtattatccaagaactggaagaagattataaattaacccgaactagagggccatcagctattggagcgcaatcatctaagtcgaaaaataaaaaannnnnnnnnntgaggatatgttggaaaaaagaactggtaagccatgttctaaagtcataa

SEQ ID NO: 198698 - DNA, 327 bp, Klebsiella oxytoca
atgaccagcaccatccgcaccgatataggttacgcacggctcaccgtcttctgcaactgcggcaatctgcttgagaattggcgcaaccagttcataagcttctttctgaccaccaggcatgatagaagggcctttaagcgcgccctcttcaccgccggacacaccggtgccaatgaagttaaagccttctgcagaaagttcgcgattgcgacgaatagtatcctggaagaaggtgttaccaccatcaatgatgatatcacccttatccaggtaaggcttcagagagtcgatggcactgtcagtgcctgcccccgccttcaccattaa

SEQ ID NO: 198699 - DNA, 222 bp, Klebsiella oxytoca
atgtgggaccagtttcttgcccggattctcggcaataacttcttcggtcttttcacgggagcggttgaaaacggagacggtataaccacggctctcgatgttgagcgcaaggttacgccccatcactgccataccgacaaccccgatctgttgcttggacattacatactcctgtcaggtgggttaactgcgataattcgcggaataagtatgttcgtatag

SEQ ID NO: 198700 - DNA, 417 bp, Klebsiella oxytoca
atgaatgatatagcacacaccctctataccgttgtgcaatatgtcctggggtttggccctacggttttattaccgctggtgctgttcttcctggcattgttctttaaggtaaaaccagcaaaagcacttcgttcatcgttaattgtcggaattggttttgtcgggatttatgccatctttgacattctcaccagcaatgtgggtccggctgcgcaggcaatggttgagcgtaccggtatcagtcttccagtggtcgatttaggctggccaccgctggctgcgattacatggggttcgccgatcgctccctttgttatcccgctgactatgctcattaacgtcgccatgttggctctgaacaagacacgcactgtcgatgttgacatgtggaactactggcattttgctcttgcctga

SEQ ID NO: 198701 - DNA, 1062 bp, Klebsiella oxytoca
atgaagcccgcggcctactacaacgagatcgacccattcgcggctcagtggctgcgtaacctgatcgccgccgggcatatcgccccgggcgaagttgacgaacggagtattgaagatgtcacacctgacgacctcagaggatttacccagtgccactttttcgccgggattggtggatggtcatatgctctgcgtctggccgggtggccggataacagaccgatttggacaggaagttgtccatgccagcctttctcctcgactggcaaaggcgctgggtttggtgacgacagacatttgtggcctgcctttggctggcttatcaagcagtgccgacctcagcgcatcgctggtgaacaagttgcaggaggtcgtgcggacccatggttcgaccttgtacaaaatgacgtggaaagaatgggctacgccttcgggcttacgccgtttccggctgcgggtgtcgggtcgccgaacgagcgagagcgggcctactgggtggccgacgccgacctgcaatacgaatccacagccagaaacgaagcgcggactgcagaacctgtccggagcggtgaaattatctggctggcaaactccgctcgcgaacgacgcgacggggtcgacccattgctacagtgggaagaatccagacggaacgccgaagatatgcctgaaacttcccggctccgtgttgctggcgggctgggtaacgccaacgtcacgcgactggaaggactccgcgggaatgactgcgcagcgggatggaaaggacaggctcgatcagctcccgcgacaggcgtacacatgcgggcccttgaggttaacggtttttggcgagatgcggactggctcttttgtcgagatgggaaatggcgtccagttgaacccggcactttcccgctggttgatggggcttccgcacgcatgggacgagtcgagcccggggtggcaagagtggcaagcagcaaccgcgtcggccgactcaaaggctacggcaacgccataaacgcccaggcagcagcggcttttatacgcgcttatatgggggtgtcgcatggccagtag

SEQ ID NO: 198702 - DNA, 636 bp, Klebsiella oxytoca
atgaacatctcaacagtaaacgagctcattcagtcgctggagtcggcgggcgagttgtcgatcaaagagcggaagtacctggacgttatgcgctgggcgattcgtgttgctggcgagcgtgatgcggcgctgaatgcagagcgtgtatgggaaaagaccatgatggaagcttgcggcgaggatggccctgcgtcggtagccagcgaaattcgctcgttgcgggctctacgggatacggcaattcaggcgcttaagtctcaggttgagcagctggctgcggagaatgtggcgctgaagaatgtttttatccagaaggaaatcccatccgaagcagtcgatgcattcatggataccgccgtcatggaccacgactggaatgaaacctccgagtggtcatgggttgaaaacgaaacagaggttattcacgccgttcttgacgcacttaagccagatacccccgccaccgatctcatcgtagccgggattaaggctgatgccgcaaatcagatgtgcgttgcctttgttaagcataaagaacttgttggcctgtctgatgatgatgtggtgacagttcgtgaagctacagacgcagtactgcattgtgctgaggtgattagcgagggggccgacaaatga

SEQ ID NO: 198703 - DNA, 492 bp, Klebsiella oxytoca
atgagcagcggaatcgaacttatgcagcatgctctgggtgtcaatgagcgcaatagaacgccgtaccgaaattatttcctcgccggagatggtcatacggacaacgaggagtgggaaaaactggtttctgaaggcttcgccacttcccggccagcgcctgattttgttggcggtggagtgctctatcacgtcacagataagggagaagaattggctattacttcgcttcctgaacccaagaaaaagacacgatacgaagaatatctggatgctgatagttgcctgtcattcggtgaatggctgctgggttaccagcttcccgaagtcgaatatgaccgtcatggaaaatgccggatgttcagatgctcatacgatgcagcttatggctatccgcgtcgtgatgtacagagcgaatggtgcccaacgaagaaagcagccaaagccagctacaaagaggccctgcgtaagtcaaaacaggagcgtacagcatga

SEQ ID NO: 198704 - DNA, 489 bp, Klebsiella oxytoca
atggtcatctcaccaataacgctgaaagcggcgcaggagtttatcgcccagcatcaccggcataacaaaccaccgcgcggacacaaattcagtatcgggctgaaaaacgccgcgggcgaactgattggcgttgcgactgcaggacgcccggtagctcgtcactttgacgatgggctgacaattgaggtcaatcgcacctgcactactggtgagcgtaacgctaacagcgccctgtacggcgcagtctggcgcgctgcccgcgcaatgggctatcaccgctgcatcacatacacccaggctgacgaatctggcgcatcactgcgcgctgctggtttcgtgcgcgtgaaagggttgtcagctcgccctggttgggctgcctcaagcgtggcattgaaagataagcgtgacccggtaggcaatggcggcgtttctcgtgttttgtgggaaattcgtcgcgccgcaggtgtcgacgtcagggaggctgagtaa

SEQ ID NO: 198705 - DNA, 1803 bp, Klebsiella oxytoca
atgagttactttggacttaacccggcaaaccagaatcagcaactggatgatgcagcttcgaatcctgctggcttcaacagtgatgtgggtttcttcgataatgcagtcggcgctggcctgtctggcctctattctggtctggtggctaaaccagaccagttactctgggctggcatggacaagctggtttcacctatcgctaaattcgtaaacgaaaacacctcagtaaacgatacgtctgcagaatacattgccgagcaaagaaagttagcacaacagcaagtaaagcgcctgacgccagacgcagcaaccacaggaacagctgggcaggttctgcatggactgttcgacatgggggggcaggccgtggttggttcgctacttgctggccctgccggcggtgcggcggcagtgacatccctgcaggggttttctgagtatgagcgccttactgcgcagggcgttgatttcaggacggcgcaggaagcagggctggttcagggcatcactgctggtgcaggaacgctgatcccaatgagtcttggcttgcgtgctggtggcgtattagcggaaggggttggtgcacaactggcgagaactggtgaaagtgcagtgcgcggtgctgcggcgacctcagcgcgagcagttcctgacattgcctatgcagctggaactaacattgcctttgggatggctcagcgcggtttgactgcgcagacgctgcgtgagggtggctataccgaaatggctaatcagtacgatgtatttgatcgccaggccatagctattgatgcagtgctcggtgtcgctttcggcggtgtaggtcgttttattaatgcccgaggtgaatcggcaagaacgccagaatttacccccacagaggtggatgcggcactttccgccaacgcctcccatcatgctgagatcgatgtagccccaggagtaccgatcaacgttctttcacgtgacgcgcacattcaggctttacagaaggccatgagagatgtcagtgaaggccgggaagtggatgttgccagcatagccgaaccagcatcattcagtgatattcccgggcgccgcagtttgattgcgcagtccattgatgaagtgctttttcaggcggatgagggttctgcggcgcgtgcggttgaaacaaggattcttgaagagcaggccgcgcaggttttatcgcgcggggatcgtcaggtttaccagtctgagatcgccaacagtcagcgtattattgatagcctgacagaacagcgtaaccaaattctttctgaggaaccaaagggaagcggaaaggcgctggcacagtcacgcgctgataaacaatccagattgcgcgaccttgatcagcgaatcaccgaagcacaaggacgcctcgagttttcccgtgatgctctgtcacctcatgagcccggcggggcgctatttgaggcgagggcagaacttgctcgccgccagcaggccgaggcagatctgaatgcgcaggctctttcattctataaaactgcagaagtgcgcagtgctgatgaggctgccccgtttgatactgctgcatctttacgccaggcagagcagaaaccaacggcggagcaggccggtgatatcgatcttcgcattgccgaggactcgttaaaggaatctccggatatggtgatcaccgttcttgatgaagatggtaacccgcagtcgcgtagcgcgcgcgaggtgcttgatgaagccagcagagaaaacgaacaggcaattcaggattccagcctgtttgatgtcgccgtagcatgtttcttgagaggatag

SEQ ID NO: 198706 - DNA, 2475 bp, Klebsiella oxytoca
atgagacaggaatgtattcaggcagtacagcaggcggcgcagcgaaccctgacagccagagaaatacagaatattgaggaccgcatataccgaaatatgcgctcgctggcgcgtgatgatcctgcatcatggcggcaacttaccgatgcagagcgactgcgtcgagccgggcagttagctgcagacgagctgcagcaggaagcagcgcttaagaagcgccgcgttgcgctgaccatagcggcacgtcagcggctggataagtttatcaatagctatcagggcgcggatggaaagttgggcgctctcaatcgcacgattgcattcagcgcagacgggaaatctaatttcctgtcagtagagtcacgtacgaaagcaacccgtgactatgctcttagccagttgcaggaagctttcgaagcagtggatccgcgcttctttggtttattcgaggatgaggccggagtacgtgacctcatttttgagatccgcgggcaaaagaccgggaatgctaaagccagtaagggcgcaaaagcctggggtgaagtaaccgaactattgcggcgcaggttcaatgatgcgggcggtgacatcggctacctggaaaactggggtatcccgcaacatcactcgatggaaaaggttggcaaggtatcgcgggataaatgggtgagcgacgttatcgggaaacttgaccgcaaatattatactcgcgctgatgggcagctaatgaatgattcagagttatcagcgttccttggtgaagcttataacactatcgctaccggcggcctgaacaagctcagtgatacaggaatgcggatatctggtgcgcgcgctaatcgcggtaacgcatcgcgacagatccactttaaagatgctgactcatacctccagtatcagcaactttatggtgatcgctctctgtgggaaatcatggtcggccatctggaaggaatcagtaaagacattgcgctggtggaaacctacgggccgaaccctgatcacgtcttccgttcacttctcgatcagacgaagtcggagacggcaacggctaatccgagtaaaaccggaagcgtggagcgccaggcgaacagcacagagaatctttacaacttcatctccgggaaaactcagccggtagctaacccgcatattgcgagatggtcggataacattcgcaactggatggtggccagccgccttggctcagcgttgctcgcttctttctctgatcttggcaccatgtacttatcggctaaggttaccaacctgcctatgaaccagctatttcgtaaccagttagaggcaatgaacccagctaaccgcacggagcttgcccgggcgcgccgcgccgggctggcaatggagtctctgctgggtagtgttaaccgctgggcgatggataatatgggcccgtcggtatcccgctgggcggcaacagcagtgatgcgcgccagcggcctgacggcctggtcagatgcccacaagcgcgcctatggcgtaacgatgatgggaagtctgggtgacgtcgtaagcagaacgcctgatttacgcagtctcgatgatgctgatttccgcatcctgaaaagcaaggggatcactgatgcagactggagtgtctggaaactggcgcagcaggaggactgggggaaaggcaataacacgatgctgacgccggaaagtatcatgcgcattcctgattctgctgtgcagcatctcgggtccccggagcgagttaagtttgaggcgatgcgtaaactgttgggagccgtgaccgaggaggttgatatggcggttatcacacctggcgcgcgggaacagatgctgactggttctggtatccagagagggacatggaaaggggagctaacccgaagtgtattcctgttcaaatcattcccgatctctgttgttatgcgccactggtctcgcgcaatgagtatgccttccgccggtggtcgggcagcatacatcgcgacctttatcgccagtacgacaatccttggcgcgctttctcagcaactgaatgatatagcttctggtcgaaacccacgggatatggctggtaaagatgccgcaaaattctggcttggtgcattgctgaaaggtggtggtcttggcttgtatggtgattttctgctatccgatcatacccgatacggaagcggtgcgctggcgtctatgctcggcccggtggctggactcgttgacgatgtcattaagatcggtcagggcatccctttaaacgcggtagagggtaagagcgaacaaactggcggtgaccttgtcaaacttggcaaaggactgacgccaggtgctaatatctggtatctgaaggcagcgctggaccatatgatgtttaaccagatgcaggagtatttctctcctggctatctgcgcaagatggagcagcgttcgaagaaagaatttaaccaaacatactggtggcgaccgcaggacgttacgccacaataa

SEQ ID NO: 198707 - DNA, 141 bp, Klebsiella oxytoca
atggtcattttaattatggttgtgttactgcttgtggcgcttgtggttatgaaccgtaagggagttattgaagatggcacatttgcggtagtagtagtatttatattatttggtgtggctggatatattggaatatcatag

SEQ ID NO: 198708 - DNA, 399 bp, Klebsiella oxytoca
atggccgaccataacaatggagtgcaaaggcatcaggctgaagtattagagcaacttatcgagaatcaaaggcttgatattgaggtaaggcgagcagaagtagaaacaaaatctaaggaaattgaggccaatgaaagaattggcctcagatctattgaggctcaggaaaaagtccaggtatctctaggacgtagagaaacaaccaatattctaatccgcgttggcgggtttcttttggcatttctcttcgttctgatcttcattggttttgccataaaaaatgatgctaaagatatagttattgagctaatgaagtatgttgtcccgcttatcattggtggacttggtggtttttatattggtaaagccaagggaaaagatgaggctagtggtgagtaa

SEQ ID NO: 198709 - DNA, 213 bp, Klebsiella oxytoca
atgcgtatcagaaaatcaggcagaaaagccatgatgctggaaggtatcatgacagacaatgttgtgactgcagatgccgcatccttcctgagcatagccaacaagaacaggaacgagatcgagtctgtaaaatttgaaccaccaaaaattggtggtaaaggttttggttacttcagagtcagaatgaaaaccagacattatgaggctcagtaa

SEQ ID NO: 198710 - DNA, 147 bp, Klebsiella oxytoca
atggatctggcgcaaggacgcgcccataagatgatgtgcattgcatcctcatatctactcatatcgcgtaattattaccctagtcatcttgcaaccaacattacccatgcgtatatttacaccaaaggtaattcaaccttttgttga

SEQ ID NO: 198711 - DNA, 696 bp, Klebsiella oxytoca
atgtcagaacaaactgcaccaaccgtcttctcattcgaatctacagtcaatatccgcatggtcatgatcgatcagcgtccatattttgttgctcaggatgtttgtagtgctcttgaaatccaaagtgttgatgttgctttgcgcaaagtcgacagcgatgaaaagggtacgtattcaatacggacccctggtggataccagtctttaagcgttgttaacgagtcaggcctttactggttaatgctccgctgccgtaaagcggccgtagaaggaacgagcgcttatcgcttccgcaaatgggtaaccagcgaggtgctaccgcagatccgcaagaccgggcgctacgttcgggaggagctatcaccggcggataaagcgcgcatgctggtgcaggagatgaccagcaatatgatgccggccatcatggatgcgctgcagattgagcagaagcactataactacccattgaagtccagccatcgcgagcacatccactcgccggaaggcgtgcttgctctgacgcagaactcaatgctgatgaagctactgcggcaactggacgctgatggccatgatgtatcaggcgcggcagcagaggtgaccaccatgtttagctatatcgtcggtgtcagcacttgcctgcgagatatcgaaacgcacgctcagtatgtgatgactaaagcaaagggattctga

SEQ ID NO: 198712 - DNA, 2469 bp, Klebsiella oxytoca
atgacggtctcaacagaagtcgaccataacgactacacagggaacggcgtaaccacatcattcccgtataccttccgtatattccagaaaacagatttgatggttcaggtagttgacctgagcgaaaacattaccgtgctgactctcgatactgactatagcgtgacgggggcgggaacgtattcaggcggcagcgtggtgctttcatcgccgctggcgaatgggtggcagatttcgatatctcgatcgctacccgttactcaggagacagacctgcgtaaccagggtaagttcttcgccgaagtccacgaggatgcgttcgacaagctgacgatgctgatccagcagtgcttcagctttttgcgcctggcactgcgcaagccatctttcatcgcaaactactacgatgcactgaacaaccgcattcgtaacttgcgtgacccgtcacaggcacaggatgcggcgacgaagaaatatgttgatggtcagatcattgacaatacgaacgcctggaaagccggagatgcagtacttgatcaaaaaattgattctaactttcttaggaccctgagggttgctgaagaatctgtaaagactctacccccacttgaagctcgcaggaattccttgcttggttggaacagtgaaggggatccgataccaatattctcaatgactgatactgctgatctagcctttaagctagcttctggagaggcagggcttggggataatttagtaatgcatttcccggggggcgcgtttaccagccccaggccagtgaatgatgttctcagggagggcgtgagcatatttaactgggagtctgatagcctgaacgatgatactctgcgttttaaaaaagccatgttagaaggccataaagttataaaagtgccacagcgtactgttaacggtccactgagggttggagaactcgatattaccgttccaattgttatacaaggtgagggggttatatccattgattcaacaggatccacaattatcaaaattgcggaagcgtcctacggaattcagtatcttggggataagagtaatcgccctcatggtggaggtctccgtaatatagatctcagaggagcaacagattactctaccgggatactgctaagggttgaatcgtggtcgtatttttggtgtgaaatgcttgctttacaaaacatggctggctggggcgcttcactcagaaatgtagcggagggaggcattcataattatttatgcaggcgtttaggaagtgaaaccacaggctgcattcgttttgaggattatcttgataatcccaataacaatgttaacaactttagcctctggcgagggacgttcgggttcaactcaggtacgtggatatatggcactgaccagtcaaatctggatgttgtttctatcgagaatcataaattcgaatacgatgataagcctgtatccggaaaccttacacaaaaatctgttatctacctggggcaggctaacagagtaaatataaaacgtaatttctttactaacttcaagcttactaacgccaacctctatacaaattgtatgagaataggcgttaattcacgcgtgaaacctcacatcagtgataatcaattttctggttgtgacaattcgctattaaacatcgaaggtgggacggttgaaggcggtgggaatgtggctaaccggggagatgcaacggctgatggaacctttgtctgcacgtcaaacctaccgcaggacattgatccgattgtttttcacactaacaatggcgctaaaaacaagcggtcatattatgaggctcctggttttttgtctgctcacaaaatgaccggattagtaaacaacccattcgttactgacgccaactctatgactcattacggaacggtaatgtcggttcctgctgcgactgaaattcgacgaggtgttatttctcgcgctctaatttctgaccgagaatttgtacatctcaccgctcggatgaaaaacgtgtcaggcgtggcctcgtcagttatcctgaatttagatggtgtggattttggtagtgtcagcgttgtggctgatggcgcgtggagtaattacacctggcaaatcagaccaaacaaaattactaacggtacattcattcttactaatggagcatctcaaatattatttgatggcatatttattgagaaaaaagattatctggattggtcatttgcttgggctcctggccctatagcaccaaatggttctgcaacatcaccagttcagagcgtgactgacacgacaggattcgttcccacgattgtgacagctacgccaaatggagcgcttaatggagccagtatgcaaccaccaaacgttgattccgcgggaaatgttactgtcacatgttataacactacagctgcgtcagtaacgccttcattctcaagaattcgtattcgctatgagtcttccggaaaaattagctaa

SEQ ID NO: 198713 - DNA, 156 bp, Klebsiella oxytoca
atgtcttttattgtcaattatcgtgcgcctggtagtgatgttgtgttcgatcaggaaacattcagttgcaagtatgatcttgatgatatgaatccagaagaaaaagcatacgctcatatggctactattgataaattcaaggatatggtccaatag

SEQ ID NO: 198714 - DNA, 180 bp, Klebsiella oxytoca
atgctgccagctggcatgattccccggcaggttttgcccggtgatatggttgaaattattcacgttgatatggatgttatcgccgttgtgcgagtagccgccgtgatgatcatcatcgtgatggtgatgatcgtcatcatgatgatggtcattgtcatcccagtcgatattgctgaataa

SEQ ID NO: 198715 - DNA, 834 bp, Klebsiella oxytoca
atgccaattccagataacattgctgccaaaatacttgttaaatcagctaggcattgctgtatttgcagaagattttcaccattgcaaattcaaatacatcatatcgtcgcgcagagtgaaggtggtttagatgatgaagacaatctaataccaatttgtatttcatgccattcatctgttcattcaaagatgcatatgacgaaaggatttagccgggcagaattaaaaggacatcgcgatgctgtgtacgatatggttgaaaaaggaaagcttcctgcgcaacctcaagtaaccggcgatgaaatgcattcattatcaacagttattatcgaaacattgaaagcagaggggaaaagtcaagacctttctgagcgtgcgacagagattctattagctgctgcatgcgaggaaagcccagcattaattaataggacagatgatggaattattatcgagtccaacggacagatctttcatttttattccaaggaagtaaaacagtatcctgatgagctatttgaacttgcgcatgctggtttcatgagccttgatggggcgacatcaagcataacgaacgccggtattgctcatgtgcaaaagattgtaaaaacaacagctaaatatacagagaaaaaagtcagatgcatgaaatgcagtctacactttactatcttttcttggtatccagaactgcatcgagctaacactctccattgtccagaatgtggacaatctgagggattgtttattgtttgggctcagcaaaaatttggttttatttttcagaaggtgccgggtaattcatcgctatgggacatgggaaatcttccctag

SEQ ID NO: 198716 - DNA, 993 bp, Klebsiella oxytoca
atggaaaaggagcaaggtttttggaaggctgaaacggttgcttttttggcattgcaatcattaaatggtgttggttttagagttttatataaggttgcagcgcaaaaaattagttttcgtgagctaattaaaaccgacgacattgattactttgagaaaatgcttcgatataaacttgatgattcaatcaaagagtctcctgagtcatggatgcagttcaaacttaacctatggaataaagggattaaacttgctcgtgaatattccaaaaaaaatatctggattctattttttgaccaagaaattttccctcaacaattgaagtgtattccggaaccgcctttgtggttgtttgttgaaggtaattgtcgaatacttcatcaaccatcggttgcaatagttggtagtaggaaatcatcagaagatggtttttggttaacaaaatatattgtttcagctatggctaatttagaaatggcatcggtcagtggccttgctgatggaattgatcaaaaagcacatattgagtctataaagtttaatatacccaccattgctgttttaggcacaggcataaataataattaccctcgggggtcagaagaattaaggtcactgattgttgcgaatggtggggcgatagtaactgaatatcttttaggccaaggttatagcgctcaaaattttgttcgccggaatagaatccaggcaagtctggctaaaattacggtgccagttgaatggaagattaagagtggcacggcacacactgttaattttacgaaggactatgggcgctctctggttatgctttatctatatgactcagatcttgaaagtgctgaaatacaaacagttagatcatatcttcgtggtaaggttttcaaaattccagctcaaacaaatgagttaatagattttttaaaacaaccagaagaaggtgagttacagaatacgctaggtaaacaagaccaaatcccaatggatctgtaa

SEQ ID NO: 198717 - DNA, 1245 bp, Klebsiella oxytoca
atggtagctaaacgacttaaaggagtaattcttagtacagaggatactcttgttaattctggtcaaattaaggctgatgtgtattctgaggttaagaaactaatgaatttcttttccttgagaggaattacgcctgttttactttctaaccgaaactggactgttactgatgccgatggtaataaaagaaatttttttgatgaattagaaaaacaacataaagatcttgtaatattctcaccgcagcgagataagcaggtacccttcaagccaagctctgctgcaacacagtatgtattggaaaaaatgggttgggaaccgaatgaaacagtatatatcggaagtggtgaaaccgatatgcgtaccgctgttaatggtaagatattgtttttacgagccacttggtacagtaataacaccacttatggttttgaattcagccagcctaaagaacttgctcgttttattgatacactctgtctgcgtgaacacttttggagtcatgaaattaaagatggcgatttcgaatactatgcgcttgcaccgtttagtactcttaaagcagaatttaaaaaatactctgaaaatgcgcgtgcagcggctaagtttgggcatggtgacgttgatttttggttgggtgcacttgtaactagtatgtatttcactggtattcatgaacgtatagatttcattgctgcctatcccggccataaagtcggagttggtaatgacaaaatgaatgatgacttaatgacatttggtaaatgtttcaataagggatatttacatgacctaattgaaaggcatcgtgaggctataaaatcacagactgctaggcagcgagggatttctattgaccaccataatcaacttaatactattaaattgaaaaagtacccaactaaaaattataatagagtataccaaagtccaccgctcagagcgggtaaaacagtattactagttgatgatatttgcacaaaaggttggtccttggaagcagcccgtaaatatatagagaggactggcgcaaaagcaattatggttacatggttgaaaacaattaatacagacatacaatgtattgcaagaacagaggcttttgatccttacaaggcaaacaatttttttaatgtccatatagataaaacatatagctatcatacgtaccatgttgacggcgcagcctcagaagagcttacggagcagttacagcaatatatcgattgggattggcccaaataa

SEQ ID NO: 198718 - DNA, 669 bp, Klebsiella oxytoca
atgacttggctcggcattccgtacccatcaagtaattcaagttttttagattcaggcatcttaaccttaggtaaattaccgactgtagtcgtagattctggttttggttgggataccgtttcagcaagtattttaggtgcgattattggtgctgctatccccgctgcaatctcatattatgcgatttcaaatagcgcgaaaacaatgaaagatgatcgcgaagagcatgctgtgtatgctaaagagcaattaagagcccaacttgtatcatcaagcagacaactatggattaatgagttaagggatagcgcagccaagtacatatccgtagctaataagcttaataacttacaaatacttataacaaatgagtttagaaaggatgaacaaaaagatgatgcatattatcgtgagattcgaatggaggctactaatatcaagagcgatttgacatttttcaaagcaaaaatagaaatgctgctaaatcctaacgaacatgaatcagatgcagtaataatcgctatgaataactatgctacaattactaatgaatttaagccaggtgatgaacatgactttgaaaaaataatggaagttatcaaaaggtttaaagcaaatattcaattaatcagcaaggctgagtggaaaaaaataaaagattttaggtga

SEQ ID NO: 198719 - DNA, 144 bp, Klebsiella oxytoca
atgcatttaatgcttcacctgccgccgcgcggagacaactccaaaaaagctctgattcttaatcttctactgacctttgagtaccctccagaaaaaggcttgttcatactgggtctagctaaacgttctaatatgctgatatga

SEQ ID NO: 198720 - DNA, 948 bp, Klebsiella oxytoca
atgaatgaacaagcaaaaattgctttgggcacatggtcctggggaactgggcctgctggcggagatacagtatttgggaacaacctcactgatgagcaaatgaaggcggtgtttgatgctgctattaatagtgggttaaacatttgggatacagcagcagtttacggtatgggcagttcagaaattgcattaggcaatctggttcgccagtatccacgaaataagctaataatatcgacaaaattcactccacaaattgccgatgaaagcgtatctcaacccattgagaccatgcttgaaggtagtctacagcggcttggcgttggtgagatagatatctactggatccacaacccgcatgatattgaaaaatggacgccaggcctgattccacttctcaaaagcggcaagatcaagcaggttggcgtttcgaaccataatttggatcaaatcaagcgtgttaatgaaatactcggggaagctgccttttcaattagcgcggtacagaaccattacagcattctttatcggtcatcagaagatgctggaattttagactattgtaaaaaggaaaatatttcattttttgcatacatggtgctggagcagggggcgttgagtggacgttataacccgcaaaacccaatgcctgcgggcagcggccgtgcagagacttacaaccagatattgccacagttacaagtgcttaccaatgcgatgaaggtgatcgccgacgctaaaggggcaagtgttgcgcaaattgcgatagcctgggctatcagcaaaggtactattcctattattggcgcgactaaagttcatcacgttacagatgctgcagcagcggcttcattaaaattgagtgctgatgaaattgcgaaaattgaacagctttctattgatacaggtgtcaatacgaaaggtgcatgggagaacctgatggtctga

SEQ ID NO: 198721 - DNA, 408 bp, Klebsiella oxytoca
atgagcggtgatattatcattatgggtatatgggatgcagaaatgacacataagcaatcagtgatagaaattttagactatgccctcaatgggcaagccttagcagcggatatattttcgcagaattttagacagtatctgaatggtaatactctcgatcttagtgagtttcatgagagtattggcaggcttcgaaaaaaatatgtaaatgttaatctaaaaatattatcaatggtttcacgtgaaaataatgttcattctcaccatcttgtatcagtgacagaaaatagtggtgatgtaaaaaaacacgaagtgttctctaggtatgagttctctaataataaagtcattaattgttatgaatccttgagggagataagtgatcttgaagccttggggcatttatga

SEQ ID NO: 198722 - DNA, 1221 bp, Klebsiella oxytoca
atgcaaaatacgaaaagtaccaaatcacgtgaacaaaattcacagtcatccatgtcccgtgggttaattttcttgtttaccctcgctggtgctgcggcgatcggtaatctttactgggcacaacctttactgggaatgatcgcccattcatttgggatccctatctcacagagcggcagttttatcacttttactcagttgggctatgcactgggtatcctgctgcttatgcctttgggggatgcaattaatcgacgtcgctttatccctgtactgatgttcctttcggccatttttcttgtagcaagtgcatttgccccgatgtactggtcgttactggcagctctggcgcttgtcgggatgacaagcctggggggacagcttttacttccacttgccggagatcttacttgtgaggaagaacgaggaaaggttattggctttattgcctcaggaatgttaattggtacgatgttatccagactgtttggtggggtcatcgctgactggtttggctggcaggcaacctatatcgctgcaggtgttatagaccttagccttgctattactttgctagttaaactgccggatgacaaaccacgtaataaaatagcctatacccaattacttctttcaatcatcgatattgttaagaagtctcgccctgtacaggcaaccattctgttaggtgcctgtacctttgctgtctataccatgttctggactgggctgacattcctgctaagtgcagccccattctcatacacgccgacacaaataggattgttgaatcttgtcgggcttctgggatcatttgcagctaaaaatacaggaaagtttcatgacagaggccagtccacactcgtctctggtattggaattggtactgttcttgcgtccctgatcattgctgctggtgggagtcactcgatagtcgtcgtaatgatagcgactgtattgttcaattttgccatgcagatagtttttgtgcttagtcagactcgattgctaagcatgcaggcagagctacgaagcagactgaatactgcttatgtggttgcatgctttattgccggtgcatctggttctatggtttctggtaaattatggcaaacaggttcgtggacacttcttgttgccggtgaagtggccattattgtgttggcattgatatgttggtttttctcaagaaaaacacttgagtcagttgaactctcctaa

SEQ ID NO: 198723 - DNA, 906 bp, Klebsiella oxytoca
atgagcgttaatctcgaaggtataagtgtttttgtcgaggctgtggaatcaggaagttttgcacgggcggctgaacaactggcacttacccgttcagcggtaggtaaaattattgcgcgcctggaagaacggctcggtgttcgtttattttatcgaacaacccgcagccaacgccttaccagtgaagggcaaatctattatgaacgttgcgtccgcgcactccgtgagttgaaggatgcagaatcactgattgactcaggccagacagaagttattggaaaactgaagatatccatgccggtgctgttcggacgatactgtgtcgggccagtactcctctcgctggcatctcaacaccctaaactcgagctcgactgccacttctctgacagggtcgtggatatggtgaatgagggttacgatctcgccatccggttcagttccactgacatttcagccaacctgcagtcacgaaagattgctatccagagaaaaatagcctgtgcagcacctgattatctggatcgaaaaggaatccccctggttcttgatgatctggtacatcatgaagcactggtctactggaataatgggcgggtttcaccttggcagtatcttgataagcacaatgaaatcattaacccggagctgaattggcggttacaatttgatgactatcaaatgatcgctgatgcaacagtgcggggcatggggattgcttgtctcccctactggctcgttcatgatcatctcagaagcaagaccctgatccccctcttcgaagaactacatacgccgccctttcaaatctgggccgtttggccaacaacccactattatccgatgaaactccaggccgctattgatacgttatgtgaaaaactaaagtgggtgactgacttttag

SEQ ID NO: 198724 - DNA, 936 bp, Klebsiella oxytoca
atggaaccattagcgctagaccgtctgacgggcattattgctttcgcaagagcggcctctctgggaagttacacggccgcatccaaagtgatggcaatttcaccctcagcagtcagcaagagtatcaaaagacttgaggatcgactgggtttcaaactatttaaccgtaccacacgcgcactgacactaacacctgaaggaacagaactcttccaaaaggcactgcgactactcagggatgcagaggacattgagcagacggcttttgctgcccgtatggaaccttctggaaccataaaaatcaccgcgccggttccggtcggtctccatctgattgcaccgcagcttccccggttccgtgagcaatatccagctctttcagtcgatttaaggctaaacgatactttcacggatttggttgaagaaagcattgatgtcgctatcagggttggacctctcttagactcgcggttgattgcacgcaagcttgcgacaaatatcgtttgttgctatgcatcgccagcttatatcaaagcacatggtacgccagccagcccgacagaatgcagcatgcacgagctcgtgaatgtccgctatcaaagttcgggccaaatgatgaaatggatgttcaatgttgatggcgagatcattgaattctttcctgatgccgccatttcggtgaacagtacggatgcagtgctcgccttcattcgtagtggcggagggattggaatgctgccatccttcattgcgaacagctatgtggcaagtggtgaactagtgcctgttatgcaggattactgggtagcgaggaatgatatcacagctttctggccggaaaatagacgcggaaaccctaatgtcagagtgtttatggagtttctacagagtgtctttcctgatcccactccctggaacacgcgtttcagcaactaa

SEQ ID NO: 198725 - DNA, 735 bp, Klebsiella oxytoca
atgtctacccaaaataagattgcgttaattaccggagcaaacaaaggaatcggctttgagactgctctgaaattaggccagcagggtattaccgtgtatatcggttcacgtgacagcaaccgtggtaatgcagcggtggaaaagttgcgtaatacaggtattgatgccagatttatccatattgatttgggtgatttggtgacggttgacaaggctgcggctcagctcagtaatgagcatgggtacctggatattctgattaataatgccgggatcatgagcactgaagacggttctccgttaacaaccgaccttggtgtggttaaagaaacctttgaaaccaacttctacggcgcactttacgttagccaaaaaatggttccactgttagagaaatctttagctgcccgcattgttaacgtttccagtggcctgggttctctggcacttaatcaggatccctcctgggaatttgcagatgcaaaactcatcggctacaacgcatcgaaagcggcactgaacatgcttactgttcagcttgcatgggcgtttaaggaaaccggaattaaggtgaactccgcaaaccctaactatacgaataccgaactattgcctgataccactggtggccgtccggtagaagatgctgcaagagtcattattcgtctggccttgttggctgaagatggccctaccggcggcttctttgaagacgacttttcgcttccctggtaa

SEQ ID NO: 198726 - DNA, 753 bp, Klebsiella oxytoca
atgataaataatcgatttgagaataaggtggcactgatcactggtgcaggaactggaatcggccgggcagtagcgcggcgattcgccgaagaaggtgcacaggtattgatcgttggacgaactgaggcaactttgcaggaagccgcttcggtagataagaacatctgttatgcagtggctgacatagaaaaagatagtgatattgagaacattgtttcagaacttaaacagaagtatgggcgtctggatgtacttgtaaataatgccggatgggctccagtaacgcctatctctgaagtaaaaatgagtgagtatgataaggcatttaatatcaatgttcgctcgttagtcaatctcacgcttcatgcattgcctttgttgaagatgagtcagggtaacatcgttaatatgtccagcgtgatttgtaaaaaccatcttcctaacatgtctatctatgcaggaaccaaagctgcagttgagatttttacaaaaatctgggcgaaagaactcgctaaagatggcgtacgtgtaaattctattggtgttggctctattaagactcccatttatggcaagactgaactatccgacactggtataaaaaaacatatcgaagccatcgagagagctatccctcaaggccatttcggtcaacctgaggatatcgcagccgtcgccgcatttttagcgtctgatgaagcccgttttgtaaccggctctgattatggaattgacggtggctttggagcctga

SEQ ID NO: 198727 - DNA, 690 bp, Klebsiella oxytoca
atgaaaatttcagtaattggaacaggaatggttgggcgtgctgttgcagaacgtttaaatggactgggtcatgataccgttatcggcacccgagatccggcagcgactcttgcacgtacagaaccagatatgaaaggtacgccggctttctcccattggcatgcagttcatccacatacaaaactggtaacaatggaagatgcgggtaaattcggtgatgttattgttaatgcgaccagtggttctgatgcgatttcagccctcgaactggttggcaaagataatcttgctggtaaagttgtgcttgatatttcgttaccattggatctttccgagggattgccacctaaattactggtcgccaatgacgacagtcttggagagcaaatacagcgtgcattccctgaagcacggattgttaaatcactcaataccgtgcaatttgagataatgatggacccgaccctgttacctggaactcataatattttcgtttcaggtaatgacatcaatgcgaaaaatacgatccagacattactgaaagagtttggctggtcaactgaatcaatcatcgatcttggggatatcaccacttcccgtgctgttgaaatgtattcacgcctgctatttactcttgctggtaaatttggaagctaccatttcaatatcgctattgtgcgtccccagtaa

SEQ ID NO: 198728 - DNA, 360 bp, Klebsiella oxytoca
gtgctaaaacttaaaaatcttatcggtgaaattactgagtggatagatgagaatttacttgaaaacatgacaatagatgatgtggctgcccgttcaggctactcaaaatggcatttacaacgagtatttttccaagttaacaatgccagcatgggaaactatatcaggaataaaaagcttgagatggccgcaaaggatctcgttgagactgaagacagtattgtgactatagttgacagatatggttttgaatctcaacagtcattttccaggagttttactaaacaattcaacctgcctccgggaagatatagaatagtgaatgcgaaaaataaatataataaaaagtgtttcttttag

SEQ ID NO: 198729 - DNA, 903 bp, Klebsiella oxytoca
atggctaaagaccattataatgatttgatggcatttgtttcggttgcatcagagcttagcttcacaaaagccgcagccaaaatgagcatatccccttcggctctcagccataccatacgtaacctcgagtccaggttaggtatgagactgtttaccaggacaacccgagccgttactcttacagaagcaggccaacatctgctcactggcgtttcacctcatttagaagcaattgatcagcagattgatgcacttaatacgctccgtgacagacctgccggtacaataagattgtccgcgcctgacctggccctgaaattttatctatggccaaaaatgaaagaatttattgcgcggttcccggatgttattgttgaaatcagcgtcaataacggctttgttgatatcgtttcggagaatttcgatgctggcatcagaatgggtgaaaatcttgcaaaagatatgatttcagccaagattagtcctgatacacgcttccttgttgtgggtgcaccttcatacatttctgataaacaggccccagttcatccacgtgatctggcacagtactcctgtattaactatcgcttttctgcatcaggcccaattcttccctgggaatttgcaaaggatgggaaaataattaaagttcgtgttaatgggccgttaattttcaacaatgttgaaaatgctgttgaagcagcacttgccggaatggggctggcatatattcatgaggagtatgcagctccttacataaatgatggcagactattcgaatggctttgtgactggtcgccatacagcgacgggctgcatttgtactatccaaaccggaaccatacttcttcagccttatcggctctggcgagaacactacggctgaatgaaaacaaaggctga

SEQ ID NO: 198730 - DNA, 1581 bp, Klebsiella oxytoca
atggtcagtaaacgactgctcaatcttactcttcccctgattctggcagcatgtacgttaggcagtcaggctgccaatgcaactgaggttgcaacactttcaggtcccgttgaaggaatctcaaggcagggcatagaatcatgggaaggcattccctttgctgctgcacctaccggtgcactacgctggcaagcaccgcagccagtgaaagcatggagccagccacttaaagccacaaccccttcatccagctgcgcacaaaataccgatttgggtgtttttgccaccgcaggtggcagtgaggactgcctttatctcaatgtttatcgcagttcagacgcagcagctcaaccgagtaaacgccctgtctttgtctggatttatggtggggcattacaggttggtcaagctgaccactataaccctacaaaactggcaaagcagggtaattccatcgtagttacattcaactatcgtgtaggtcttttcggtttctttgccaatccggcactcaatgggaaagataaagattatgcaaactacggtttaatggatcagcaggctgcccttcagtgggtaaaagataacatcgcagcattcggtggcgaccctaataatgtcaccatcgctggcgaatctgctggcggtgacagcgttatggcgcacatcatctcaccggcctcatcaggtttgttccagcatgccatttccctgagcggttcaacactcgtgacacgctacccagcgttcggtgcatctgttcctttaaatatcgcggtaaaaacaggtgatgagtttgcgcaatcagtaggttgccaacaggctgatgcagcatgtttgagggcactgtctactgagcaaatcctgaaggctcagacaccctacatccttaaacagtttattgtggatggacagctaattcctcagcatccagctgatgctctggctaaaggaaaacttaacaaaaccactctgattaacggcactacgcgcgatgaagggactttgtttgcagcattacccgaactggcaacagggaaaagcatgactgaacaaagttacccagaagtgatgaagagcatgtacggagaaactcttctgcctaaggttctgaaggaatatcctgtatctgaatacaataccccttcagaagcatttgccgcagcggcaactgacagcctgttttcctgccctgctcaggaagttaatcatctcctgaccggaaaaatgcctgtttatgcctacgagttcagcgaccagacggcacctctgtacctgaatccactgacgttcctgctcaaggctgctcatacctctgagcttgcgtatattttccctgggttccatggcggctcagataaggaagtgaaactcaatcccttgcaggaaaagctttctgatgaaatggtaggctattttgctaatgtatctgccatctctggcaaacaagcatcatggccactctttgatacacaaaaagagaattatatgacgtttgcccttcctgctggtcgaatggtttccggacgttttgcacgtacccaccactgcgatttctggaaaacatcaggcattttctaa

SEQ ID NO: 198731 - DNA, 657 bp, Klebsiella oxytoca
atgaacggcaagggttttatttttagcaccgaagatgaaaacacataccccgagcagcaagttcttgacacgaatttatttggatatgaatatgtactagttcaaaaattattatctcatcatcttggcatccctaaacccattacaggtgcaaatggcatcaacaatggatttacagtaacatcctcaggggatacctttcaaattttcgaaaaaaagacatggttagaaagaataaaggaacagctgtattgcatatcagatcaaattaatattgattttgacgaaatatttaactcactagacgccaataaattttctcaaccagcatacttccctatttataacttcccgaaagatgcctgttttgtcatccgccgggatgaaatcgaaaaaatcacatccttaacaatcggtaataaaaccaattcagaatctacacatcgcatatccactcctctgtctcgtctgttatggctggcatgcaaacacaatgaagctattaatcctttaatcaatcagccttataaactgatatctattttcgaacaatgggcatcatccgaagggattactgacaggcttagcggtgacacactaaaaactgcacttgagcgcggttcaccaaccacttctaataagccattgaatcaatga

SEQ ID NO: 198732 - DNA, 582 bp, Klebsiella oxytoca
atgttcccctcactgaattattcggtattaacacatgcccttgccgcactcaaggaaggcaactttcgttattgtgaaacgttaggattcacattcgacgaattgaatgccctcaatcagctgtccctcgacgaattgttcatcgtcatccgtgcatcaacggagtttatgtcgatcacagtccatcatgacgccttacaacagatcctgacgttttcacgtgaggaggcccgccatcagcaacagattaatcgggccataagattgagagggtctattgctctcatgaatcatttttttggcctcacctcaaatgaggtttgtactcgtcgccgattgctgggtgtcaccatcccttatggccgaacgcctgtccctgatgaaactatcgatgctgaaatctggttgtcatggcaaaagaaccgccatgacaaccttgatacttctgaagcactggaagcgatgatgcaggtcactgaatcattgtcttctcgggaaaaagggccttccctcaccgccgtctggaaccgcatcaccctttgtgagaaagaagcactgaacaggagggcatcgcatgcctga

SEQ ID NO: 198733 - DNA, 210 bp, Klebsiella oxytoca
atgcctgatgagatcgaccgtgatcaagaatttaatgagcagcgtctggaggaaatgattgaacagagtcgttttaaaccggctgctactccctcacgagcccactgtcgtttctgcggcaagcccattccagagaagcgaaggcagtcattgcccggggtgacaacctgtattgaatgtcagtccatacttgaacgccgcaatcgctga

SEQ ID NO: 198734 - DNA, 234 bp, Klebsiella oxytoca
atgagaaaacccatctaccacgtatttgtcacccaggaaggtccgcccgatccgcagggcgaaaaaaacacctactggaccagggttggcgtggcatttgcccataacggcaagcccggcctgaatattgtcctgacacccggtattgcagtttccggcaaactggtcctgcttgagccacgggaggatagcaatctgccacagagtacggagcccgacgaaacggcgctttaa

SEQ ID NO: 198735 - DNA, 711 bp, Klebsiella oxytoca
atgctttccaccactgcctttctggctgcggccatgcagtgtgccgccagcattcatccgtccaccgcgctcgatgtggcacgggtggaatccggttttaacccttatgccatcgccgaaattattccgaaggccactcacgccctcggagataacaatgttatctcccatcagcccgccagccgggacaaagctgagctcattattcgccgcctcatgacacaaggccgccgttactctgtgggactgatgcaaatcaccagcaccaatttccatcattacggcgtgacggcctctgacctgcttgatccctgcatcaatttgtccgtttttgaacgcattctcagcgactgctaccaacgtggcggttctcttaaaagagcgttgagctgctattactccggcaatttccgtaccggacaagagcctgaagcggctttttcagggaccagctatctgcagcgggtgggttatgtttcggcatccccccgttatgccgtaccgggcacccgcgcggataaatccacaacgccgactcccctcgaagccatccctgttgataagccatcccctccccgtctgatctggccggggaccgtcgtccggggcatccccgcaaaactccgtcaggagaaaatcaccatcgcacagacctcaacgccatcagggcgccggagcctctctcaatcagcccgtgaggaacaaaaataa

SEQ ID NO: 198736 - DNA, 138 bp, Klebsiella oxytoca
atgaaacgcttaattgcgctggttttgctgtgcgcgcttttcggctgcacgcagtcttcccgtcccccagcttttggtggtcagggcatcccggtgaacacccctcagataatggcggagttaaacagtcatgagtga

SEQ ID NO: 198737 - DNA, 1218 bp, Klebsiella oxytoca
atgaacgatgaacacccgcatccggtgcctgatggtgcagagccttctccttcgcaacaggatgacgatattgccgctctggagcgcgaagcccgtgcaaggcgggaagcgacgcttctcaccgcgcaggacgatgaagagaacgacccgctacaacccgccgtcaataaactgaaaaagcgcaggcgcgggaaaaccaccgcgtttctggcgatcgccgccgttgcgctgattgcgctggcatgggcgggcaactgggtatatcgcaatctactctggcaacccggtgaagagaagcggcaggatgctacgccacagccgaaccgcagcgattaccggcagcgtaccgatctgggtacgcaagataccggggccgaagcatccgaaccggcagaaaacaacccgcgcatgacgacagccccggagcctgagatgccgcctcaacttgataaagcccattttttggttcggcgtgatggttcagccgctgcggctcaaaacccagtacggacccgacagcaggagatgacgcaggcggcctctgccggacagcaaccagacaccacgtcgccaccgtcggaaccctccccggcagcagtccggcgtattccttacaacccggacctgtacgtcccggaaaataccgctattccctgttcactggattaccgctttgtctcggatcgggcggggaaaatccgctgcacgatcgccgacgatatctggagtgccagcggtaatacgaagctgattgaaaaagggaccaccgccacgggcatttaccagacgggtgcggaaaccgggatgacgcacggacagggacgcgcctttctcatcatcacaaagctgcgtacccgccagcccccttatcttgatattccgctggtcgatacccgcgctgccggagggctcggcgaggctggcgttgatggctggatcgacacgcatttcagggaacgattcggcggcgcattactggttggtatgatccctgatattggggcatgggcatccaacagcgccggtcagaaagatcgtaatacggactataccgaaaacagccgtcaggcgatggcggatatggcgcgaaccacgctggaaaacagcatcaatatcccgccaaccctctacaaaaatcagggcgagatcatcaacctgaccaccggacaggatattgatttctcaggcatctatacgctgaggatgaagagtgaataa

SEQ ID NO: 198738 - DNA, 267 bp, Klebsiella oxytoca
atgacatgttatcgtgccgggggcgcattaacagagctcatgattgactcacgggaaggacaaccgttctgcctcaccatcggtgaaggttctctggacgtagcgccttttacctcagacgatatccggctggcacataagcagatatcgctgcctgacgtcaccgatattatcattcttgtgacgacattagcccgctatgccggactatccccatccttctccgttgatggagaatcatcttccttgctggagttcagctcgtag

SEQ ID NO: 198739 - DNA, 1008 bp, Klebsiella oxytoca
atgtcgaagacgaaggtactgttcgcttattgccatgaactggggcgctgcttgtccattgatgaagcgcgaacggaatttttttccagaaagccggaagaaagaaagcggttcactttttcctgtagcgatcgcaactgtaatgtcaccatcagtggcgttaactatcacgtcaaagctgaagatggtgaaaaattcaaggctgcacacttccgttcaccccaccctcacaagttcggatgtgaatgggtcgcgttcaccgaagatgccgatcaggacagacgtccggacgaatcagaagctgatttcacggaaagaaaagcaaagcaaaagctgacggactatatcaactgctttgatccttcaattgatgatcctaatggcgagccagccgatcccgttaagcttgctactcctgcacatgtaaaaaaaactgacggggatgatgataagcccggtacaggtgaagagccccgctggagtcgctatacgcgaactaaccagcttcagcgacttatcgacacatggcaggaagcgaaagaaacgctgcctcaggatgagttcagggcgttgagactcaggatcatgcaccacagtcaggtctatcttcataaatatataacgcatattcagcgaggattgactaacccgtacgcgggcgtcatctatggcggtgggaccctgatgcatcggtatgggcggggttttcttattaatttctttgataaacatgagggtaaacctgttcgcctgtatgtcagtaaagatctgatggcgaaaggtcggtttggtcattatatcgatgaaattctggagacagataacgtcagatatttccgtgtatttttgctcaatccggttgtttctgaacgggaaaacagcacaggaaaatccgttatcaaccttgaaatatcaaagctgcgtcaactggcgatttactacgagctgaactccagcaaggaagatgattctccatcaacggagaaggatggggatagtccggcatag

SEQ ID NO: 198740 - DNA, 399 bp, Klebsiella oxytoca
atgatgaaggttatcaacatgctgctattttctctggtactttccggctgttcttcacccccgccaccgatgcctgttgaatgggataaaccgggcctgtcagtcaataccagtttaccgcgatggcgagacaacccagttattatttcttccccggtggttaaagataaatggttattatccattcacgcacggaattttaataagacgcactggacgcccgccatattttacgcggtcgcccactctgtgcgtattgttgttgctgcaccatcaggcgcagaattctttactgcaaaaaactggctgcgtcgatatggcgcaaaaggcgttattaaatatcagcctgtctctggatgcctgacatgcagcgacacccgcatttatttctcgcattaa

SEQ ID NO: 198741 - DNA, 306 bp, Klebsiella oxytoca
gtggataaagaagatctttttatttgcaacattcactcaatgcatcacgacagaatatctgtcacgtgtatctatgattctctgtcaaaaaaagcacatcagggatgcgggctttattacgagatatatgagagccagcttatcggtttattgcgacatcatctttcacagcttaatgaatcggacgcagagaggctcaggcggtatgccgaaagtcagggaacgaaaatcgatgatgaaacgtaccatgcggcattaaatgctgaacgggaatgccgggctgaaatagcccgcgaacagatgtga

SEQ ID NO: 198742 - DNA, 1083 bp, Klebsiella oxytoca
gtgaaaatcgtggttgactacagagatctgaatcttaaccgagaaaaccttgatctcaatatccagaactttctggaatctcacggctatcagcttgatggagatatacaaacatttcccaaaaggaaaagggtggtttttggctctactgggtcggaattctcaactgttgattttcacctcaaccatacaggtacaactacgattcagtggaaactaggtaaaaatcaaccagttggtgaaacacttgcttcatatttaagggatacaatcgacccagcagaatttgaaaacgtcaattattcattgaaaggaataactacagaatcattcgaccctatattagaatgcgttttggaggctggtgatattgaactcaatctcttacgtgatgaagacaactgtaagcaggtaacgctgaaaagtattgcacatcaagaccacttaactctcactcaccatcggcggacaagagttttacaaatacagggtaaacctttgtcatgttatcgtcgtgttattttcatgcttacagatttactggatctcaaaggattagaacaagtcttatatcgtaaagatgatagtagcgctgagatagttagaaaggagatggccgatgactatataaaaacagcatttcctagaagctatgaactcttacctgaatcagtaaaaaaactgctaatctctagctgttgtgtgaaattagcctcaccacagttaccagattattgcctattactttatccggacctacgggctctcgaaggagtgctgaaagagcagatgtgcatttacaatatgtctgttgaagatgcagaacatggttttggcgacttttttgatatcaatcgtgggttatgtactttaaaacctcaatatagtgcaatggttagaaatgtagggatgcaggatgctttgaataacggctatacattttataggaaacatcgtcatacacttttccatatggaagagtttgcagatggcagtcgcatgatagatacccttgaaaaggcaataagtttatctaaaaacacatattctgcgatcgatagcttatatacagcgagaatgtga

SEQ ID NO: 198743 - DNA, 339 bp, Klebsiella oxytoca
atgattcaaaaaatacgcattattggtgaaatagctgttataactgccacagcggattttcaccctttgcgtcaattaaaaggtctggcaattgaactcgatcaacttggttttgagggtgtagtgctgtttgacctattagctgtaaatggcttagcagagaaccgctttgcatctatgaaatttaccaatagaaaatttgttcgttcctcgttcgtgctagaatccaatgtaaatccaagtatcaaaaatgaacaggatgcttttgctaaacaagatcagacatttctacttgggagcgtactctcatccactgagattgaaaagttcacacactaa

SEQ ID NO: 198744 - DNA, 1221 bp, Klebsiella oxytoca
ttgaaatcagttaagtgtaagagcaatggagagaaagccccagtagcacaagcctttaccccagaggctagcttaaaacgcaaaatacgctcgcattttacacagctggggtttcaaaaagggccggatggaacactaattcgtcctgactcaggaaaagaatctatccgtcaactgcacagctctcaacgtgaagaacgtctacgctcctctgagcaatttatatctgaattcttgccaagtgccataccatattttgccaacggaaatgagattgatccaactaagattcgcttatcattgataaaagtttctgcgaattcgttcgaatccaaactctttagggcagcatctttaacctggtctgttccagtatcaaatggttacggtcgccgcatgcggtacctcgtgtgggacagagggcatgaccgacttgcaggaatatttgcattaggagatccagtttttaacttatctgtacgtgataatttaatcggatggacatctaatgatcgatcaagtcggctagttaacatacttgatgcttacgttcttggagcggttcccccctacaatatgcttttaggcggtaaagcgattgcctgtttaatccgctcacgagaagtttatgacgatttcctacgaaactatggttcaacgacgggcattatttctggtaaagataaatacgctcacttactagcagtaacaacaagttcttccatggggcgttcatcactttataatcgactgaagctagatagcataagttattttgaaccaatcggttataccgtcggctgggggcattttcatattaccgatgagttatttggggagatgcgtgaatatcttcgactcgcagagcacccgtatgccgatcaacattgctttggcgaaggctcaaattggcggctcagaactatcaaagctgccctgaaacaactcgggattaaccaagctgttttacgtcatggaatccaaagagaggtatttttctgccagctcgctgaaaatgcaaaagaaattctcgcgactggtaagggtacacccgacctttcaaccttaaaaactattgatgaaatatctgaacttgcgcgtaagagatggattgaaccgcgagctctaaggcagggttattataagaactggagacgggacgatatatccttactaattaaaggattaaaactggacgtaataactagtaaaattgcctaa

SEQ ID NO: 198745 - DNA, 2826 bp, Klebsiella oxytoca
gtgaatctagcagaacttcaagagaggctataccaacattattctcgactacgtgatctgcggactaccgaaaattatcccgtttatgcgatcgagcatggtctgagcgaagcggagatttctactgctcaatcgcttctcaatgccaacttgaatacaacaaaacgtgctactcgcacgttttggctggtatggatcgctgccgctgctgagataggttacacatatgacggaaccgaatattgggattcctttgctatagcctttccctcctggcctaaatttggagaccgtgatcaaatccgtatatggtatagacgatttactactgattttaatagtgtcaccccctccgggtcatgggcacagcagttccctattatttcttggccaatcacgcaagccattctgccaagatatctacaacgtttttttgccgatcacctatacaatcttcgccatttactgactagaagtggtgaacttacattagaagaaataggtgaactactaagcgatgaatatcatggtggttcatctcggttcgagggtttcttacaacaaaaaactctaacagcacgaattgtaatggcgatgcgtcttgaagatgtcgttgatgttatctctcccattgagaaaagcacattgcgccgcatcatagacgacttcgataagcttggttcatttggtactcgcctaaaggaagtaagacgagtactccgcgaggctcgtttcgtcaatttgtatagtacaagctttatatcttcttcaaaaaatatccaagaaaatgtaactctctcgaaaacttatacagtaaaacctcggctaattgcacggcaaagaggtttaacagagtggaacctaaggctcgtaattcccgacattgcaacatctcttcgtcaggccggactatccccgcttgatttagaacactctcatatgcgctttcgtttttatggtggaggcaatgcatggatgccgggccgggcattattttcttacaccggaggaacagaagaaccactctcggcatacccagctgataatcattctgttttcgaatacgatcgcccttttgaaaaagttacagcctctttgcaggaaaggctgcttttccctgcaatgactttacgactactaaaggtacgttcagatggtacggctgttgaagtcacgggacggcatgtaaaagctaaccaagcttatttacttgtctgttcaaatacagtgcccactgaagttatcgatagtctatcgcttactcctgttcagtcacagacaactggagccgacgtttggcaattttcaattcctacgaaagtagatgctggaataatagcagcattatcgtcgattgggcttggatataagttaggcatgcgagccgaatcaataggtatgactgcccgatggaacaatgtagatgacgcgctggagtttcttgacacagaagttgtcatgttttacctagcatcggatgttgaagccgacgaattacagatcattattaataaacatcctcctgtacatctgcgtccggaacccaacggaaaaacgttcatttcgctcggtaagcttccaataggtttgtattatgtatctttatctgcactcggcgtagctaccggtagcaacataataagcgaagaaatcctcattagggtgcgtttagcagcaccttggcaaaagactgtctccggaaaagcaggggttagcctcaagcttgaaccgcagggagccacattagagcagtttcttgaccacgcagccaccctgaggtttatggctcctgccgggcgtattgttaaactggaaatccgtttcttcaacgcagacggcacgctttttcatatagagccgattggcaattacaaggctcctgttgacgatgagagaatctctaaacttatcgtacagaaactgacagcagacaactacattgaacatgttgatcgttccgcgtgtatagaattgctcatatcgttggacgaatatggcctagagagcgtgcgattcgacaagaaagcagaacctttacggtggctacgtttagacaaacgtactatccgactcaccgatgatacagaggaaacaagtctgccttctgtaaagagatatgatttgaacgctgttgaaattggtcacgaagtggactatgaacaggctctgtccggactagagcttcgtggtaagggcggtttgtttgttgcaagcatcaatgatcaaacatacgaagtgatcgctatggcttcgcagcgccaaatttctgattttcgagatctgaatattctgactcatgtgtccgcagaagaaccacagccgctaaccattatcaatgctctgggatattggcagggagctcggaggctgataggaccaatggcttttttggctcggcgcaacgctattctcacacttgaaaaagaacttgaacgatatctatgcggtaatgactgggcagaagatttaaacaaggttcaaagtggtaaaagggacattggatttctttataggcgagtttattattcacaaggattcgcttcaggcttattgagcgcacaagattggcaatatgatcatgatgcagaaactgctgaactagagttttttcgactggctcatgcttataaaattccggaaacagacatcctctatcgtcttgcactgaaattggcatttcaaccgcataccgtgaaaccctcggacctcgcatcaccaaatgcattcgatttgctacggaaaaactctgcgctaatccgcggagcgtattttgcgcgtctagtggcaagcagccagaaaacgagctctaagacggaggtcttatga

SEQ ID NO: 198746 - DNA, 1065 bp, Klebsiella oxytoca
atgaacaatattaaaatacttagccgggctgattgcctaaagtattcatctcgctcattaggacttcctgacttgcaaaaacttgataatgcattaatcgctcaagcgttgcggagaaccgttttcattgaagctccttgttcgattcggacagtatgctcactcgtaatgaattccctaggtccattaactgacgagcctgagaacttaaagacactcatctacgatattattgacgaccttgtcaacatgggtgatcttcttgaaatgcgggacgaaatcgcgggggaaacgaacctcattttgcgccctgctccaccagcgtttgtgcttcgaagagatgggacattcattatagtgggagtggctggtgatgatgtcactccgccacaggtaaatgactttaatctcgtttattacccgagtggtttaaggatactcacaccaagcaatacgcaatcatgtcggcaaacacttatcgatctaggacttattgagttacctatgattacatggctacgtgcaccagtttcgattacagccgacaaacttgtaaaatcgtggatcagcagactccccaacgatatacacccggaaaaaatagagaattttgagataattgatattagcaaaacaacttcatactataaaggcagatggcagtcactaaacgaacaacattctggaatttatattgcccgacgcccacaacgctacggggcaagactgtggtgccttgcagaaattcgggacggattagtccaacgcttcgttgatattcattcaggagatgcgcgctttcgagattgtgatgaagcctggcgattactcgctgcgatggatgcacttactggctctccgcaacaggtcagagttgtttatgaaaaggagataactgtgctgtcctttacatctcctcttccttcttgggcgattaggcgtcttagtctggtcggtgaacgtttaaagcctcatcgcgccttgctgcaattttcactgcctttacataatagtgaagaagaacttcattggctagaggaatccctctggctaactcgggattag

SEQ ID NO: 198747 - DNA, 5541 bp, Klebsiella oxytoca
atgaaaacagccacaatacaacaaacaattgacgaattacggcagagcctgacacattatatcgaggcgacatatcacatcggccacccttccatagtcaaacagcgtcgtgaactattgaatcagatcggtggcatctatcaggctccatatctggaatcgactccccgctataagagcgccagtccttataatgagattgatagtttgccaccagcggcacttgaagcattgagagttctttctgacacaaaatcaggaaaaccagtaatttacccttccccctatacccatcaattggaggccctacaagagattctcaacaataatcgaaaccttatgattatgacgggaacaggttctggcaaaactgaatcattcctcttaccgatattaggcaagttcgcaattgaagcctgcgagaacccagagcgctttaaaaaatataatgctgttcgcgcattagtgctttatcctatgaacgccctcgtgaacgaccaattaagtcggttgcgaacaatgttcggttcccctcaaaccgttgctctattcgaaaaatgggctaagcgtcccgtcctcttcgcgcgttataccagccgtaccccatatgcgggcctgcgcacacctaataaagatagtaaacgactagcatctattggtgaatttttcggagagatcgaggatgcgaaacgacgctacgaacattttccttccgacggggaagaataccgcgcggctaaactctttgataccttaaaggtacggggaaaatggccatccaaagaaagtgtttccgactggttgggtaaagctcctgtgccttgggcgaagcgagcaatctgccgtccacacgattctgaactaattacacgccatgaagttcatgcatctccacccgatcttctcattacaaactattcgatgcttgaatatatgatgatgcgtcccattgagcgtggcatatttgacgcaacaaaagaatggttggacgcttgcccggacgagaaatttcttatcgttcttgatgaagctcatctttacagaggagcacaaggtgctgaagtcggattattgatacgtagactaagagaacgtcttggtataccagccgagaggttccaagtcatatgctcgaccgcaagcttcagtgatgagggtaagaaaaatgctggtgtattcggcgcacagctttccggagtatcggccgaatcattcgtgtcaatagtaggagaactacagttacgttctcctgaggaccgtggatcaatggtcgatataaacacccttgctgctgttaatcttaaacagttctattcagcagaccatagtcaacaattgtcagcgattgagaactttctaaagtttcgaggggtatcagtcaaagatgtaagtgatgtggacgctaaactttatctggcgctgtacgattacgcgccatttaatcgacttgtaaatgagactatgactgctgcggtatcgctctccaaactaccagaaataatctttgacgatacaataccatcaaatcttttggaaaaagccacaacggtattactcgcgtttgggagccgcgcgaaaaaaacaccaaacgaagctagccttcttccatgcagaatacattcattcttccgtggacttcctggcttatggatatgtatggaccccaattgccccgatgccctcggagacaggcgaagccctgccggaagactgttctcgcaaccacacgagcgatgcagttgcggcgctccggttttggaatattatacttgccgtcattgtggcacttcatatgccagggcctatacaaatgatgttgcgcagccacgctatttatggtccaaagaaggtgaaagaattgagactgcttcagggcttatagaggctcttcatcctcttgatcttcttattgaagaaccgccatcggatgataaagccaaagccgcttactatgatcttgtatcaggccagcttaatccggatgtactaggagagaaatatcgaaccgtcttccttgcacctgcaaagcccgtaacaggtagctcgaaagatacaacccgtggagcaggtccagggcaattcgctccttgtgcatgttgcaaccagatggcaggtcatggacaatctagcgttcaagatcatcagaccaagggcgatcaaccgtttcaggctttattgggatcacagctaagaatacagccccctggtccacagcaacaaacttcttttgcgccacttcgtgggcgtaaggttctaatcttctctgattctcgccaagtagccgctcgtctggctggcacacttcagaactattccttacgtgatgcagtgcgggcactccttccgttgggttataagattcttagccgcgatccggacttctccaaaactcttgtgctcaaccatgcgtatttatcagttttagtggctgcccataagttaggcgttcgactaaggccccaacttggtgatgcagaaacactttcagaggtagaaggaccaagtccaggcccatctcccgcaggtatacagctctttcaactccttagttcgttgtcccgatgcccgcagcgtcttatgcaggcaatctccgatacgtttaaacatacgaacatgggacttgatctggaggccttggcgatcgccacgattggcgagccaccacaaatctcgtccaagattgtaaaacttcccgatctaccaggagtcgccgaaaccgaggaggctaaattgacagtctgtcgagcttggctgcgatgctggacgcttgatccgggaatctggttttcagacatgcctgactcttggtggaatgaacgagtgagatcccatcaaggggtatttactgccatgaaccgagttcttgtatcgaagcaatcgaaatcaatattcaaaaagaattggcttccaactcttctgaccatttttaccgagcaaacaatgggagggggacatcgtttagttgcttcgaagctttctcttcatttaaatggtcagtggcagcgatgcaatagttgcaaatctgttcatcgcccagtcggaactctcagtagatgtattgactgtgaaagttctgatgtgagcaactttgatcccgctttagatgaggtttacaaggcacgtcgtggtttttatcgcgaccctatcgcttcagcacttgatgttgaagatccccaactaatgaccattattgcagcagagcacacagctcaacttggagcggcacagccggatgaagccttctctcactctgagcgacacgaaataagatttcaggatatcgatgtcgcctggagagataaggaccgccctggtgaacccgctattgatgtgctttcaagcaccacgactatggaagtaggtattgatatcggtgatctttcaggcgtggcacttcgtaatatgcctccaacccgcgccaattatcagcagcgtgctggccgagcaggccgacgtgctaatgcagttgcgactgttgtagcatttggcagctcggacagccatgacgaccattattttacggatccagaggaaatgatacggggtaatgtcattgatccacgcctcacgttagaaaatccggaaataacgcgacgccatcttcgcgcctacctgcttcagcgctatcatgaagaccgtattcctggattaatcccaggtgccgatcctaatttgttttccgttttgggcaaagttggtgatttcaaaactcggggacctttgctcaatcgttatgattttgctaaatggctagaagatcatgcacaagacctcgctaacgcggctgatcgctggctacccactgagttgtcgccagatgatcgccataggttgattgctgaaatgatggttgacgcgacagatacgattgacgaagccatagattttattcaatcagagaaccaagatgtcaacgccgccctagaaaaaagtaaggacgactctggtgatcaaaccgagaatgagataatgaccgagtcagaggataacgtaaatattgttgatcccgccacggataaattacttgaccgtctcctttaccggggagtagttccacggtatgcgtttccaaccgatgttgtggcatttcacgttttcaatcaagagagatcaaccccgttcacatcggttatagattatgctcccgctcaggggcttgcgctggctctatctcaatacgcaccaaacaagcaactctggataaacggcaaacagtatacatccaaagctatatattctccttatccagccgaacggcgggacgcttggggaaaacgaaaactctacttcgagtgcagcacttgctcccatgcaaggactgacgattacttaaaagagagggagaacacgacagagacttgtccagcctgcaacacacccaactctttcggcccggcaagggtctggttccgtcctgtcggctttgcgcacccaatcgatacaccgccggaaactgagccagactcaccaaacgagaccgcaagagcgacgcgtgccaagttagtaatgcaaacgcctaatcctgacaagagctggattcaggtatccgagcgggtgcgtgctttcaaagcgagagaatttctcttagtatcaaatactggtgtcgataaagatggctacgattattgtctcgcctgtggtcgaatcgagtcatcggcggctcctgaggaactgctctcacaaccacacgctacgccattccgcagtgaagaaggctccatctgtccaggaggagcggcaaaacgtcacgtaattcttgggactgatttcaaaactgacattgcattattttcattcccgctaacagagccgttccaactcttgcccggcagtatagaagctgattctgtacttagaactctatgcgaagctatggccaaggctgcgtgtcaaacactagatattgaaccgggagaagttctagccgaataccgcccagctttgacagaaaaaggcgcaagcggtaacgaagttgaaattttcctatatgacacattggcaggaggtgcagggttttcgaccgaacttgtgaatcgggcaagagaattgtttgagcacacgcgaaatcttctagcaagttgtccagaaaactgcgacacatcctgctatcgctgcctgcaaagtttccgcaatcgaatggaccactcgctcctagatcgcaaactcggcattcagtttattgaacatgcgtttgatggtggatatccgccttatcctgccgagcgtactcgacgatcgcttgatcttctcgcccgtgatctgattcggcagtatggaaccgaattttctttctctcgtgaagttcaacgatatgacaatgaagctggagcaatagtaattccaattgttgctacacgcctggctacgggtgcagaaacttggatatcactcagttcgccactagccccagcgattccgacagatcataaactccagaaacttagtcctcaagggtcagaaaaaatggagtgcgcagatgaccttattattcgtagacatttaccagaggcaagtttgcaacttcgaggaaaactgagataa

SEQ ID NO: 198748 - DNA, 1194 bp, Klebsiella oxytoca
atgcctgcttatcgagtatgtcagaatttcttccgcgatgccttagctccgtttcacaaataccgacaaaaagctttgctggacgccaccactgcacttatcaatggcgcgtcactgacgctgaccagcatcgggcgttatttacccggtacggcccacgtcaaaaataaaatcaaacgtgttgaccgcttgctgggcaatacgtcactacaccgcgatactccgctgatttttaaacgtattatctcaatgctgacgaaccggttatctctgtgcgttattgctgttgactggagtggttatccgtctcaggaataccacgttctccgtgccagtctgatctgcgacgggcgttcgataccgctgttaagctggatagttccctcggaaaaacagcagaatgcgcagatacagcaagcttttcttgatgctcttgctactgctgtaaatccgcaggccagagtcatcatcgtaactgatgcgggcttccagaatgcgtggttcaggcacattaaatcactcggctgggattttatcggacgtatcaggggcaacatccagatgcgactgaacagtaaaggtgaatgctggttcagacgtcaggatttgcaggccagcagcaaaccagaatacctggggccgggaacacttgcccgcacagaatatgcccggtgtgatggtcatttttatcttcataaaaaagagccaaaaggccgaaaaaacaaacgacccagagggaagcctagttcccccacgacagaaaaagaacagcgaatatcagcaaaagagccgtggctactcttcagcagcacagacgactttaaaccacgtgaaatcatgaagttgtacagccgcggaatgcagatagaacagaacttccgggatgaaaaaagcgagcgcttcgggttcggtctgcgtgccagttatagccgttcagcggaaagaatgttggttctgagtctgctggcaacgctgagtacaatagtgttgtggcttattggctatcacgctgaaaataaagggttacatcttagataccaggcaaacagcattaaaacgcggcgagtaatctcgtatctgacgttagcggagaatatcttacgacactctccgctaatattaaagcgagcggtgctaagcactgttctgaagcatctcgccagaacctaccgaaatatggtgctggtttattag

SEQ ID NO: 198749 - DNA, 4047 bp, Klebsiella oxytoca
atggagggttcattcaaaattgactctgttgaatctgtttacagggggctaaataataccgatgagttaaaggctcatgctcagttaattcttgtggttcgcaactggctgacggaagtgtcgaacttcgacccagtttccggacttgtcctgcataccggtatcgacgatttcttggatgttgtggcgaaatcggtgcgggatacgtcatcagaggaggagacaaaagaccgtatctatcgcgtggtgtcacatgtgaaggacgctgtcctggcaataatggagcatacccgggataaggtgatacgcgaacatgccatgctgccgatatatgcggcgagagaggttgacagcaacagtgttcaatggctaagccgtcagccgggcaggacactccgagaaaagctttccggtaagccttatatgaaggccgtcagacggaggcgcagtgttgatacgtcggaaaacagactgttgagagcttttctcttccggctggaacacattctgacagaaagacagggtgcattatctgccgcaaaagaagagacctgtgaggacatgcttgtttcccttcagcgatggctaagaactgacgatgccgctgaaatcggtgcgtggggaaatcttccgcccaacaatacgcttctgcaggacaagcgctatcgaaaaatatgggatggctggctctggctccaggccagtgacgttcagataaccgaggacagcaaacggcttaataaagacctactcaccgttatctactggaatacactttcccagctttacgcgagtggtggctttcggacagttcagcaaccggtcggctttgattacgacaacttttctatcgtgcctgaattccccgtttggggatatttattccccgggtatggcgcaaagaaaaaggggaaggttaagttcattaagccagagagtttatttggatttatcacgtctgaagagggtgtggatttatttttccaccaaaaaaatctatctcaaaaattagacataaactcactaactgctggagatgaggtgtcttttgtcattggcagtaacccaaagggggagtgtgctgatgacatcgaccgtctggcggggatcatccctgtagcgttcaatttgacgggggataaatgggagatacacgtcggtgaggataagtatttattacatatcgtttcggggtatctggttattgcgtcagctcagggtgtaaacaaaaaattaaaaatcgagcctgcagctctcaacgagataccgaaggcgatactgtcattcgtcacggatgccccgcctgaatacgctgcgccgacgaatactgaacgtgacccgatacggatggagagcaccgttgcggatctgtgttcagttcgtcctgcgttcacgcacggtacaggctctcaggcgcatctgccattcaggttggttcagcagtactggcccctgcattctgatggcgaagtggagatagactgcggttacgctaaatccatcgccctgcattccggtattcagacggtcagcatgaggagcctcttttcacctgactcaacactgcccgaggctactaaaagccgggcatcgatgttttttattaaaaagttgagtgactatatcaaggcagataagttgacctatcttatccctgattgggggaatgatttcgatctggaggggatacgaaaaagcgccaatttttattttgatgagtcaactccgcttcccaaaagtatcgctgctatctttgcatggcaatcgtcgaagaaatttgtacaggacagcgtccagggtaatgatgttgtgctggtgattgattcctttgatggtggcatttcagtaaccccggttcaggcaatttaccaaccggagcttgagggactgttgcctgagacaaaaggtattagctgggaaagacatcctacggttaatctgcccgacagcggcattcataatgccatggtccgcaatcttgacgggaatggctgccagacatctgaagaccttcttcatttgtttgggttcgagggtttagccagcgatgccggagacgtgtcttttgtcaacgatgaacgctggtatcacgttccgggttctgttcgggaggttctgactcaggatctagatctcagcatattgtcaaacaccgccatcagtaactgcctgaactctacaaacctgaattgtcggggcgcgaatgtctttatcctgcctcttgacgttaccctcaggaaacccgatgggcgaatggattataagtggttggggtccgcatggtcgccaattaaaggctgccagaccttaaacagatggcatgaggaagtgggtgacatgaccctctggcgtgatcatctgccagctctatcgatagaggtacagagtgacaaagggtataaggttaatttttatcttgtaaaagacgcgacagtaacgccgcaacgtggcagaacggtggatatacccgtggaagaattgttcacgcttcccgcgggacaaacgcattatcgttttcccctgcaacagggagaaggcaataaagagatgcggtttgttgcatacctgatgtcgccagcttttccattaaagaaggacacaacgtgcaagctgaagatgtcctatacctatggcgcggatgacccgtacgaactgaaattccttccgctggattcagcggaagcaggttttaaatctgtccgagttgagtggcgctcagcatcagaaagtgggattgccgatctggcgaacttaccgattccggatttcccggccagaaaaagctggtccgattttcagtccttcccgaaagacgatggtaagagcgtctctgacctcctggactggtgttgctccaaaattgcaggtttgaatgagctgatctcctttgattatgaacaggaatttcaatccatcctgaataaaagaaaagtcggctatctggaatggggaagtactgacactaacgggaaatactattgtcgcgtcaatgttgagggacagagtgtgttttgccacagttctcactttattgaggctgttgatgaaaactccctgcataaaggctgcccggtttatctggatgtatttacgaatgaaaaagggccatacggggcaacgatatcctttttggagcgcgtccccttacagcttcaggagaaggcacaggataccctcaatcggaagttgtccagaaccattgagtatgctgaaaaagggatcttcagcctccgtttccccgcattaaccatctggaatcacggtcactcgctttccgagccagatgtgcccgaccattttagaaacgcgatactcgacggaacgcaaaagatcatatcaataattgagtctgaaaatatgccggacacgcttaaagaggagcttttcttctttctgtgctgtctgcataaggacgcccctgaaattgttggctcccggcttcttgatgcagtgaaggatagaaagctgttgcggaaataccacaagaatattgctttcgccattggtaatgccgacctgtcttaccaacaagtgctgttggagaatgtcattgatcccatcgataatgagggccggaccagatccattaccctggaagttttgtcgatagtgctttggcgttccagaacagtgatcaacagattgactaaagagaagcttgaggctttatccgtaagcttatatcgttgcctcaagttcgatattcaaaagctggatagtgaaggaacgagataccaaatcgcgactcttggtaagcatctggagcttctgctggcattgctgagaagcagaggttccgaggatgaaggtctaaaaatgattttcgcgccagataatgaacggaccaaaaaatttgtggacctgatcgatcgcgtttccagattagtgatcgacaacaatatcgggttgcagtctcgaatcaatctgcaaattgaaaagcctaaaatctttctcaatactcccgaccttttatatgcattacgcatatatctaacgggagacgcaggtgcaagcgcgataggcatttcgtctgtttcagacgattaa

SEQ ID NO: 198750 - DNA, 2718 bp, Klebsiella oxytoca
gtggactctaaaaaaaataatagcgttcagtttactgcggataatgagatggcagatctgacggataacacaatcaacgtaacggagagtgagttcctgaataaactgcaggaactgatggaacgggaagactctctgacgcaaaaagaaacggttttagcccaaaaggaacaggcgctacaggcggctaaagacgcgatggcccaaaaagaagcagagctgaatgacaaatatgttcatcttcaggagatggagcttcaagcaaaaaacggctctctgcaattctttgaggaaaagttcgcagcattcaaaaaacaactggcgcagcgggaaactcagtgtgtaagtgagcgggaaactctcgaagctgaaaaggaaaaattgcggcaaagagaggtcgctgttcaaaaggcggaaatccaacgggacagggggtatgccgatgaaagggccaggcttgatgatgaactcttcagtctcagaaaagtacaggaaaaggatctggagtcaaaacgcgccagcgccctgacggccctcgaagaagagcttacagtggagagagtctccagaatagcaaacttggggaaagagatagctgaccggctaagcgcgcatgaagcggctattcaacaggataaggatgaactcgaacaaaaaagaaaggcattccttaagaaccaggcggagcttgatgaactcagggatgaacttgagtaccagaaacagcgccttcgctcaaataaagaccgacttgaggaaagagaatccgatctgaaccttgaggtggatgccagggttgctcagcggaaacactctttcgagagtgagaagtctgtgcttaacgatgaaattgcccgtttgagggaatccctcaaaacaagcagtgccctcatttcaaacttcgaagtactgaagcataagctcggtgatgaagatcctgccgccgttttacttaagctgaaaacttatgaagaggaaatcaacaccctgcgcgaggatcttgccacgcgcccaacacaggagatgcgggacgcctttgatcgtttgacgtctgaacagaacgaactgaagctggcctgtgagcgattctctgaagaaaatgaggggctcagaagtgcagcacgcgcacagtcagatctggaaatgcaggtagcggaactgaccgataaaaacaaatcgctgctgaggcggtttgaatcagtggatgccgacaacaaccgattgatggaggagcttaaacgcttgcaatcctcttacgaacgggaacaggaccgtgaggcaaggattcgggacattgaaacgccatacgttcaaaaagaactgcctcgtgcggctgaaaacgttgaagagcttcaatggctggacggcatccgtcaatcctgcatcgattatgggctgagattcccgcggcgaattttacacgcattccacacagcactaaaaacgtcagagtggtctcctgtgactgttctggcaggcgtgagtggaaccggaaagtctgaactgccaaggctgtattcacattttggcggcataaactttttgagtctggccgtgcaacccaactgggacagtcaggaatccatgctgggtttcttcaactctatcgataacaagttcgatgcccaaccggttctgcgtttactggcacaaagtcagaaggcgcaggctgaaggctatcctcttggtcttaaagatgccatgaatctgatattgatggatgaaatgaatcttgcccatgtcgaactctattttgcggaattcctgagcaagcttgagctgcgcagaggaatgaaaaaagaactccccttcattgatgttaagctgggggccggaattcagccctatcaattgccaatcggtcgtaatgtgctctgggctggcacaatgaatcaggatgagacaacgaaatccctctcagacaaggtcctcgaccggggaattgtcatcaactttccccgaccgactacgctggaaagacgccgtcagttgattccgttgggcgatcaggcgccattattgtcccgcaaactgtgggagagttggtggtgcagagaaagtaaattcagcgatgatcagattttgccctttaaggggtttattgaagacatgaacgatgctctttctaaagtcggaagagcgcttgggcacagggtgtggcaatcgatcgaatactacatggcaaattatcctgatgtgctcgacgcccagagaaaaaatgatgatgcaggcttggtcaaagccatgaaagtcgcttttgaagatcagcttgttcaaaaggttatgcctaagctgcgcggcatcgaaacccgaggtaaatccagaacggactgtcttgaccgaattcgaactcaactggtgaatgacaactatacgataatcgaagatttcgatctggcgtgcgaatttggttacggtcagttcatctggagcagtgctaattacttaaaagacgatgagtcattgaatggtcaaactggtaacaacgccagtgccagtgccagtgatgccagtatgctgtcatctgatcacgccggacttcatcattgctctgctgcaggcgcaagcgctattcctgctgagatcagccggtatgcaagtaatagtacaaaggaactctggcaactgacaacaaacgaaataatgacagtcctgaaatgtgatgcaaaagaagcaaaggctatcaagtatttgtgtaatgcgaccagggaatcataa

SEQ ID NO: 198751 - DNA, 2157 bp, Klebsiella oxytoca
gtgagtgcaaaacccaaagatcatcgtcctaaagtcatcagtttccgcaccgcactggatggattgaacatcgccgccagacaaagtgttctgtggccatgtcatgccttcaacatctcacttccgcaaaagaaaaagagcggtctcaatgtatttgaagaaactgttctgaagatcacagagattgaatccggcgacacagaaatgattgcgcagctcacgtgtctggagaaggaactggtggcttttattcagagtcgcctcaaccagctcggtcttttgaatgatcgctatgagttgtctgagcaaggacaggcgcttttgaacgagtggcagaataaatccgacggagatctggaatacaccgtggccacggtgtttgtggagctgctgtacggaaagcttctaccttatgtcagtacgaaacaactgagctacaaaaaaatagagacgctttactcaaaagagaatcttcagaaaaagggggagtttgaacactatgtgaattttttcatcacccccactgatgataaatacattcgggcgattcagatacgtccagcaaacgacgctttctggaaaaccgttcctgacgccaacgacatcatcagagctatcagggaatttaagaggaaatataagcggcaggcgctgttgaaccagggcgtcgagcagtacccgcctccgatccctgtggctgaagccatatccttacaggcgaatccggaactggtttacctgcattgccacgcccttatccagacaggcaattctgacattctggtgacggatggatgcggcttcggattctctgagagctttgccagttacctgatgtctcagaactggcagtgggtcatcgacctgaagaataaaggggttgtcgacacgctgaaccccgaccaacgcaatgaagaggctgaaaaagactctttagcggcggatgagttgaagcaatatccgcggatagcgcgcccacttcggcgcgcacaagcgtatctgtcagacgctgaaaaaatcaggattgattcatccaatgatgagcaggaattcacccgtctgaccggcctggcggtcgtcgccctgtatgaagccatagaatgggcgttgcggtttgttgtttcggataacccagtgacgcactgggagcgattattctcgtcacagtcctacagggaaaatgacaagatactgcgctcgtttgccacccggattgggtttgatgtttcagagagtgtgaagggcctgcttcaggttaaacccggcaaaatcagagacgttgaccatggtgcttccgagatgcagccgctactggctatggcaatcgccggggcgatcaatgatcccagccatccacttaatcgtctggccattgaagatgcaggatgtctctcttttattcacgcgctgaaagacgtcagggatcctgtttcccatggaaacgcaatgggtgtgcagctctcaaaggaaaatcttcagggctattgcaggagaaccgttcggcttattcaattactgataccggatatcacgcgggatgctgatacaaccaaatcacggcagaaaaacgatattgatcaggtcagactgaaggccaggatcgaactggacaggtcattggggctgggtttcgtccacgcggtttctccgtcgttgcgggaagaactggtcaaagtgacgatcttaaaccagatgacgactctggataatgaacagcaacagcgctacataaatttactggcgtccattatgcaactgtcgttatttgaagccactaaggaccgtataacccccttcaaaaaccgaacaaacctgagggatgaggcgattgaaaaaatcgttcaatccggtttttatcccgcacctgatgccataccagtacaaatcagtacggtaaactgcagtcgactctctcgtgctgtgcaaggttcaagcacaactcttggtgctcaacttcttgcgctttgtttattggcatcagaaagcgaaagggtcgcactcaaaaggtcttttccggattgtttcgagcttatcgccagtttaatcaaactgcgtgggcacggtaatcaacagaaatttgactattcaagggaatacctggcgtcattaaaaatgaacgtattcaaactcatcaaaataattatggaagaattttag

SEQ ID NO: 198752 - DNA, 3435 bp, Klebsiella oxytoca
atgaaactcaaagacataaatgctgaaatcacttttgaattatggatgacgccggcgctgtacgaagagacgccaaccacgggggtgggctctattgcccctcaccaaaatgaccaggcatacagattaagaatcgatggccagcagtggagcatggtgcttcgggatactccggccggaaacgatctgaattttcacttaaaaagaggctgtgcgcaccttgccgaagtcatgctggttgcccaggatcgcagtgtgctggtgaaaattgtcttttttaacggtgaaattgttgaaattggtgatgtggagatcggcattgatgagcgcatagagttaacggcgaaaagaaatggcattcgcttcaatggcgctgaagagttggggggcgtattaaacgaaaaatgtaacatcaacgttggtggcgacgatttctttctgctaatgagtggaccatccgccagggctgactttgaagcggatatgtctgaagagggaggctcacctgatccccagggcgttgtacaggaaaaatacagggaattttctgtctatggtgagagggtgcgtattccggttgaaaggcgcaatgtcgagacgttcagggatatctattttgcgaccaaagcgatctttagagacgatcagaagagggaaggatcattacgtctggcaagggggaaggtccggtttactgattacacgaagacgggacgcatccgtgctttagccgccggcgcgatgagtcagctttccagggaaaccgggagttacctgaaacagtgggacgaatacggcgcaattgaaggtgaaatgctgctggccagggcaaaagctgttggcagggtggattatcatggcactgaacagacaacaaaaggagttaagttctttgtgtcgtctgttccggaacaacttaccgaaggcgatgagatagagatcacctccgaggaacctttatacctcagaactccggatcttacctgggaagcttacagcaaggctctggaagaagaatttgccgccaaacgggatcgaaaaaagaacgatgctgaaatatccgtttctgtttatgccccgatcctgactatttcaaagaccagtattgaactggatctgccgtcaattccgtccggtcagatgtttttgatcctgtccatcaatggcgacaagattcagattgaaagacgaatgcgggcacgttcagccattctggaaggacgctgcgcaaatccgcttctcggcctgcttattgaagaaggcggtatactcccggacatacagcgtgtcaccaaactgaaacctttgacgtcttttgtgaaagagaaaattttcaggcatgagccaacgcccaaacagacagaggccatcgatgtcgcactgaacaccccggatattgcgcttgttcaggggcctccgggaacagggaaaacaacggttgtgacagccattcttgaacggctcaatgaggaatatgacaaaacccgctcgataagaggtcagatacttgtctccggttttcagcatgatgccgttgagaatattgtggcaaggctgagtgtgaatgcgcttccggcagtgaagttcggcacccggtctggtggctcagaatttacgacagatgccgttactgaaaaactgaacaaatggtgcgccactgtcgccggaaagattcgaaccaaaaaccctcaaatggttcagacggagcatcaggtcagactgacagagcagtttgtcacctattcactgtgcccctcaaagaacaacaccgccagtttaataaagcgtattctggatttgcccagagacgtgatttctgaagatatcacccgtgaggctgaagaaatcatcaattccctgcatacggagcccacgtcagacgatccttccaccttgcggctcgtgagggctctgcgtgtcagtgaagccgcctttgttgacgacggtgcggtaagagcggttgatttactggacaagatagaaggcggaccggctaatccggatttacgtgttcttgaaaaagcggctcgctggcgcagcggtaagccgctgaatttccttccagaactcagagaactgaaagcatcactgctctatcaatatctgccctcgcctgatttcaggacagaaaaaccaagagaggatgtgttgagactggtgacaacggtatctcagcgtctggagaaagaactcagttcaacccgtaaacgggatgcaatactggctgagtttttacatgagcttgaagacaatcctgatggcgtacgtgaggccatagaggactacaactttgtgtatgcggccaccacgcaacaggctgtcggaaaagacatcatccggtcaaagaataaaaatgtccaatatgatcagcgaacggaaatggttaagtacgatacggtgatcatcgatgaggccgcgagaaccagtccgcgagatctgcttatcccgatgtcccaggcggtaaaaaggataattcttgtcggggaccacaggcagttgcctcacctgattgaccaggaggtcgccagagctctcgaaggtgacgatcgatcaggtccgccggttgatgtcgattttgtgaagaaaagcatgtttgagtatctgttcaaccgcctgaaaaaactggaggagaaggacggcatcaagcgaacggtgacactggatgcgcagtaccggacacacccgttgttgggggagtttgcaagccgcaacttttatgatcgatacaatgaaggttatcgttctcctttaggcgctaaatattttacccagaagttaaacggcatcgaagatagcgccgccgtctggatccatgtgcccaatgaggctggaaaagagcagcgtcttgagagtggcagtcgtgaaagagaggctgaagctaaaattatcgccaagagactaagtgactggattaagtcagatgagtccactgcagattatatgaagacgttaacccatgatgacaggcaacccggccttagctttggtgtcatcagtttttataaagcccaggtatttgctgtttataaagccctgcaaaaatacggtatcacggaacgggcacaggatggtgcatggcagatatgtcaggaataccgctttctcgacaatggtgaagagcggctccgcatcggcaccgttgatgcctttcaggggatggaattcgatattgtgtttctttccatggtgaggtctcaggatatgaacgccttgccgcctcatatacgcaacgaggaggatgacaaaaagaaacagcaaaaactcttcgggcatctcatgtcggaaaaccgcctctgtgtgagtatgagtcgccagaagaaggtcctggccatagtgggagacggcgtgtttgcgaacacccagatagcggaggatgccgttccggccctgaaaaacttctatgatttgtgccatgaaaagggggtgatcctgtga

SEQ ID NO: 198753 - DNA, 1497 bp, Klebsiella oxytoca
gtgagtgaatggttcaacaggtatgtggatgaatatcagaatgtgcacattcaggacaaggtgctcggtcaggggggccagggtgttgttttccgtacccgggatcctgatctggcgatcaaactggtgaccgatgagagcggaaaccctgtcaccgatgacgtctcggtggaacggtgttcgaaacgctttaagcgcgtccggctcttgcctctgccggaaaacctgaatatatccgtaccggcagcgctgcttcagaacaaggccggttatgtgatgcaactgttgagtgaaatggtcccgttcagccatttctggcttgatggtcagaccgcagaaaaaatggggcctgaccagatcccggcatggctttctgccatgccggagaacgaagctaaaaagattgttcattactgcaaaacgggcgggctaaggcgcagacttcatgcgctctacaagtgtgcatcattactggcacgtctccatggtaacggcatggtctacggtgatatctcgcccaacaatatctttatttcagaaggcatgaatgatacctccgtctggctgattgatgccgacaatattcgatttgaaattttggcagggggaagcgttgtttacacaccaaaatacggtgccccggagctggttcagggcactgatggtggaagaccgtcaagcgattgtcatgcgtttgcggtggtggcgttttaccttctttcgctgattcacccgtttgttggaaaaaaagtggatggaacagatgaaggcgactgggctgatgaagaaaatgatgacggggatgtagaagataaggcttacgctggattgctcccctgggttgatgaccaaaatgatgatgccaactcttccgacagcggtctgcccagatcccttctcctcaccgcgaaactgacggccttgtttgagagcacattcggtccgggaaggacatctcctttgctgcggccgacaatctatcactggcctgaagctctcgcccaggccgcggatatgaccgtcacatgcccggggtgctcgatgcattattactatgattttattcacccggaaacagaggcgcaccattgcccttactgtacaacgccgaggccgcaggtgctcattctggagtcttatcgatggaagggcagtgacacccccctggaacttccctgctggcgctatgtccgcgagatcccgccggggtcagagctgacagtaccgagacgcgtctttgatgagtttctcatgcttgattctgatacagcagaggtgctcatctcttcaggcgatgagggcattctgattaaaaagtcagatcatgctaaagccgatgtctctgttgccgctgacagccatccgcaacgtggttttcagacagtttattcacagatgaaaatagaccgtgcaaccccggatgttcagttttggatgttcacaaacatgaatagtccccggttggttaaatgcatgatcagcggaagtgacaaatga

SEQ ID NO: 198754 - DNA, 729 bp, Klebsiella oxytoca
atgcgtgatccactctggaacagctggggggcctcagtaatcggcccccttcatgttaaagcgggaatacccaatcaggattcctggagggcgcaccggtataaatggggaaatgtcgtcgttgtatcggacggactgggcagcaaggcacattcagatcacgggtcaaaagccgcctgtctagctgtctttgaggcagccagggactatcagaatacccctgcggcctctatcggtgatgttctcagactcattcatgccaactggcttatgaagatagcgccgtacgcatcaacagagtgttcggccacctgtcttttcgtcatccagacagaaggaactatcactctgggtcgtctgggcgacggcatgattgctgtccttggcgaaactgacgaacacaaccttatcctcagtgatacccgacacgattccttctcaaactacacaaacagtcttcaacaggcgtttaggcccgaacaatgggaaaccgcgacgattgcaagcgcggcgtgccatgccgttgtgttatgtacggatgggatatccgatgacctgttacccgaaaaacagatgatttttgcacaggagctctgctccacgtattcaaacgtcaagcctgaggaaagaaagcgggatcttcggcgttggctcagtgaatggccggttccaggacactccgatgataagacgattgcctgtctgtttaagcaaggaggcacccggtga

SEQ ID NO: 198755 - DNA, 582 bp, Klebsiella oxytoca
atggatatatattttattttcgatacttcaggaagcatggatgaaatggggaaaattcatcttcaacggaatttagcccgttatgcaattcaaatgcctggcctggctcaggaacaatgtacggatttcgtcatccgtttatatcagtggcatcaggatatttccgaggtcacgctgcaaagcgatggggatattccatccttaaccgcaaaaggctcctcgagccttgctgagctctctgattttttattccaacatgtttataagagcggggtggcaagagttctcattctgtctgatggcaatttccccagttcagataccatcaactttcaaaaccagctttgcaccttccccgacctcattatccggactgttgcagtcggcgctgatgctgacctgttgaagttgcggaaactgtctacaaacaacaccgtttaccttccggagaatatcgcttcagcgatgaacagcactctctttggctctgatgagccggtgaccgctccggtatccgcagcccagatacagcactccgcacccgctgaaacagttgagcctgaggaggactgggatgcgtga

SEQ ID NO: 198756 - DNA, 1701 bp, Klebsiella oxytoca
atgacggatttcagggcttctctcggactggaacagacaaccggccctgttctgggggctttgctggcggaagattacaccgatgtggtcatcctggggtttacgcgcccggtgaaaatcgaaagccacgcggatgatgtccagccaaaaattgccgcgacagaaggtgttgacccggctgctgcaagacagtgtatggacctgttttcaaatacagaaggtgcgcacacgcatttcaatgaatggctaaataaacagcttcaggctgccggtaaaaaagtcgatgtacattttcaacccgtggagctggcacatctcaatgacacggaaggtatctatgaggcggcaacgcaatccctgaacgccgttgctgcctccgaaggtgaaaaactggttacgctctacctgagtccgggcactcccgtgatggcattcgtctgggcttttgcggccctgaggtacccaacgctaaagaaacgtcttatcgcatcttctcagccgggcaaatcgccggaaagaatcgtcctgccgaacgagtggctggaatggcacggaagacaggtcctgccagtcagtacgggatctgatcggtatgatgccatttttcacctgttcggcgaacagcggatccctaacctgcttggtgtactccagttttcaagccggaagcatatcttcgtgaattctgcccagtttcctgccgatgtcatgaaaccgtttcttggcgaagcagaatacggtgaaattgcggtggacccgtatgatcctgacaatgtccggtccaccattctggagcagattgcggacatgcctgctgaggcgaagatcggctttaacttaacgggtggcaccaagttgatgtatgccggggcccttgccgcctgtcgcaaggtgaatgcaacaccattttattttgatttttcaaagaagcaggtgatcaatctaaatagcttcactaaaagtgagattgtttcaattgattcggtagaaacattcctgaagttgaatggtgatggattaaccatctctaatcccggtctgactgaacacgatatttctcgcgagatgattacggcttctcagttaatttgggaaaatcgtaagttaatggtgtctaagtatcgcgaactgaaatcttatctcgaagagaaatcattcaaatgttggggtaatgacttctacgcagagctgacaatagaaaaacaaggaaaactgaccatcgggggtcagtcgtttgtgtttgatgattgtccggattttatggaatttctcctggggaaatggttagaggtgtatgtctttagtgtgttaatgccgttaaaggaatcggccgtactgaaagatatacgccttgggcttgaggtatccgttgaggacgttgattcgaacgataactttaagtcctatcatgatgggtttaaggaaaaaacaggttatcaagaatttgatgttatctgtaccgacggatacgctttatttgttattgaatgtaaaagtgggaaagttgaagcacaccatatttcgaagcttagcgaaattaccaagcattttggtggggtgaaaggcaatggggttatgatttcagcatttcgtccctcacatcctgtggtcaagcaaaaatcagatgaccagacgaatgtaaactggttttttggggagcatgcgtcagaccgcttgttgaagttttttgagagtaattaa

SEQ ID NO: 198757 - DNA, 2148 bp, Klebsiella oxytoca
atggatatcaaaggcattattgaggctattcgttccggtgtatcaggaattcagattctgggccaggacgtcaatcgaatcgatgaagaaatcgagaccgttgcgaccgtactggacttcaaggtaaaggagtggaatctggggtatggttgggttgattttaagactaaaagggctctgaaaccggatcaaaatgcattactgtatcaggatctaaaagccattgcggatgacgatcctacgggtcggatttatgtcatacagaacgcctgttccgtattaaaagatgacatcagagcgattgccagactgcagcaggaattgttaaggatcaagcgtcactttaaggggcaggcagcgatctttttcgtgtctaaagagagtatagaatttccagagcttgtggatcttttgatccctttctcttgctctcctctttcgttagagcaagtggatggcatttttgactctctcttacaggagtactctgtcactgttactaccgcagtgcgtaattctcttaaatccatattttcaggtatggagcgagacagggtgtttcaaatattcgaaacgctaaaaaataaatataaggccacatttcctcaggagtctgtgggcgatgctctggccctgaaaaaaagagagttatctcgctccggtttgctggagttggtcgatagtcaaatagatattagccaaatcggtgggctggaacggctcaaaagctggttacgtaacaagaaacacatcattgatgatttaacgaaagcgcagggtttgggcatctcggcccccaaaggcgtgctgttagccggtatgccgggatgtggaaaatcaatgagtgcaaaagcggtttcctcattattcaatgttcctctttttcgcttagacattggctcgctgatgggaaaatttgtgggtgagagtgaagcaaatatgaaggccgccctaaaggttgcagaacaagcgagcccttgtgtgttgtggattgatgaacttgaaaaagctttttcaggcattaacgggaccgggggaagcacagaaatcacaactcgtctgtttggttattttctaacctggatgcaggagaagccgggagcggtgtttgttgtggcaactgccaatgacataacccatatccctcctgagctattgaggcggggacggtttgatgaaattttttatgttaatttacccagtgaacgtgagcgaaaacagattttcgccgttaaattaaatcaactgccccttccccctaaagggctcgaccttgcagagcttgcaaccctgtctaaaggtttttccggcgctgatattgaatgtgtcatcaatgatgcgttagaaagtttgttccgcagtaatgagcctgttctgacccagccccttattaagaagcacattgacctggtgacaccaataagtgttgttcttaaagagaaaattgcggtctatcagacgttgtttgagaaattgagtctcaaagccgcctcccttgcagaggaagatcttgagagcattaacgcactgagtgacagcgatgcagtgtcggaaagagaaaacgccgcatcaaatgaatttatcgcatctgaaaaactcatacagttagtgaacgatcaaagcctggtcgttcgccaggcagccttaaaaaaccctcaatgtccattttcaggcttacagcaagtcgtaaacagatattgcaaatttgattttagtaagcccggatcctggagtaacaacgaaataaccaaaaatgagttcgagctggcattgcagcatcccaatatgagtggtgagctcattcttgaactccattcaaagcaactgattgatgcgcaaaagcttttatcgctggcccataagctttcatttgaggagcgaaaaaaaatatttgaattggcaatgataaaattacctcggtctgttacaacaggtacggttcagaatatcctttgctttacaggcaatattgttaaatataacgatattcttattgagatagataacgagcgaggtaacacccaaaaaatcaacgcttctgttgacgggcttgttgtcaaggtgtgcgtcaaaaccggtgaaacaattcatgcaggtgaacatatcgtgcaaatactcgtacctaaaagtcagggacgtataaattga

SEQ ID NO: 198758 - DNA, 1572 bp, Klebsiella oxytoca
atggaaaggaatcaggaaaatgtggatttgccaacactgatagcgaatggcgcacatcatagtgaagctcaggcagatgctttagctggacagatagaggttacgccagcaggggcaaacaaaactcgcagagttattggttcatttattcgttcttacagagataaatcgcctgacctctccagtaaggcctggcttaaccttgaattcgctaaatatccggatatttggcgcactgaagaagaacgccaacaagcggctagcgagattgttgaggaggtggcggttttcagctcatctcagcaagaattagcggcacatcacagcaaaggattaagtaccagcaactggctggcggggaaagttgagcagggcgcaacggcaggtggcgtcaccaacttcggcgcttacgccacgataattgatagcgccatcgagacggcaaacaaagcaaacattgatttgctttaccggaacgatggccagttgaaccagcagcttaatctggatggttttattgctgaacagcaccatgctgataccttcaaccttgatgcggtagccaaaggcagtgaataccgtgctgaagtgttaaaacccaaacccggcgggacatatggcaaaaattcggtagatgttgtgattcgggatggcgaggggaaaattgtacgtcgctatcaggctaaatatggggccgatgcggatgcaacagacacattgcttaaaaagggtgattaccgggggcagcgcaagttggtgcctgaagggcagtctgatgacattcctggaagtactgaaacaatagagattgatggcgttgaatcgaagccactttctaaacaggaagccaaagagaggcaacgcagagcccaggaacaagccgaagccaaacaatatgactggaacgagaccagcaggatcgatattgcaaaaaatatcgggaaaaacgcgggtactgcggctcttttgtctgtgggatttcagggggctcgtattctcgggcggcggatctggaagggaataacagggcaagaaaataatagtgctgaagaagaccttcaagagtttgttcagagcgctctgaaatcggcggcgacctcggggctaagcgtcgctgtcacgggtgccatgaccgtagcggtgaaaagtggctggttgggcactgtgttaaaaaatacacctgctggcagaattgccaatgctgtgtgcatcggtattgaaaacgcgaaggttctctacaaatacgcaaccggagaaatcacagcggaagaagcgcttgatcaagccggcagcgtcacatgcagccttgtggggggacttgtcggtggggccaagggagcgggcataggtgctgcactgggaaccgttctgggtcccgtggggactgctattggtggcgttgttggtggcgtagtcggtggcattgctggaagtaccgttggtgaagcgatatatgaaggtggaaagagaattgtatctgcagtcgttgattccgttaaatcgatggggtcggcaataggcagtggtatttcatcgttctgtagcggcgtggcctctctgtttggattttaa

SEQ ID NO: 198759 - DNA, 702 bp, Klebsiella oxytoca
atgtttgatccaaaaaaattcaccaccccgaccgccaggccgcttcccgtcgtcctgcttctggatatcagtggcagtatgtccggagagaaaatcgagaacctgaataaggccgtcagggatatgctggatgcctttgctcaggaagagaaaatggagaccgagatccttgtttccgtcatcacttttggcgatcaggttgagctgcatgttccctacatccgggcttctcaggtgcagtggcagggtctgcaggcaagcggaatgaccccgatgggaaccgctctcgaaatggccaaggacatgattgaagacaaggagaccacgccgtcccgtgcttaccggccgacgattgttctcgtttcagacggacagcctaatgaccgttgggaaaggccaatggaggactttatcctcgaaggacgctcttccaaatgtgaccgcatggcaatggctatcggacgtgatgcggatgaggcggttctgaaacgttttatcgagggcacgccccatgaccttttttatgcggaaaacgccgggcagatgcatgaatttttccagcgagtgacaatgtctgtgaccctgcgtacccagtctcggaatccgaacgtgttaccggcgtccattgagttagatgcgcgcacgaagtcaaatattgctgcgtcagtctctattgcgaatgatgatcaaggttattggtag

SEQ ID NO: 198760 - DNA, 987 bp, Klebsiella oxytoca
atggccgggaaaaaccgaatgatcgtcaatttctcatcgaaaaaactgagggatttgattgttgaaatcgcggaaaaaaaccatatgagtcactcgaaagtcatcgagaaactggtttcattcaggcttttcgagagcaacggtgatccggtgattgatgctttctgtgatgccagtaagacagtcatggaacagcagcagaaagatgatggtgagttcagtgttgctttgcgtactccttatataaaacataacgtacctctttataaagtctttggggatttatcccgggagtattcggtctctgttaaatatatgaatgctgggaaactggatgtcgtaatttttgaaaaagagttaagaaaaagtatagaagagcaaattaacagaatgacttcccatgaatgggaaagcgtttttcatagagggagggctatcttcgctgatttgtggctcatatttgttaacaaagtcaacgttgagtacaaaattgaaaggcagggcccgacttccagcgagatcagtgttaaatacaaagccagtgatatgtgttgtgttccttttagttttaacagtcacgattctctgaaaaatgtatattgcaatgcggtgagctatcttgactttaattctgtcaggtatcattcgttcaaaaccgtggcgacaaagggatggaacaggaataaatattcacaccttctttttattcatcaatcttcttcctctgacaaaggcggttttttcattggtgttcagtatgaaaagaatgatgtcaccttctctgataaatcgccattttctccttatgaaccccctgaaggagcgattctggatactaagaagaacagtgcggaggatttatcctttcctgagaactatgcgccatacagcgatgttaaccctgagcttaagataagaatccatcacgcacctggaaatattaaaataaagaatctcactcctgagttaaaaagtaaaatagagtga

SEQ ID NO: 198761 - DNA, 636 bp, Klebsiella oxytoca
atgtccacaatgaagcctgatgtagtctggtatcctccgcaatttccagcactgggccgatggctgacacgccttgtttttatcactgtggcgatattgctgacaggttgcgatcgacccgcgaaagaggagagcatcagtggcggtagcggcaccatagaagcggttaaccatacccactgggcgataaactatttcagcgtagacgggcagtcagggctggatattatcggcccctggcaggggggcggcggtggctgctgttacggcgtgccgacgaaatggaaaccggggatgagggtgaaagttgagtgggaaacgggtgtggcttttgccgatgatgtacctgaaatccctgagccgaaacgtcctgatacgaaagcctcttaccaagtatggcaagcatattccgataaaaaggaagagtggtataagaaaattaaggcactgaataaagtgcatacaaaaatagtccctgttcccgattattccggacaaaaaacctgcggaataaagatccactttttaccctgcgatcaaataaaagtcaccaccagctgctacgactacgataacccaaattatccgattaaagatccgatcaaaatggaggaaccccaaatatgtccacaatga

SEQ ID NO: 198762 - DNA, 651 bp, Klebsiella oxytoca
atgtccacaataaagcctgatgcagtctggtatcctccgcagtttccagcacagggacgatggttcacacgccttgtttttattgctgtggcgacactgctggcaggttgcgatcagttggcgcaagtggaaagtgtcagcggcggcagcggcaccatagaagcggttaaccatacccactgggcgataaaccatttcaacgtagacgggcagtcagggctggatattatcggcccctggcaggggggaggcggtggctgctgttacggcgtgccgacaaaatggaaaccgggaatgacggtgaaagttgagtgggaaacgggtgtggcttttgccgatgatgtacctgaaattcctgagccgaaacgacctgatacctccgggatgaacgagaaaaattattatcaagtatggcaagtgtattttgatgaaaaacaagaatggtataggaaaattaaggcactgaataaagcgcatacaaaaatagtccctgttcccgattataccgggcaaaaaacctgcggaataaaggttcactttttaccctgcgatcaaataaaagtcaccaccagctgctacgactacggcaatccaaattatccgattaaagatccgatcaaaatggaggaacccaaagtatgtccacaatga

SEQ ID NO: 198763 - DNA, 297 bp, Klebsiella oxytoca
atgcgcactcatttcaccaccatagatagcgtcttcgagcctcattctttctttgatgaaggcatgtcctgttttagacattactggtacaccgcctgcatgcttaacaatatcaatagtattccaactcaatctagggtcatggattattttagcaccatgatttttttcaagaaaagcagcagccaacagcccaactatatagtagccttctataaaatttcctttattatcaaaaagaaagcatctatcgaaatcaccatcaaatgcaatacccatgtcggcatttgcagataa

SEQ ID NO: 198764 - DNA, 153 bp, Klebsiella oxytoca
atgtatctcagcatgatattattatctcaagtagccatgctgtttcgaaaggtgtcatcacaggtcctgaccaattacatatatgttatgtacattcgccaattcgctatgcttgggatttacagcaccagtatttacgggaagcgggcttag

SEQ ID NO: 198765 - DNA, 771 bp, Klebsiella oxytoca
atgcttagtttttactcttcacaggctggcgctatagtgcgctggctcgatctgcccggtcgcggcgaccctgttgtttttatccacggcctgggctgcgcctctacctatgactatccgcgcgttgccgccgacccggcgctggccgggcggcgaatgattcttgtcgatttacccggtttcggctacagcgataaacccgagtccttcggctaccgtattggcgatcaggccggggtggtggttgagctgctggaccgcttagggcttgagcgctgctatctatatggccacagcatggggggcagcgtcgcgattgaagcggccgagcggctcgccggacgggtgcgggcgctgctggtggccgagcctaatctctatcccgggggcggcatgtacagtagacgtatcgccgaacagactgaagaacgctttattgctcgcggctacgccgacatgctgtccgccgacgcttcgccttgggccggctgtctgcaaaacagcgccccctgggcggtgtggcgcggcgcgaccagcctggtgaagggcgttaatccctcctggtttagccgctttatccacttatcctgtcctaaggctctgatatacggtgaagattcgctaccggcccgggaagcgacggatagcgaagccgccgggatcccgctgctggtgataccccaggccgggcactcaatggcgtgggaaaacccatcggcgctggcccgtacgctggccgatttttactccgccattgaggcagaagtctga

SEQ ID NO: 198766 - DNA, 330 bp, Klebsiella oxytoca
atgatgaattttagagcattactggcaattacgttactggcgataagcgctttcgcctcgagtgagacgcgtctgccgcatatcgtaatcctcgcgaccggagggacgattgccggttcagcggccagcaatacccagactaccgggtacaaagccggcgcgattggcgtacagacgctgattaatgccgtgcctgagatgagcaaggtcgcgcgcgttgacggcgagcaggtcgctaatatcggcagcgaaaatatgaccagcgacatcattcttaaactgtcaaagcgcgtcaatgaactgctggccgcgatgatgtggacggcgtag

SEQ ID NO: 198767 - DNA, 546 bp, Klebsiella oxytoca
atggacgaattatctaacattctcgaagttgcaacgcagaatattggtgaagattacttttatcttaaccggtttcggggctccacgactcttcgtgaaaggcattattgttacgaactttaccatcaaatgcggtgtttatggccagatcagaatagatacatcctttctggagaaattgataaaaactctcatcattacataaaatatcttgttggctcgtttcccatccctgatttactagttcacatgccaggaacgatgaataacgaggccataattgaaataaaaacaacccaattacaatataccggcatagtaaaggatataaccaatttatctatatttgtagaaagagcaaattataaaagagctatttttatgatatttggaaatgatttctctgaagaaaagctagataaaatcaaggagatattttttatcatgcataaaaaaggaataaacgttaaacccatagagatatggcttcattacaatcatgggcagaaggctcaaaaaattcatacacttgaaatcgctggttaa

SEQ ID NO: 198768 - DNA, 783 bp, Klebsiella oxytoca
atgattttgtacaaatacatagatcaaaactcgttagctcatttcttccaagaagatttcatttcaatgaaattttctccgcatagcatgtttaatgatcccttcgaaagttacggatatgccattgatgatacatccctcgtctcactgacaatgaggaatgagatcaatgaaaatcttgcttgcttatgcctttcaaaaaaaccactaaacgttttaatgtgggcgcattatgggaataaacatcaaggttttgttgtagaaatcgatacagaaaaagctggatttgaagataattcaaagtacttaatcactgcccagaatggaagtatcgagtatttgatggcacggcaaaaaggtagtttaaaggtcgaccttgccaatgtttatgaccatgatataatcaccaaattactactaaataaatcaatacactggtcgtatgaagaggaagtaagggtaataaaaaaaacgaactcattgataaggaaacatgatattttaattgataagattactaatttagaagcaatcacaggcatttacattggtatgcggaatgaaaatttcaacgaagtggttaatggaaatgaaaaactaaaaaacctcattatcaatcaaagagttaaactctaccgctgcgattttaaaaagagcacatgggatttagaatctgaagaatatcagtacgtaagctccccacacataatggaacggatagatgttttttcatccctcagacaagttgtaagagccatagaacgtaatcacattgataactaa

SEQ ID NO: 198769 - DNA, 123 bp, Klebsiella oxytoca
atgcaatttctggagcagattgaggttggctatctggtaaaatttggcttaaattacttaaaatactgttaccttgtttttgctccacctgaattaatgcatcagcttgatacacaggtgtag

SEQ ID NO: 198770 - DNA, 1101 bp, Klebsiella oxytoca
atgtctaacgaaattaaatatatcgaaacatcgaagctagagtttgacccagaaaaccctcgtttttaccgtttgaatgacagagctggctctgataccgctgtcatagaggaaatgcttgacgatgaaagtgtgcaagacctcatgctatctattggcgaacagggatacttccctggtgaaccccttttagtagtcaaaaaaggcaaaaaatttgtggtagtagaaggcaatcgccgcttggcagcagttaagctactcaatggtgatcttgttgctccaaagaaaaaagaaaaaagcgtacaaatcatattggacgaagctttgcagaaaccacagcaattgccttgtcttatttatgataatcgcgaagatgtactgagatatattggatatcgccatattactggtgtgaaagaatgggactctctttcgaaagcgaagtatttaaaagagcttagcgacaccttttatcaaggagttgataaagatacgttattcaaatcattagctaaagaaattggtagtaaaccttattacgtggggttgctactgacttctttacatctttatgaagtagcagcggatgctgatttttttaatttaccaatgaaagaaaaggatgttgatttttcatatataacaacttcactgggttataaaaacatcacttcttggttagggcttgaggatagaacggacttagttgcaaatgatttggttttagataacctaaataaattgtttgcatggttttttgttcgagatcagcaaggtgagactattattggtgagagtcgagcaataacaaaacttaatcaaattgttgctcatgactctgctatcgaaaacttaataaagtcaaagaatatagaggaagcttatttatatacaaatggtcaagaagaggcattggagaaagctcttgaacaagctgagacgagcctaaaagttgtatgggacatgcttttaaagacagctaagttcactgaacgccaagaatctcatgctagcgagatagcaaatatttcccggaaaataaaaagacatatcgaagatgtcagagaggactatcgagatgtacgtaaggaagatagataa

SEQ ID NO: 198771 - DNA, 942 bp, Klebsiella oxytoca
atgttagagaatctagactctttaccagacaacgagccatatttatgggcagattatttagaaatctgggctacaatcagcatagataaatgtttcagtaggggggagctttatagcatatgtagagctcaggcaaaacctaaaacaagaaccttctctgatgaaaaatggcagttagcaataactttcattgatacgagaattgctctttttggagcaagctatcctttttatttgtcccaggatagagatacgattcatattaagcatgacattatttttgatttttcagaaaacgaaaaattgtatattgcacttttgttttgtgcaaatgttaaatacataaaatataaaaaaagacatatacttactggttcttttgaaaaaataagcctgccgatatttaaaagcttgatgccttcagatgcaacaataactccgtgctgggcaagtgcaggaaataatgggacttatactggtttgctatacgataagcttgtacagatagcgaatgacataagatgtagcgcaaactttacgcctgcctatttcaaaccaggggatagaggggatggtgggatagacatgttggcctggcatgatatggcggatactcgcccttccataccaattgcttttgctcaatgtggatgttcaaaagacgagtgggtagctaaacaacttgaggcatctcccgtaaaaatgttacatatgcttcccgtaatccatccctgggtaaactattattttttgcctcatgatttgaggtggcataatgctgattgggcacatttaagcgatataggtgcagctatttttgttgatcgcttgcgattgattaatctaacaatacgtaatggctggatatcacatgcaagaaatactaggtatgtaagatacctagtaaatcgacaaattagtgtaagtgacttagtcccataa

SEQ ID NO: 198772 - DNA, 939 bp, Klebsiella oxytoca
atgccaactgtagtgtcgcttttttctggttgtggtggttctgatgctggagtcttgagggcagggttcgatgtgctcatggcaaatgacattctaccttacgcccgagatgtgtacttggctaaccacccagaaaccgattacattttgggggatgtttctgctatcgaatcgtttccatctgccgatctgctagtcggttgctacccctgtcaaggttttagccaaggtggagttcgaaaagctgacagaaaaattaacacactgtacttagaattcgctagggctctcagaatcgttaagcctaaggcgttcattgtcgaaaatgtttctggtatggtgcgaagcaactttgagcatttgctgaaagatcagtttaaagttttcgaagaagctggctatagagttaagtctcagattttaaatgcctcacactttggtgttgcacaggaccgtaagcgcatttttatcgttggcatacatgaaaaatttgggttggattttcaatttccaacagcgactcatggtgacggattgaaaaagttgactactatccgtgatgcgattggctctttacctgagtggccagtaggcgagttttatgacgctgatttccattggtattatttatctagaaatcgacgtcaggattgggaccaaatctccaagaccatagttgctaacccaaggcatatgccattacatccgattagccctactcttgaaaagttagggccagataaatggcaatttacttctaatgaccgtgcgcggcgctttagttttcgtgaggcagcttatcttcaagggtttggtaatttagtttttcctgaaactgagcgagcatctatgaacatgaaatatacagtagttggcaatgctgttccgcctccattatttgaggcggttgctagttcattacccgatttatgggactaa

SEQ ID NO: 198773 - DNA, 831 bp, Klebsiella oxytoca
atgccggcgcaggtgggtcatgttattcactatcacggaacgcctgtatggggtgacgccggtaacgttcatcgtattgcggtaaacggtgctggcgcatttgtatcgtatgcacgtcctgaccaattagcggcatcaattaaatacgccctctctgttgctatagataatggagctttttcagcgtggaagcgcggccttgttattgactggcagcaattctatcaatggctgattcctcattatcaccatcccaagctgtcattttttgttatccctgatgtggttgaaggtggcgaagatgacaacgatgcgcttatcgcgaatttgccacgctgtttcaaagaaaaagctgcgccagtttggcatttgcatgaatcattgcaccgtctggttgagctttgccgggagtggccgcgcgtgtgctttgggtcgtcaggtgagtacgcaactatcagaacccagttctggcatcgcaggatgtcagaagcgtttgaaacaatttactgcaaacatagtttctcaacgcaggtgcacgggctacgtatgcttgatggtagagtgctgggaaactaccctctagcgacagcggacagcactaatcttgcctgcaatgtaccaaagttcgatgttaaatatcctgagctcacaaaggtaattcgtgacgcggattattcgaggaacctttcagaaatagagcttaaagcggtaatactgaaacgccgctgcgccattctcaaaaataccattgaggcagtaacaccactgtcaatttcagagtggcaatcaaaagggctgactccacgccaattggagttagctatcgcatga

SEQ ID NO: 198774 - DNA, 279 bp, Klebsiella oxytoca
atgggtattcgtatcgaagtcggcgataaatgggtaattaccagcgaccagtatcaattcatcctgaatgaaaagaaagtcgttaagaccggtaataaagctggcgaggaatggctcgatactatcggctattatccgaaaatcgaacagcttatttccggcctgattcatcatcacattttacaatcgagaataaactcgcttcaggaaatggccgaggaaatagagcgcgtcggggctgtttgtgctgctgcgctcagtagtaaaggcgagaaataa

SEQ ID NO: 198775 - DNA, 237 bp, Klebsiella oxytoca
atgaaaccaggcaaactaaagtcggggtgccgtgttcttatcaagcccgaatttaaaggcggttttctccgtcacggtacgttcattcgccgagtacagcgcactgcatacgaatcagcgtatagcgttattcgtgttgatgagtatgtgggattaaatggtcctgacgataaaggcgatgcccatttccctgattacgacgtttcccggcgcgtcagcttactggagggttgctaa

SEQ ID NO: 198776 - DNA, 855 bp, Klebsiella oxytoca
gtgactcggattctgatagtgattccgactctgacagcgattcggactctgacagcgactcggactctgacagcgactctgactccgacagtgattcggattcggacagcgattcggactcggatagcgattcggactcggatagcgattcggactccgacagcgactcggactcggactcggatagtgactcggattcggacagcgattcggactccgacagtgactccgactctgacagcgactcggattcggacagcgactcagactccgacagcgactcggactccgacagcgactcggactctgacagcgactcggactccgacagcgactcggactccgacagcgactcggactctgacagcgactcggactccgacagcgactcggactccgacagcgactcggactctgacagcgactcggactccgacagcgactcggactccgacagcgactcggactctgacagcgactcggactccgacagcgactcggactccgacagcgactcggactctgacagcgactcggactctgacagcgactcggactctgacagcgattcggactccgactctgacagcgactcggactctgacagtgactcggattcggacagcgactcggattcggacagcgactcggattcggacagcgactcggattcggacagcgattcggattcagacagcgactcggactccgacagcgactcggattcagacagcgactcggattccgacagcgattcggactccgactctgacagcgactcggattccgacagcgatatcgaggccatccccgatagcaacagcccggacgttgtcgcgctggaaggtaacctga

SEQ ID NO: 198777 - DNA, 999 bp, Klebsiella oxytoca
gtgagcgcgcatctggctaacgggggttggtggggaggcccgccgccgccgtggagcgaagcatctgaagatgtggcggtgactttcggctcacaggcggcagagctggcacgtaatgtggccagccactgcgacctgatgggtgcacacctgacggcagctcagaaaacgaaagtcactgcaatggtggtgcatgaggctaaccgctttgtgaagtacacgcccaaataccgctggacgcgcccggatatccgggggcaggtgaccgataactacccgactggcgattccaaatcagaggaaattgcctggaatctggctatcctcgcccgcgcactggttctggccccggataatgctaacgccgaacgatgggccgagcggctgattacgatgcagattgcggcgctgggtgacagaaacgacctgaccgagacgatgacgattaacgggctggcaccgtgcgatgtaatgaacgggacaaacgttaacccgacgcgcctcgttgaaaaccatggagtcgctgacggccaggacgtgtctcgctggtacacgatggcgtcattgtcaggcagcgagtggatgttgcgtacctttctgctggcaggcaagccggtaccctcggctgcgctgtggcatatggccgataccttgcgggcgctggcctacaacccggacggttcggtctggagcatggactggagggagcctgttggcgaactgtcctatgcaccggcgattgcatacatgtttgccgagccgcgtcaggactatatcgacacactgctgcaccgcctggcgatttttgccgggcagcaggacgacaccaccggggcgctgcctgccggggcgtttaactggccggtgtatggttcttcccagcctggcgagttcctgagctacatccgtctgtctgaccgcatgctgagtccgctgacctgtccgcgtgccaccaatgcacatttcaccagccttgccgctatttaccggagcctttga

SEQ ID NO: 198778 - DNA, 768 bp, Klebsiella oxytoca
atgacccttgaaattgtaccgggcaagctgaacagccctgacccgtccattaaaaattatgccccatacgctcccgccatcggcgtgactggctataccgaccgctggcgaccggcgctggattttgcggccagcgtcgtcggtgatgcggtatccacgtatcccagcccgttgatgccggaaaacatccttgcaggtgacacaaccaataaacccgtgattgtcgatcagtctggtgttcgtatggtggactgtgccacacccggtgcgctggcggcgctgacggacattaaccgaaaattcggtgacgtcagtctgctggcggtgtggtatgaggcacatggtggggcgtcccactcaatcctcaccgccggtgggctaaggtttctccgtgcaagtaacgggtggtcgattacaaaaatgtccggtgctgcgggtagcacactgagtatctccaacgatccggccgccggtggtgtggcgatttcagcgcgtcgatatgcggccgttctgactattcccgccgatggtgcggctgcggtgacgctacagcttattggcgcaggctcggcagcagtaaaagcatcaggagtggtgacgcgcggcgggtcaatggatgagcagcgacgcctgcgcttcggtaaagatacgggcggctcagccaataccggaccgcagtttgccgaaatggttatctgggaacgtctgctgacggcggaagaaatcgccatcgctgccggttatgccgcgagcgcctacagtctttag

SEQ ID NO: 198779 - DNA, 408 bp, Klebsiella oxytoca
atgaaactcatcaaaacaactcttttatgctcctccatagtcttttcctacaatgcattagctcaaagcattgatctgcaaacattaaataaaagtttaaagccgtggcaacctgctgagattgtccaaacatcaaatagcattaagatcacgttaccagccaataccgtttcatcggaagcatatgaagccttgatatcatccggagtttgcactcctatctggcttaaagatgcccctacatcttttctcaaaacaacgtcagagatacacgtcgttaataagttttccgcacttggttatacatttgaacaccctttgactacatgtaaaaaaatgggcgaactaatggatgaccaagccaaaagcctgatgtacggaaatacgcgcacctacacatcaaaataa

SEQ ID NO: 198780 - DNA, 831 bp, Klebsiella oxytoca
atggccaggtgcgcgctcattcttaaaatatcactggcaatgctggcatttgcggcaaactccattctgtgtcgtctggccctgcagggaggccacattgatcccctttcattcagcagcctcaggctggccagtggtgcattcgtcctgtcccccttcctcttttatcacgccaggaccacattatcgctgtggcgtccgctgagcgggttttacctcatggcgtatgcggtgctgttttctgtcgcctatatccatctcgataccggggctggtgcgctgttactttttggtgccgtacagtttgcgatggtgatccacggattatttaaaggagaatcactctccgctatgcgggcttgcggtttagttctggctctgacgggaattgctgccctgctgttacccgggacgaaggcaccgccgctttacagtgcacttatgatgatcgtttccggattagcctgggcttcaacggcggctaattttattctcgcagcgccgatggctctcgctcttacgttgctgtttatgaagcagggtcactctgatgctgcaggcattgctttgtcattgctgtccggtgccgtcgcctcagccggtgcctatgtattgtggtatacccttttaccctccctcggctctattaccgccagtatccttcagctcagcgttccctgcctggcaatgctagggggtgtggtattcctgggtgaatcactgacggtcagaacgatattttctgccctggcagtgctgactggcattgtgatggtgacacgcgagaaatccccccgtcagccgatggcaaaggcgagaaaacctcaataa

SEQ ID NO: 198781 - DNA, 471 bp, Klebsiella oxytoca
gtgatagctgaactatccgcggctatgaccgcgataaaggagactgcgggtcttgcaaaagtcattaatgacgcgaaaactgatgctgaagttaaagctgcaactattgagcttcagaacaaactaatcaccctccaagctgaatgtttctctcttggtgatgccatccgttctcgtgacgagaaggtaatgcttctcaaagcaaaaattgcagagtttgaagacttcaaaagccaaaccgaaggctatgttctgaataagtttgattctggttctctggtgtattccaagaagcagattgtgggtgatacggaaataaccgtgcatctttgtccacattgttttgctgcaaataaagtatccatactgcaacctcaacaggtgagtatgtatgcgagtttcaatcaaagcagatgtccctcctgtcagaatgtgtttgatacagactctgcacctccagccagttactga

SEQ ID NO: 198782 - DNA, 192 bp, Klebsiella oxytoca
atgagcaaactaaacacgaagcaactcgagattctttcagtaatagcttccggtgagcgtccctacgcaacctggcggcaatcactcaaagcgctacagagaagggggctgattaccctcactagctgcggatactcaattacgacagcaggtttgtcagcgctaaagcaggaggtgccgcatgacaactga

SEQ ID NO: 198783 - DNA, 222 bp, Klebsiella oxytoca
atggattttgaagcgcggaaacaaaaggcgctggcgataatggccagccgtaagatgtggaaaagcaattatgcaccgcctctgatacgactgatgtggcggctggggataaacattcccccgccgccgtttgctccgttctggcaggttttttgcgtgatgacaagctctttctccgtcggatatgggctgtggatgtactggatggtgtggcggacctag

SEQ ID NO: 198784 - DNA, 3471 bp, Klebsiella oxytoca
atgaggcgcttcctctcgctatttaaaaaaccggaaattgtgttctggcttttggtgttaattgtgctggtttgcagccttgccgtggtgagtatcgtctactggctgcctgaaaggctacagctcatcagggaaacctccgcctggtatgcctggttgagcggttctgtggcagcaagtattgcactggccataactggagtatttcttttctttggtgcgcgagctgaaggtaaacgtagcttcagtaaagagcggcaaaatgcgcagggtgatgatgttaagacgccaccaaagaaagatgtaacaccagtatctgctgcagtgacgacccgtcaacaaattctcaaccaccttcgtcgtcgctaccatcttttctggcgtcgcaaagtccgtctgctgctgatcaccggcgatgaagctgctatcgaacagctggttcccggcctgcaacagcagcagtggctcgaaggcaaccgcaccgtgctgatttacggtggcagcctggcaccggagcctgaccgtgaaaaatacaccgcattacgcaagctgcgccgcggacgcccgctggacgggattgtccgcgtcatgccgcagtcacttaacctggccccgcaaatcagcgacagcgatttacgcgggctggaaaaaatcagcgaactgctgcgttattccgccccggtctggctgtggcagctgtgcgacagcaactggtcgcagggtatgcgtcctgagcaggctgtgggggcaagttttcccctacgcgcaaaagaagacgatattatccgccagctggagcggatgctcccggccctgcgggcgcagggggtaagccaggtcgctgagaacaacagccacgacttcctgctgcgtctgggccagcacctccaggacggcggtatcgtccgccgggctcagcaactgctgccatggctctacgactctcagcagcgtgttcctctacgtggcctgatgttcagcctgccggagaataaatccgccagtacgtcagcgggaacagccgatgctgagcaatatatccctgaattacagcgccatgccctgaccctgccggcgacctggcagggtatcgttgacgactgcacccgtgtgcggggccgccgtgtcggcatggcgtgggagaggacgcttgcctggacactgatgaccatcatcgttgtctggggggcgggaatgctgctgtcgtttacggtcaaccgccagcagatagtctccgtcgccgaacaggcacatgccctggtggcgcatccttccgtatcggacaaccagctgacggccctgcatactctgcgtaatgatgccgggcgtctgcagcataatgctcaggagggcgccccctggtatcagcgcttcggcctggaccataaccagcagttgctccgcgcgatgctcccctggtacggcgtggccaacaaccgcctgatacgcgacccggcaaatgaggcgcttaagcaaaagctcagtgcgctggcaaactctgcacccaacagcgaccagcgggcgcagctggcgaaaccgggctacgaccagctgaaggcctggctgatgatggcccggccggataaagccgacggcgcattctacgcacagaccatgaaaaccgtgcagccgacgcggacaggtatctcagccggtctgtggcagagcctggcgccggatttgtgggctttttacatttccgaactgcctgcgcagccaaagtgggtaatcacgccggatgcgcagctgatcagccagagccgccaggtcctgctgcagcagataggacggcgcaacgcggaaagcacgctgtatgagaacatgctcaaatccgtgcgtcgtaactttgccgatgtgtctctggaggacatgactggcggtaccgatgcgcggcgactgtttaccaccgaggaggtggtgccgggaatgtttacccgccaggcctgggatggggggattcagcaggccatcgaaaaggcggcgaattcccgccgggatgaaatcgactgggtgctcagcgacagccgaaaagccgtctcctcagacctgtcgccggaagccctgaaagcgcgtctgacacagcgttacttcactgactttgccggcagctggctgagcttcctcaacagcctgcagcttaatccggcgaacaatattgcagacgttaccgaccagctgacgctgatgagtgacgtccgccagtcgccgctgattgccctgatgaatacgctcgcctggcagggacagaccggccagcaaagcgaaggcctttcggattccatcatcaaatcggccaaagacctggtcggcggaaaagacaaaccggtgattgaccagtctgcatcaggcccgcaggggccgctggatgaaacctttggtccgctgcttcagctgctgggcaaaaacaaaggcagcaacgtgatgtcggcggataacacgctgagcctgcagacttacctgacccgtatcacccgcgtgcgtctgcgcctgcaacaggtggccagcgcttctgacccgcaggcgatgatgcagaccctggcgcagaccgtattccagggcaaaagcgtggacctcaccgacacctggcagtacggcagcctgatttcggcaagccttggcgaggagtggagcggttttggcagcacaatgtttgtgcagccgctgactcaggcctgggagaccgtgcttcagccgtcggcagccagcctgaatgataaatggagccgctcggttgtcgcgaactggcaaactgcctttgacggtcgtttcccgtttgccgccagcaaaagtgatgcctccctgccgatgctggcggagtttgtgcgcaaggacagcgggcgcattgagcgcttcctgacgacggagctcagcggtgtgctgcacaaggagggcagccagtgggtgccggataaggtcaacagtcaggggctgagcttcaacccggccttcctgcgggccattaatcagctgagccagctgtcggacattctgtttaccgatggcagtcagggcatcagctttgagctgcaggcgcgccctgtgccgcaggtggtggaaacgcagttgaccattgatgggcaaaagctgcactactttaaccagatggctgactggcagtccattcgctggcctggcgacacttacaagccgggaaccatgctgacctggaccaccgttaatgccggtgcgcgtctgtttggtgattacagcgggacctggggctttattcgctggcttaacctgggtaagcgtcagcagcttgaccgcagccagtggatgatgagtttcaccgcaccggatggccgcaccctgcagtgggtgctgcgctcacagctcggaaaaggtccgctggcgctgctggaattacgcggcttcacgttgccggatcagatattcagcgtcgacagcgcggctacggctcaggcgctgatgaccaaaacggaagacagtgatatggacggaactgaatga

SEQ ID NO: 198785 - DNA, 567 bp, Klebsiella oxytoca
atgcatagttcattaggtgtattaacatctggtaaagaaccaaccatgagcagcctcgaaatggttgactacatcaatgccgatcggaaggcgaaagcagaggcggaagggttgaagttcccatgcaagcgcttcacaaggattcagcacaagcacatccttgccaaaacgcctaaagtgctgggtgagacatcagccaaatttttggccgatgatacttacctggtcggtaatggtgctagagctacccggcagatttataactttcccaagcgcgaagcctgcctgatggcaatgagctacagctacgagcttcaggcccaggtgttcgatcacatgacagagcttgaagttgggtcgggtgttggtttcaccatccagcagttacagcacatgctggaagtagccagaaaagcttccgatgaggactcttctgatgctggtcgccggttgagaaaaagaaaagatgacttagtcgtaatgaagaaggcggaaaggctcattggcgacattagccagatggctttctccctaatcggtggcggaaaaactcttaaccatgaatag

SEQ ID NO: 198786 - DNA, 219 bp, Klebsiella oxytoca; identical to SEQ ID NO: 77572

SEQ ID NO: 198787 - DNA, 663 bp, Klebsiella oxytoca; identical to SEQ ID NO: 77573

SEQ ID NO: 198788 - DNA, 1002 bp, Klebsiella oxytoca; identical to SEQ ID NO: 77574

SEQ ID NO: 198789 - DNA, 1119 bp, Klebsiella oxytoca
atgaaccggggacaagctgacgtcagcgtcgccgccggaggccttcgcaagacttttgaggcgccgggtggcgggccgctgtatgcggtcgatggtgtatcgctacaggtacgccagggcgagctgaccgcactggtcggcccggacggtgccggcaagaccacgttgttgcgcatgatagccgggctactcaagcctgatggggggacattacgcgtgctgggcatcgacgtgacgcaagacccgcaggcggtgcaggatcgcatcagctacatgccgcagcgcttcggtctgtatgaagacctgaccgtgcaggagaacctcgagctctacgccgatctgcacggtgtaccgcacgaggtgcgccgcaaacgctttgcgcgcatgctggaaatgaccgacatggcccgattcacgtcacgcctggccggaaagttgtcgggcggcatgaaacagaagctgggcctcgcctgcacgctggtacgttcgccggctctgctgttgctggacgagcccagcgtcggcgtcgatccgctgtctcggcgtgagctgtggaagatcgtgcagcaactggtcgaggacgaacggctcagtgtgatcgtcagcactgcctacatggacgaggcagagcgctgtgcccaggtgtttgtgatgaaccagggcaaagtgctgaccgggggcacaccgcaggcactggccgtgcgcgtgcgcgggctgaccttcgttgcgccgtcagaaaaggacatacccgcgcgcgatttgcaggccaggttgatcgacgcccgcgacctgatcgtcgatgccgtgcccagcggtggcgcggtgcgtttcattcgccagccggaggcggacacggcgaagatcgacgcgctgctcgaaggtttgcccgtgaaaccgcgccaggaagagcttgaagacgccttcatgatgctgctgcgccagcatcaggatggtgatacggctgcggcatcacaagccgtgcctcaggtgacgaccaacaaaaccgccgatggcaaccccgtcattgtggtgcgcgatctggtgcgtaagttcggcgatttcaccgccgtcgccagcacctctttcgaggtgggggtcgtctcagaaaacggaaaataa

SEQ ID NO: 198790 - DNA, 165 bp, Klebsiella oxytoca
atggccgtgagctggttcaaaaaggttatgcacggctggtggatgttgataatcctgcgcagccagaacagccagaacagccagaacagccagaacagccagaacagccagaacagccggaaactgtgccagagaagaaggctaaaaaataatgttagaaattga

SEQ ID NO: 198791 - DNA, 711 bp, Klebsiella oxytoca
atgtcagcactatttgaacgcgcccaaaaaacggtagtaatgattacatcagtgccggtcactgcggaagaactggcatcagcgacctggctcaacctgagttgtaccattaaacaggccagctttaccgctggtcagaaaaacgatattgacgtgacaacgctctgctccgaagaaacggagaatatcaacggactcccggcaccgtctgagatgtctctctccggtaacttctaccgcaacccggcgcaggatgcacttcgtgcagcatacgataacgacggcgtttatggatttaaggttattttcccgtccggaaatgggttcctgatgcgtgctgaggtgcgtcagcacacctgggattcacaggcaaatagcgttgttgctgcgactttctcccttcgtctgaagggtaagccgagcaatatcgatgcctccggcatccttgcatttagtagcgatctgccagtcactgaatcagttactgccgggagtccactttccttaagtgtggtggctacaggtggtaaagctccatatacctacgtatggaaaaaaggttcgtcaaccatcagcgggcagaccagcgcaacgtttaataaggccagtgcagtttctggtgatgccggagtttactcctgtgtagtcactgactctgccactccggcgaacgttatcacctcatctgactgcaccgtcaccatcagttaa

SEQ ID NO: 198792 - DNA, 222 bp, Klebsiella oxytoca
atgagcgagatgagttatctggaaaaattgctggatggggtcgaggttgagtggaaaacactaggcagtatagctgaactaaagcgaggcacatcaattacaaaaaaagatgttatcgatggaaccatccccgtagtcgctggcggacgcacaccagcttattatcataatactagtgatcttgaccctccatctccgaacagcttttgtatcttaagttaa

SEQ ID NO: 198793 - DNA, 774 bp, Klebsiella oxytoca
ttgccgggcgaggctgccgcgtgggaatcggcccaccttgccgggcgccggtgccgtgtgggaatcggcccacctttgcgctttgtaccagtcaaagacgaaagccagcaggcaatgcaatgcttacatcggacaagacagggatttatccaggaaagaactgcaacgtataaccgtcttcggggcctgatatctgaattcggggttattgccccacaaagcactgatgctctgcgtcatgttgtttctgaccagaaggaaactctgccagtacaggttaggctgtgcattgatgatctattggcacatgtcactaatattgaagagaaaatcgccgaatatgacagggtattatctcgtgtggccaaaaaagatcatcgcagccagcagttaatggaactgaaaggtgttgggcccaccacagcgagtgcgctggtcgccagtattggcaatgcccatgattttaagaacgggcgccaactggcagcctggttggggctaacgccatcacaatacagtagtggcggaaaatcaaagcttggcaggataacaaaagcgggtgatgcctatctgcgaaccctactggtccagggagctcgttctgtaatggtaggggcagagaatagaacggactcgtttagccgttgggtctgctcgttgattggtaggcggggatactggcgtgctgtcgttgcaatcgccgccaagaatgcgaggttgtgctgggcatcattacattacggcgatgacttcagactgtattcaacaacgtga

SEQ ID NO: 198794 - DNA, 1086 bp, Klebsiella oxytoca; identical to SEQ ID NO: 77619

SEQ ID NO: 198795 - DNA, 1599 bp, Klebsiella oxytoca; identical to SEQ ID NO: 77620

SEQ ID NO: 198796 - DNA, 1530 bp, Klebsiella oxytoca
atgaataagctgccgagaggttggattaacgtcacttttgaagatgtcgttgatgtaaacccgcggaagtctgttgatttgacttttgatgatatggtcacattcgtacccatggctgccgttagtgaaatatcaggttctataactaatggggttgttcgtcctttacgtgaggtgaataaaggatttactcaatttgctgagaatgatgttatctttgcaaaaataacaccatcaatggaaaatggaaaatcagctgttgctatcggcttagagaacggtattggatttggttcaacagagttccatgttctaagaagccgtggagcagtgttgccagagtatatttggtgttttatccgtcaaaaatcttttcgtgaggcggcacaaaaagtgatgtctggtgctgtagggcagcagcgggttccagccagctatttaaaaacacatacactacctttgcctccgctaaatgagcaaaaacgtattatttcaaagatagagaagcagaatgatcatattattcgtgcacattatgagcttgattgcattccagccttaattgagaaatataaagaatcaatccttaggttagtctttgaacatgtcgatggggttgatacaactattgatgagttggctgagtttgtaaccagtggttctcgtggttgggctaaatattattccaatgatgggtcactattcctacgtgttgggaatactaaacgtggttcaatagacttagacctttctgataaacaaaaagttgctccaccaagtggaaccgaaggaactcgtacacgtattcaaggtggggatattttagttactataactgcagatttaggtcgtgttgccgttattcctgacgattttgaagaagcatatgttaaccaacatatatctttagtgagactaaaatcaccattgatatctcgctatttagcatggtttttggtaagccccgaaggacaaattctcctcaaaaaaaataatcggggtgcgattaaggcaggcttacgtcttgatgatataagaaaaataaaaattgtattgccggaaatggaaaagcaagagcagatagtgagatgtattgaggcatcattcgaattgctaaatagagtaatggctgagcatgctgcgctgaataatttattaccgaaacttgatgctgcaatacataaaatggcttttcgaggtcaactagttcctcaagagttgagtgatgaaccagtgaatatctctttatctcgaatttattctgagaaaacgacggtaacaaaagaaatatcacaagcacgccgaaagaaggaatcgattatgaagaatcccattgaaaacctattagaagatagtaaaaattggcctgacaaggggttattattcgaagagatagctaaacgaaatgctatcccatatgacactatgcgagatataatttttgcactattagcagaagaaaaacctaggctaaagcagatttttgataaggaaactgcgagtatgtatctgcagagggtaaaaaaatga

SEQ ID NO: 198797 - DNA, 1410 bp, Klebsiella oxytoca
atgaaacaagataacatcatccaaaaagtctggagcctttgcaacattttgcgaggtgacggcataacttactatcagtatgtgtccgagctcagctacttgcttttcctcaaaatcgcggaagaaaatgggacagagacacttatccctgagggggctcgttgggcagatttggagtcacatagtgaagaggggctgctaggattttatcaagagacgcttactcacttaggtgcaaccgtagaaaatgaggttatcaaagccatttatgcgtttcctacgacagtcttttctcattcagagaaccttaaggcagttattgatggaattgcaaaaatcgattggcatcaagtgggtaaggatggatttggtgatttttatagtggcttaattgataaaagtgcgcaagacacccgttctggtgcaggacaatactttacgcctcgaccattggttgaggctattgtcaaattaacaaaaccagccctcggtgagcttattcaagatcctgctactggaagtggtggtttccttgtggctgctaatgattatattctgcgtgctaattccataaaagaatataaatctaaccctcctaaatatcagggggtagaaatagaaaaaaatactcgtagaatttgtttgatgaataccttcttacacggtttagatgcggaaattatttatggagatgctcttactgatgatgcggaaagcttagaacctgcaaatattatacttgctaacccaccgtttggtagtaaagcaggtagcaaacgccctctaagaaatgatattccatttcctaatagcaataagcaacttgcttttttacagcatatttaccttggcctcaaacctggtggtcgtgctgcagttgttcttcctgataatattttatttgaaggtggtgttgcaaaagcaataagaacggaattgatggataaatgcaatcttcatactatcttacggctgccaactgggattttttatgctgctggcgtaaaaacaaatgttctatttttctctctgcaaggcgatgaaaaccagaggactaagaatatttggatctacgatatgcgtgcgaacatgccgaaattcggaaagacttctccacttgaatataaacactttgaagacttcattaattgctttggagatgatccatatggattgtcccctcgtcaagatcagggtgggaatggtcgttttcgttgttataccagagaggctattgccaagcggggagataatctagatatttcttggcttagcgatgatgaatcggtaagcgacttgaccgatatcgatgaaataatgacagcaattgttggtcatcttaattctgctctactagatattgaggcgattgcagatgagcttgcagataccgtaaaattaaaggattga

SEQ ID NO: 198798 - DNA, 1917 bp, Klebsiella oxytoca
atgaacaaactttcgcctgaaatgcccgaactgcaatcaatgaatatcactgctgataacatcaccaagcttaaatcattgtttcctgaagcttttaatgaagacagtgttgattttgaggttttaaagcagcttttgggtgagaatgtagacgacaaagaagaacgctatggcctgaactggcatggtaagcgtcaggctcgtcagcttgctcttaccccttcccgtggaaccttacgcccatgtaaagatgaaagcgttgattgggacaacaccaaaaacatcgtgatcgagggtgataaccttgaagttttaaagcttcttcaaaaaagttatgtaaatagagtaaagctaatatttattgaccctccttataatacaggaaaggattttgtttacccggataattttcaagataacatgaagaattatcttgaaataacggggcaaacagatgaaggcgtacgcataagttcgaatacagaaaccagtggacgttatcatactgattggctgaatatgatgtatccacgacttattttagccaaaaacttgttggctcaagatggggttatttttctatccatagatggaacagaagcctcgaatttagaacatttgttgaataatgtattcggagaagaaaataaaatcacgtctatatgttggcaaaagaaagtatcacctgcaaatgatgctaaatggtttagttcggatcatgattttattttagtatatgcaaagaataaagacatttggagacccaaaaagcttaaacgcactggcgatcagctatcttattataagaaccctgaccatgatcctaaaggagaatggaattctgcaacgtacacatgtaataaaagcatgtatgagaggccgaacctttattacccaatagtaaatccaaatactatggaagagatatggcctaaagaaacagcggtatggaaatactcaaaggatataactgaaaaatatataagcgaaaaacgcttatattggggggttgatggacttgcaaaattcccgcgtataaaactatatctttcagaaatggatgacgttgttccaagatccatctggaattatggcgatgtaggtcatactcaacaagcgacgaatgaaataaaggaactattttctggtgagcaagtatttgacacaccaaagccactgaaattgttaagaagaataattcaactatcatcaaacaaaagcgatgatattattttggatttttttgcgggttcaggaacaacagcgcatgctatttttgaacaaaataaggaagatagtatttctcgcaaaagtataattgtacaacttcctgaagtattattagaaagtaatcgtgagcagaaagcctcatactctttttgtataaaaaacaatctcaagccaacaataagtgaacttactaaagaacgtctccgccgtgcaggtaaaaaagttcgtgaagaaaatccagaatggaaaggtgatgttggttttcgtgttttcaaactcgatacatctaatatccgtccgtgggaagcctctgccgaaacactttcacaacagcttgatgcttatgtaagcccaatccttgaaggtcgtagtgaagaagacttgctgactgaactgatgcttaagcgtggtattgatctgagcgtaaacgttgaaacccggcaatttgatggattaaccgtttcttgtgttgacggtggcaaattgtttacctgctttaccagtcaaatccctgcatcttcagtcgaagaactgaccaaggggatccttgactggcataagagtctgaaagctgggaaagatagtgtctgctatttccttgatgacgcatttgaaaataacgttgctaaaacaaatctttgcgccattctggaacaacacggcctgactaacctgcacagcctgtaa

SEQ ID NO: 198799 - DNA, 252 bp, Klebsiella oxytoca
atgaaagcacaacttattgctacattggtcatgggatttatttctgtgaattccgcttctgctgcccaggaaattaaccatgccaatgggaaagaaaagataggtgtcgtctcagccagcaatgcctatacgcttgatgagttatcggatgcgctctctcgtaaggcagatgagcaaggggcaacatcgttcaaaattctgtctactaccgggaataaccggctgcacggtgttgctgaaatttataaatga

SEQ ID NO: 198800 - DNA, 1068 bp, Klebsiella oxytoca
atgaaaaatagggataaattagttagctttgcagcgaaacttgctagtcaaatcaagatttacacccgcagtaactttaatgatctttctactgcacaagaaatttcgctattgcctttaatcaattatgcttggggtgaacaatttgagaatatgaataaggtatctcaaaattaccctggctttgattatgggcaacctgtcaagcgtttaggtctgcagatgactgccaccgtagcaaaaaaaaagtatcagaatactttagacaaactgcggaacaataaggaattgaagggcaagtttgacgaggtttggtttttcgtactcacggctgaacgcttacctgataatgttcgtgaatactctgaggatttttgctgtaaatattacacgttatatgacttggttgaaatggtcatggcgcagcctctggcgtttcagtgtgaatttttgctccttgccgagcaagaatactcggattatttctctcctggtgtagtttcttctaatcagggatatagtgtatcaaaaaatattccggtcccctttgacttgggcctgtttaacgctttgattgaaactaatgaatggtttgatgatgttgccaaaggcgaacgagatgtgcatgaatttattgaaatatttaaaagaactctacgtcagtgcacttttccagctagaagtcttttaagcaaaatcattagtgaaatagactcgccgaagggtataagtacaaaaatagagtttcctgaaaagctactttatggcccactaagtattgatgaaagaaactattcagtattttcaaatgaccttgataatttgttcagcatggggttgattgaacgatggaataattctgtaggaatgtacactgtgggtgatgatgcgtattttgaaagtgaacgaatgatttgccttgagtttaaaaaatttgaacctgaaatgaatttgtatgcggctctatttatattttataaaatgtatcatgatatcaataaactagcgcttgcaattgaaaataatgatttttctctgcttgctgacggtgcttgccaaaatccttag

SEQ ID NO: 198801 - DNA, 903 bp, Klebsiella oxytoca
ttgcataacgccgcactcgaactcttcaacgaacgcttaccgcacaagccgtacttttcggacgatctgcactttggtgtacgcattgccggtaaggaacgcgccattctggcgaaatacattcagttcaatcagcctcacgccatgttctggctgggattcgacgtcgatcgcgccggtgccgccatcgactggagcgaccgtaacgcccccgcgcccacgctgaccatcaccaaccccgacaacggacacgcgcacctgctgtacgcgttggaaacctcgatacgcaccgcgccggacggaaaaatgaagccgctgcgctacgccgctgccgtggagaacgcgctacgtaaaaaattagaggctgacgcggggtattcggggctaatctgtaaaaatccgaaccacgggcactggaaaattgccgtatggcagccggaactctacacactggactggttagccgattttctcgatctgaacgcggcgaacgacaaagagattgtcgccgactacggcctgggtcgtaactgcacgttgttcgacaaaactcgcaagtgggcataccgcgccatccgtcagggctggcctgagtacgaccagtggttgcaagcctgttacgaaagagccagcgcttacaacctacaatttgcttctcctttagaggataaagaagtaatgggcattgcaaaaagcatatcaaaatggactgaaaaaaactttacggcatcttcatttaaagagtacgtcattaactctcataagagtgatattcaatctaagagaggccgcttaggcggattaaaaagcaaaggtggcgggcggccaacaataaactccccgtggaaagatatggggattagtaaatcgacatattataggaatatccatgacaagagatga

SEQ ID NO: 198802 - DNA, 1761 bp, Klebsiella oxytoca
atgacaagagatgattttaatagcgacactagaaccgttggacttgcaaggttagctaatagcctagaagaaacctatggttcttttattaatatggaaaataccaactctaaaggtgaggctagaagagaggttctgatcacaagatgtattgctgcgcatgcagtgaggatgtatggtgatgaactcgaccctgaagttgctgctgcatcagtttgcgatggtagcgatgatgggggagttgatgctgtttatgtaaacccaagctctaaaaaacttattttggtgcagtcaaagtacataaaagatgggaatgggtctgtaacaataaaagattttggacgctttaaagatgcatgtgcaaaagttgtagctaacgatctcaattcatttaatgataggtttttagagcacaaagaatcagtgactactgctatcactagtagtagctataaatgtatatgcgtttttatttactcagggacccaagggttaagctcagaagttattggagagattgatttttgggagaaaagccaaaataaagctctgttgtttagggatttagaatctagggatgagtatacaatactatttgaaacgcctaatgttactgacatatctactagcttgagtaatcaatctaccggagctatagatataagtaatgtaatattagagtcgtatggtgagatcactgaaccttacggcgcaatctacggaacgattgctgcaagggtgatacatgattggtggaaaaaatacaaatatgcgctttttgagaaaaacataaggagtgtattgggtgattcgacatcagtaaatgcaggaattatgtctaccatcgaaaatagcccggagaatttttggtattataacaatgggattactgcgacatatgaagaggtagatgagagcatagctaatgctggagcatctcgtaaaattggaatattcggatttaaaaagttaaatataataaatggggcgcaaactgtaagctctattggagctatatttgatagtatacccgaggaaaaaaaagacaaagctcgggtaatgattaggtttataaatgcgaaagatccagtgtttttaggtgacgtaactaagtacaacaatactcagaatagagttactggcagagatttcacgacacaaagacctgaacaacaaaaaatacagagagaaataaatttcgttgggggttatacatataagctcttgcgacaggaagattcagggatagctgcttctaatgtgatcgatatagatgattcattaaatgcactaatttgcgcatcaaagaaacctcaactgattgcaacgttgaagtctaatagaggtcgtttttttgatacaacagaaggcaatctttacgaacaagttttcaacccaagaaatccgccatccggtctttctgttatcaatgctgtcaatttgtacagagtgtgcttcgatgttttaaaagatacaattactaacgcatctaactcatcagaagaagagtatagtaaaattccatcattgctgacgcatggtaactatgtattcatcagtattttaatgggtaaaatacaacccacaaatacagttaatgacataaacacctatgacaagaatagcgtttctgttgatactcttgaactagctaaaagcatatttgaatacatccagtctaattatcctaatagttatctggctagatttttccagaacaaagaaaaagtagagcagatcatcactcacttttcagcgtga

SEQ ID NO: 198803 - DNA, 237 bp, Klebsiella oxytoca
atgaaaaaaggtgcgggtgtgcctcatgtccgagtgaaagagtttgaaacctatgatatacctatacctcctatcaccgaacaagaccgtattgtttctatactcgataaattcgacacccttaccaactccatcaccgaaggtcttccgcgtgaaatcgagttacgccagaaacaatacgagtactatcgtgatttactgttcagtttcccaaaacctgattccgtaacgaactga

SEQ ID NO: 198804 - DNA, 3123 bp, Klebsiella oxytoca
atgacgcagcagaccagaaccatcgccgaatccaataacttcgtcgtgctggataaatacgtcacggaatgggaagcgagtgaccgctaccagagtgaatcggagttagagcatgaactgattcaggatttacgtaatcagggttatgagtttgtgcctgatttaacctctcagtcggcgatgctggccaatgtgcgggtgcaacttcaggcgctgaatcaggtggtatttagcgaaggggagtggcggcgctttactgagggttatctcgataaccccagtgatactcttatcgataaaacccgtaagattcatgataactacatttgtgatttcacttttgatgatggtcgtcttgaaaatatcagtcttatcgacaagaaaaatcttatccgtaataagttgcaggttatccagcaatttgaacagacgggaatgcatgcgaatcgctatgatgtaacaatactggtcaatggactaccactggtacaggttgaactgaagaagcgtggtgtggcgattagggaggcctttaaccagattcatcgctacagcaaagagagttttaatagcgaaaattcgttattcaaattccttcaggtgtttgtgatatctaacggaacagatacccgttactttgccaatacgactagacgggataaaaatagtttcgatttcaccatgaactgggcgcggtctgacaatacactgattaaagacctgagagactttacggccacgttcttccagaaacataccctgctgaatatcctgtttaattactcggtatttgataccagcgacacactgctgattatgcgcccctaccagattgcagccactgaacgcatcctctggaaaattaacagtgcgtttcagtcaaagaaatggagcagcactgacggaggcgggtttatctggcatacgacaggctcaggaaaaaccctgaccagctttaaagccgcccgactcgcaactaaacttgatttcattgataaagtattctttgtggttgaccgcaaagacctagattatcagaccatgaaagagtatcagcgcttctcacctgacagcgtcaacggctctgacagcaccgcgggactgaaacgtaatatcgataaagatgacaataaaatcattgtcacgactatccagaagctgaataacctgatgaagggggatgcagatttagccgtctaccagaaacaggtcgtctttatttttgatgaatgtcatcgcagccagttcggggaagcccagaaaaacctgaagaagaaatttaaacgtttttatcagtttggtttcacaggcacaccgatttttgccggtaaaaatgcgctgggcgcggaagatactgccagtgtatttggtaatgagttgcatgcctatatcatcaccgatgccatccgtgatgaaaaagtcctgaaatttaaggtggattacaatgatgtgcgtccgcaatttaaggccatagaaaccgagacagacgagaagaaaatcactgccgctgaaaataaacatgccctgctgcaccctatgcggattgcggaggttacaaactacatccttcagcacttccggcaaaagacccatcgggctttccccggcgctaagggctttaacgctatgttcgccgtcagtagcgtcgatgccgccaaagcctactatgaatccttcagacacatccagaagttaagggctgagcaggacagcagttataagcccctgacggttgcgaccattttctcgtatgctgccaatgaagcacaggatgctatcggtgatattaacgatgagagtattgatacctcagagatgaacccaggctcccgtgagtttctggaatctgccatcgctgactataacgccgcctttaaaatgaatttcagcactgatggcaacggttttcaggattactaccgcgacctggctaaacgggttaagtctcaggaagtggacctgctgattgtagtgggtatgttcctgaccggcttcgatgctccggcactgaacacgttgtttgtcgataagaacctgcgttatcacgggctgatgcaggcattctcgcgtaccaaccggatttataacgccacgaaaacctttggtaatatcgtcacgtttcgggacttagagcaggccaccattgatgccattaccctgttcgggaagagcaacaccaaaagtgtggtcatggagaaaagctataccgaatacatggaaggcttcactgatgcagtcacgggtgaaacacgtcgtggttttatcgatattgtccgtgagctggagacccgctttcctgacccggcagatatcacttctgaaaaagagaaaaaagccttcatcaaactgtttggcgaatacctgcgggctgaaaatattctgcaaaactacgatgagttcacggcactgagagcgattcagacagtggatatcagtgaccctgccgccgttgacgcttttaaggctgaacatttccttgatgatgaaaaactggcagcactccagtccatccggttaccttccgaacgagaagtacaggactatcgttcaagctacaacgatatccgtgactggcagcgcaaggagcgcgaaagtaatgtgaagggcaatacgacagtcagctgggatgacgtggtgtttgaagttgacttgctgaagtctcaggaaatcaatctcgattacattcttgaactgatttttgaatacaacaaacagcacccgaacaaagagacactgaaggaagaggtcacccggcttatccgtgccagtctggggaaccgggcgaaagaagggctgatgctggaatttatcgggcagacagatatagataacctgccgaataaagagtccgtgatagagcagttctacaccttcgctcaggccgctcagcagcgggaagcggaggcattgattcaggaagagaatctcaatcacgatgctgccaggcgttatatcagtgcgtcactcaagcgtgaatatgccactgaaaacgggacggctctgaatgaagcgttaccgaaactcagtccgctaaatccaaagtataaaaccaagaaaaagacggtgtttcagaaggtctcagcattcattgataagttcaaaggggtgggtggaaggatctga

SEQ ID NO: 198805 - DNA, 1266 bp, Klebsiella oxytoca
atgaaaggtatgcagaaaatcaagagaggtaagcaatttacaggagtagttgtctatgcacttgaaccggcttcacaccataaaactgatcccagggttattggtggcaatatggccggtaacaataacgtcgaccttatccgcgagtttgggcaaacaaaaattttacgaccggatatcaaaaaaccagtatggcacaattctcttcgcttaccgcatggagaaaaattgtcagaagcacaatgggcaaccgtagccgacgactatatgtcccgtatgggttttactgatacacatcttcgttgctatgttcttcataatgataaggctggacagcatattcacattattgccagtcgtatcgatattactgacggaaagttgtatctgggaaaaaatgagaaccttatcagcactcgaattatcagtgagctggaaagaatacatggtctcacagaaacagcgactacttcaaaccgacgagctcagggcataaagaagctttcgcgcaacgaaaagatgctctctgaacgaacggcaactccctgcccaaaagtcgctttgcaaacttgcatcgataatgtgttagccaatcgcccagatttgttatcgttcattaagcaactggaacaagtgggtgtaacctgccagcccaacattgcttcgacgggcaaaatgaatggtttttcatttgaatttcgggggattgccttcaaggcttcacagcttgggaaaaggtatgcctggtcaaatattcagacacttattgattactcgcctggacatgtaaaactacttaatacaggatctaagtttgctcctgctccttgtaaacagccagaagcacaacgtcccagcagagaaactattctcgataaactactgcaactcaacgagcaagtcagaaatgaaagggagaatgaacttgcccataccatccaattgaaccaaaaactacgctttacggcccatcagatatccagacaacaccaatcccacttccaggtgtggcttccatttcttagcaggctcatacaactgatcagacagttgggtagttctgtgttgtatgcgacctctcgtccctttagacaaatctatcatcttcacttacttacctcctctcctgaacctggcgatgaaatacattcagaacaattggttagcaaaggatccaactacaaaccacattcaaatagttcatttttacaatttagtcaagaaattattgatcgtttatatagatcgataattcatttacgatag

SEQ ID NO: 198806 - DNA, 291 bp, Klebsiella oxytoca
atggaagagaaagatatcgaagaatctttggtgatatgcgagattttaaaaaagaaaatagtagctcttttagctgagcgagataatctgtttatccaactcaaaagtgcctttaaaacaagtaggcgggatatatttgacaactcaatagttagtataaatacaggcccaatgaagctagcccttgatgaaattgaaaaagtagatgataagattaataaattagttacacgatttaatcggcgcgcggaagaagcaggaaagccccgtttgaaaatttatcatcgttag

SEQ ID NO: 198807 - DNA, 2775 bp, Klebsiella oxytoca
gtgcccgaaagcctgctggcgttgccggacaccaaggatgagttgatccgtcactacacgttcagcgaaagcgacctctccatcatccggcagcggcgcggcccggccaatcggctgggcttcgcggtgcagctctgctacctgcgctttcccggcgtcatccttggcgctgatgagccaccgttcccgccattgctgagactggtcgccaaccagctcaaggtcggcatcgaaagctgggacgagtacgggcagcgtgagcagacccgacgcgagcacctggtcgagctgcaaacggtgttcggcttccagccgttcacgattggccactaccggcaggctgtccagttgctgaccgagctggccatgcaaaccgacaagggcatcgtgctggccagagccttgatcgagcacctgcggcggcagtcggtcattgtgcccgccctcaacgccgtcgagcgggcgagcgccgaagcgattacccgcgccaaccggcgtctctacgacgccttggctgagccgctgacggacgtgcatcgccgtcgcctcgacgatctgctcaagcgccgcgacaacggcaagacgacgtggctggcctggctgcggcaatccccggtcaaaccgaactcgcggcacatgctggaacacatcgaacgcctcaaggcgtggcaggcgctcgacctgccctccggcatcgagcggctggttcaccagaaccggctgctcaagatcgcccgcgagggcggccagatgacgcccgccgacctggcgaagttcgagccgcagcggcgttacgcgaccctggtggcgctcgccatcgagggcatggccaccgtcaccgacgaaatcatcgacctgcatgaccgcatcctgggcaagctgttcaatgccgccaagaacaagcatcagcagcagttccaggcatccggcaaggcgatcaatgccaaggtgcggctgttcgggcgcatcggccaggcgctgatcgaggccaagcaagcgggccgcgatccgttcgccgccatcgaggccgtcatgtcctgggatgctttcgccgagagcgtcaccgaagcgcagcggctcgcgcaacccgaggacttcgatttcctgcaccgcatcggcgagagctacgccacgctgcgccgctacgcgccggaatttctcgacgtgctcaagttgcgggccgcgcccgccgccaaggacgtactcgacgccatcgaggtgctgcgcagcatgaacagcgacaacgcccgcaaggtgcccaccgacgcgccgaccgagttcatcaagccgcgctggcagaagctggtgatgaccgacaccggcatcgaccggcgctactacgaactgtgcgcgctgtcggagctgaagaacgcgctgcgctccggcgacatctgggtgcaaggctcgcgccagttcaaggacttcgaggactacctggtgccgcccgcgaaattcgccagcctcaagcaggccagcgaattgccgctggccgtggccaccgattgcgaccagtacctgcatgaccggctgacgctgctggaaacgcagctcgccaccgtcaaccgcatggcgctggccaacgagctgccggacgccatcatcacggagtcgggcctgaagatcacgccgctcgatgcggcggtgcccgataccgcacaggccctgatcgaccagacggcgatgatcctaccgcacgtcaagatcaccgaattgctgctggaggtagacgaatggacgggcttcacccggcacttcgcccacctgaagtcaggcgacctggccaaggacaaaaacctgttgctgaccacgatcctcgccgacgcgatcaacctgggcctgaccaagatggcggaatcgtgccccggcacgacctacgccaagctggcctggctgcaagcctggcacatccgcgacgaaacctacggggcggcactggccgagctggtcaacgcgcagttccgacatcccttcgccgagcattggggcgacggcaccacgtcatcgtcggacggccagaacttccgcaccggcagcaaggccgagagcaccggccacatcaatccgaaatacggcagcagcccagggcggacgttctacacccatatctccgaccagtacgcgccgttccacaccaaggtcgtgaacgtcggcgtgcgcgactcgacctacgtgctcgacggcctgctgtatcacgaatccgacctgcggatcgaggagcactacaccgacacggcagggttcacggaccacgtcttcgcgttgatgcacctgctgggcttccgcttcgccccgcgcattcgtgacctgggcgacaccaagctctacatcccgaagggcgatgccacctacgaggcgttgaaaccgatgatcggcggcacgctcaacatcaagcacgtccgcgcccattgggatgaaatcctgcggatggccacctcgatcaagcagggcacggcgacggcctcgctgatgctcaggaagcttggcagctacccgcgccagaacggcctggccgtcgccctgcgtgagctgggacgcatcgagcgcacactgttcatcctggactggctgcaaagcgtcgagctgcgccgccgcgtgcatgccgggctgaacaaaggcgaggcgcgcaacgcgctggcccgcgccgtgttcttcaaccgcctgggggaaatccgcgaccgcagcttcgagcagcagcgctaccgggccacggtcaagccgtcgatgacggcctgttgcagtacctgtcgccgctcggctgggagcacatcaacctga

SEQ ID NO: 198808 - DNA, 2742 bp, Klebsiella oxytoca
atggtggccgcgcaactcaagatgccagtggaaagttggagcgagtacggccagcgcgaacagacacggcgggagcacttggtcgagctgcaaacggtttttgggttcaagcccttcaccatgagccactatcggcaagccgtgcatacattgaccgagctggccttgcagaccgacaaaggcatcgtgctggcgagcgcacttgtcgagaatctgcggcggcagagcattatcctgcccgccatgaatgccatcgagcgcgcaagcgccgaggccatcacccgtgccaaccgacgcatttacgcggcgctgaccgattctttgttatcaccccaccgtcagcgcctggacgaacttctcaagcgcaaggacggcagtaaagtgacgtggctggcatggctgcgccagtcgcctgccaaaccgaactctcgccacatgctcgaacatattgagcgcctgaaatcctggcaagcacttgatctgcccgcaggcatcgagcggcaggttcaccagaaccgcctgctcaaaatcgctcgtgaaggtggccagatgacgcctgctgatctggcaaagttcgaggtgcaacgacgctatgccacgctggtagcgctggccatcgaaggcatggccaccgtcaccgatgaaatcatcgaccttcacgatcgcatcatcggcaagctgttcaacgcggccaagaacaagcatcagcagcagttccaggcttccggcaaggcgatcaacgacaaggtgcggatgtatgggcgcatcggtcaagcgttgattgaggccaagcaaagcggcagcgatccgttcgccgccatcgaggccgttatgccctgggacaccttcgccgccagcgtcaccgaagcgcaaacattggcgcggcctgccgactttgatttcctgcaccacatcggtgaaagctatgccacgctacgccgctacgcgccgcagttcctgggcgtgctcaaattgcgggctgcgcccgccgccaagggtgtgctcgatgccatcgacatgctgcgcggcatgaacagcgacagcgcgcgcaaggtgcccgccgatgcgccaaccgcattcatcaagccgcgctgggcaaagctggttctgaccgacgacggcatcgaccggcgttactacgagttatgcgccctgtcggagctgaagaacgcgctgcgctccggtgatgtctgggtgcagggttctcgccagttcaaggacttcgacgaatacctggtgccggtcgagaagttcgccactttgaagctggccagcgaattgccgctggcagtggccaccgactgcgaccaatacctgcatgaccggttggaattgttggaggcgcaactcgccacagtcaaccgcatggctgcggccaacgacttaccggatgccatcatcaccaccgcgtcaggcctgaagatcacgccgctggacgcggcagtaccagacgccgcgcaagccatgatcgaccagacagctatgctgctgccgcacctcaaaatcaccgagttgctgatggaggtcgatgaatggacgggcttcacccgccacttcacacacctgaagaccagcgacacggccaaggacaaaaccttgctgttgacgacgatcctggccgacgcgatcaacctgggtctgaccaaaatggccgagtcctgccctggcaccacctacgccaagctgtcttggctgcaagcctggcacatccgcgatgaaacctattcgacggcgctggccgagctggtgaatgcgcagtttcggcaacccttcgccggcaactggggtgacggcaccacgtcatcgtcggacggccagaacttcagaaccggcagcaaagcagaaagcactggtcatatcaacccgaagtatggaagcagtccaggacggactttctacacccatatctccgaccagtacgcgcccttcagtgccaaggtggtcaacgtgggcattcgtgattcaacttacgtgcttgatggcctgctgtaccacgagtcggacttgcgcatcgaggaacactacaccgacacggcaggcttcaccgatcacgtgtttggcttgatgcatttgctgggatttcgcttcgcgccgcgtatccgtgacttgggcgaaaccaagctattcatccccaagggcgatgccgcctatgacgcgctcaagccgatgattagcagcgacaggctgaacatcaagcaaatacgcgcccattgggatgaaattctgcggctggccacctccatcaagcaaggcacggtaacggcttcgctgatgctgcgcaaactcggcagctacccgcgccagaacggcttggccgtggcgttgcgcgagctggggcgcatcgagcgcacgctgttcattttggattggctgcaaagcgtggagctgcgccgccgcgtccatgcggggctgaataagggcgaggcgcgcaacgcgctggccagggcggtcttcttctaccgattgggtgaaatccgcgaccgcagttttgagcagcagcgctaccgggccagcggcctcaatctggtgacggcggccatcgtgttgtggaacacggtatatctggagcgtgccaccagtgctttgcgtggcaacggcacggcgctggacgacacattgttgcaatatctgtcgccgctggggtgggagcacatcaacctgaccggcgattacctatggcgcagcagcgccaaggtcggtgcggggaagtttaggccattgcgaccgctgccaccggcttag

SEQ ID NO: 198809 - DNA, 363 bp, Klebsiella oxytoca
gtgatccgtcagcgtcgcggcgccgcgaatcgattgggcttcgctgtgcagctttgctacttgcgattccctggcacctttttgggcgtcgatgagcctccgtttccgcccctgttgcgcatggtggccgcgcaactcaagatgccagtggaaagttggagcgagtacggccagcgcgaacagacacggcgggagcacttggtcgagctgcaaacggtttttgggttcaagcccttcaccatgagccactatcggcaagccgtgcatacattgaccgagctggccttgcagaccgacaaaggcatcgtgctggcgagcgcacttgtcgagaatctgcggcggcagagcattatcggggtctga

SEQ ID NO: 198810 - DNA, 1812 bp, Klebsiella oxytoca
atgatggcgaaaaatgatgaagtccggcagaacatcattccgctaagtaagcagtacatgacgcttgatgcggcccaggccgatatcgtcaatatcccggagggcagcactacctatgtgcgcagttctgatgatgcttatctggctattgagtacaaaaacactggaggcgtgctgcaacctacaggaagaaccatgatttctggaaagacagccgtaagacgtacagatgaatactctgacggagtgacttacgcctggggaaaggttatgtccagcggggaaatacttccgggtactcttcagggaatggacggattgccagcgcctgaaaacgtcgcagcatacgctgccaaaggtgtggcggtctatcagcttaatcccgcagatattccggcaggacatgcgattatcaaagacggcattgttttgctggaagccgaccagtcagggcgccttaattacctgccaccgctcaatcgtcgcgcgcggcagtcggtgaatcaacgccctgaaatggtcctcacgccgctacccgcatcagtacgcgcggcagtcgaaccactcgccgagcgtgcctgtaaatacatgctttcaacgtgggtgccgacatgggttcccctggctggcggaaccgggcttccagtcactggctcgacgatggacagcatagagcaatacccgctgatgctggccgcagtagttcactggataagctggtgtgatgccggttacgctgcctgggatgaaacgtttattggcgtcagttatgacactgccgtttcctggattgtgcaggggctggatttagtggtgagtgcgcatctggcaaacggtggttggtggggaggcccgccgccgccgtggagcgaagcctctgaagatgtggctgtgactttcggctcacaggcggcagagctggcgcgtaatgtggccagccactgcgacctgatgggcgcacacctgacggcagcccagaaaacaaaagtcaccgtaatggtggtacatgaggctaaccgctttgtgaagtacacgcccaaataccgctggacgcgcccggatatccgggggcaggtgacggataactacccgacaggcgattccaaatcagaagaaatcgcgtggaacctggctatcctcgcccgtgcactgattttagccccggataatgccaacgctgagcgctgggccgagcggctgattacgatgcagattgcggcgctgggtgacagaaacgacctgtccgagacgatgacgattaacgggctggctccctgcgatgtgatgaacgggacaaacgttaacccgacccgcctcgttgaaaaccacggggttgctgatgggcaggacgtctcgcgctggtacacgatggcttcactgtcaggcagtgaatggatgttgcgtacctttctgctggctggaaagccggtaccctcggctgctctatggcatatggccgacaccctgcgggcgctggcctacaacccggatggttcggtgtggagcatggactggagggagcctgtcggcgagctgtcctatgcaccggcgattgcctacatgtttgctgacccgcgtcaggactatatcgatacgctgttgcaccgcctggcgatttttgcgggtcagcaggacgacaccaccggagcgttacctgccggggcttttaactggccggtttatggctcatcccagccgggtgaattcctgagctatatccgtctgtctgaccgtatgcagaacccgctgacctgtcctcgtgccaccaatgcacattacaccagccttgccgctatttaccggagcgtttaa

SEQ ID NO: 198811 - DNA, 1812 bp, Klebsiella oxytoca
atgatggcgaaaaatgatgaagtccggcagaacatcattccgctaagtaagcagtacatgacgcttgatgcggcccaggccgatatcgtcaatatcccggagggcagcactacctatgtgcgcagttctgatgatgcttatctggctattgagtacaaaaacactggaggcgtgctgcaacctacaggaagaaccatgatttctggaaagacagccgtaagacgtacagatgaatactctgacggagtgacttacgcctggggaaaggttatgtccagcggggaaatacttccgggtactcttcagggaatggacggattgccagcgcctgaaaacgtcgcagcatacgctgccaaaggtgtggcggtctatcagcttaatcccgcagatattccggcaggacatgcgattatcaaagacggcattgttttgctggaagccgaccagtcagggcgccttaattacctgccaccgctcaatcgtcgcgcgcggcagtcggtgaatcaacgccctgaaatggtcctcacgccgctacccgcatcagtacgcgcggcagtcgaaccactcgccgagcgtgcctgtaaatacatgctttcaacgtgggtgccgacatgggttcccctggctggcggaaccgggcttccagccactggctcgacgatggacagcatagagcaatacccgctgatgctggccgcagtagttcactggataagctggtgtgatgccggttacgcggcctgggatgaaacgtttattggcgtcagttatgacactgccgtttcctggattgttcaggggctggatttagtggtaagtgcgcatctggcaaacggtggttggtggggaggcccgccgccgccgtggagcgaagcctctgaagatgtggcggtaactttcggctcacaggcggcagagctggcgcgtaatgtggccagccactgcgacctgatggacgcacacctgacggcagcccagaaaataaaagtcaccgcaatggtggtgcatgaggctaaccgctttgtgaagtacacgcccaaataccgctggacgcgcccggatatccgggggcaggtgacggataactacccgacaggcgattccaaatcagaagaaatcgcctggaatctggctatcctcgcccgtgcactgattttagccccggataatgccaatgctgagcgctgggccgagcggctgattacgatgcagattgcagcgctgggcgacagaaacgacctgtccgagacgatgacgattaacgggctggctccctgcgatgtgatgaacgggacaaacgttaacccgacccgcctcgttgaaaaccacggggttgctgacggccaggacgtgtcccgctggtacacgatggcgtcattgtcaggtagcgagtggatgttgcgtacctttctgctggctggaaagccggtaccctcggctgcgctgtggcatatggccgacaccctgcgcgcgctggcctacaacccggatggttcggtgtggagtatggactggagggagcctgtcggcgaactgtcctatgcaccggcgattgcctacatgtttgccgagccgcgtcaggactatatcgatacgctgttgcaccgcctggcgatttttgccgggcagcaggacgacactaccggggcgctgcccgccggggcgtttaactggccagtctatggttcttcccagcccggcgaattcctgagttacatccgtatgtctgaccgcatgcaaaacccgctgacctgtccgcgtgccaccaatgcacattacaccagccttgccgctatttaccggagcgtttaa

SEQ ID NO: 198812 - DNA, 411 bp, Klebsiella oxytoca
atgagcgcgaatagccttgatattcagcctgtcgctgctaatcatcggtttgagtgcatcgtaggcagtatcgcccttgggaatgaacagcttggtgtcgcccaggtcgcggatgcgtggcgcgaatcggaatcccagaaagtgcatcaggccgaacacatgctcggtgaagcccgccgtgtcggtgtagtgttcctcgatacgcaagtcagactcgtggtacagcaggccatcgagcacataggtcgagtcgcgcaagccgacgttgaccaccttggcgctgaatggcgcgtattggtcggagatatgggtatagaacgtccgcccagggctacttccatacttcggattgatatgcccggtgctctctgccttgctgccggttcggaagttctggccgtccgacgatga

SEQ ID NO: 198813 - DNA, 432 bp, Klebsiella oxytoca
atggtgcaaaaaatcaaaatcggcaggccgcgccagcgtttgcgcctcggtgacgctggcggcgaaggtgtcccatggcatgaccgcttcgatggcggcgaacggatcgccgccgctttgtttggcttcaatcagcacctgaccgatgcgcccatacatccgcaccttgtcgttgatcgccttgccggaagcctggaactgctgttgatgcttgttcttggccgcattgaacagcttgccgatgatgcggtcgtgaaggtcgatgatttcatcagtgacggtggacatgccctcgatggccagtgctaccaaggtggcgtaacgccgctgcgactcgaacttggccaggtcggcgggcgtcatctggccgccctcgcgggcgatcttgagcaagcggttttggtgtacctgccgttcgatgccagcaggtag

SEQ ID NO: 198814 - DNA, 456 bp, Klebsiella oxytoca
atgctaagtaaattcgaacaaaattatgaaattccgactggagctttcggaagctatgtgcgaaaaattgaacccgacctggtttttgagaatgatggcggcctgtacgtttttgatgtgaagtataaaacctttgatccgcagtttggggttaaacgtgaagatatttttcaactacatacttacatagggcagtatgggaatggaggccttataaaaggatgcggctttatttatccaatatctgaaaatagatggaatgcacttaatatggataaaacgcagggggtgatttctgatgtaattcatcagcagggaaaagatattccttttcatttgcttttcttgaaaatccctaataactctgcccctgaatttaacaagagaatgagcgaagaatgtcatatgttcattgagaacataaacacgaaggtattaaaaaatgagaatagataa

SEQ ID NO: 198815 - DNA, 615 bp, Klebsiella oxytoca
atgcgtcaccgtaacatccccgccatgcttgttcaccacgtcacgccactcgcgggccatcgccagacgtacgcgccagctgtcctgcgcgggcatggctaccggtttatccggtatgttatcgccgtagataatcagaatcgggattttggtcagtgccataaactgctccatcggcacaggctcacccttcagcgtgtcaaacgcgcttggcataggggccgggagttctttttcagggaagacaaagctgctgccaggctcgaaggcgataatggctttgaccttgttgtttatcatcgccgtgtaccagcctggtccgccgccctgagagtgggtgaagaggattgccgggccggatttatccacgacggcggacatcgcatcagagataacattgatatcaaacggcccggtatttggggtcatctgacggaaatactgattcagtgcttcttggtcgtgagagaactgaacgcccttaaaatattctggccacacgccaacgcggaactgattgaaccacatctgttcatccggtttaggcgtaacagtaccttctacagtcgtacgtccggcactgccccgacgcggctgatcgacaagataagttga

SEQ ID NO: 198816 - DNA, 615 bp, Klebsiella oxytoca
atgcgtcaccgtcacatccccgccatgcttgttcaccacatcacgccattcgcgagccatcgccagacgtacgcgccagctgtcctgcgcgggcatggcgacaggtttatccggtatgttatcgccgtaaataatcagaatcggcattttggtcagagccataaactgctccatcggcaccggctcacccttcagcgtgtcgaacgcgcttggcataggggctgggagttctttttccgggaagacaaagctgctgccgggctcgaaggcggcaatggctttgaccttgtcatttttcatcgccgtgtaccagcctggcccgccaccctgagagtgggtgaagaggatagcggggccggatttatccactacggcggacatcgcatcagagatgacattgatatcaaacggcccggtattcggggtcatctgacggaaatactgattcagtgcttctttgtcgtgagagaactgaacacctttaaaatactctggccacacgccaacgcggaactggttgaaccacatctgttcatccggttttggcgtaacagtaccttctacagtcgtgcgtccggcgctgccccgacgcggctgatcgacaagataagttga

SEQ ID NO: 198817 - DNA, 438 bp, Klebsiella oxytoca
atgcgtaaaattttagccattactggtcttgccgtgttgttatcaggctgtggtgaaaaaggcgattttgagaaagcgatcaacgcgaaaatttcacaatcaaagctgtgctactcactgcagaacaatgactttgcattcaataaaggttttcctataaaggttaatcatggctaccgttctgcaggatacaatgttagtgaagaaattctgaaaggtcttgcgaatcagggattgcttgatgtttcacaacagaaggaatggactgagccgggcaacggtaatcagcaggttgttcatgttagttatacatggaagttggcggatgttccttcatgggtggataaaaaagcattcgcaaacgtcaagggtatgaatgaacctgaagatggcgcaatcaatttagttaaaacaagcaatggctggaaagcgctctaa

SEQ ID NO: 198818 - DNA, 342 bp, Klebsiella oxytoca
atgaacaaagaaccgcgcatatatggcagcaaatgggaccgtgagcgtcttctattccttcgtgcgcaccccttatgcgtcatgtgccacgagcaaggcagggtgacagccgccacggtggttgaccacatcatcccgcataaactgaaagaggctctgcgttctggtgacagcaaggcaatagcgaaagcgcaaaagcttttctggagccggaagaactggcaagggctgtgtaagcagcaccatgactcaacgaagcagcgaatggagaagcgcggcaccgttatcggctgtgatgaaaacggtattccgcttgatccaaactctcactggttcagatga

SEQ ID NO: 198819 - DNA, 570 bp, Klebsiella oxytoca
atgaaaatcggctatgcacgtaaatctacgcatcttcaggatgtggcgcaccaggttgacgaactaacaaaagctggatgtgagcaaatctatcaggatcagacctcacgtagcggcccaaagcgcgacaaaaaaggtgcgctggaactggagaactgcctgaaagcattgcgcgagggagataccctagtagtttgggcactagatcggctcggtggttcattgggtcaagtcattactttactcgacgacctgaagaaacgcggaataactttcatagccatcaaggacagaatagacacaaatgcgccagttataggggaaatctatactcatctgatggcgatattctctagctttgaacgcaaccgcaatattgaaagaacgcgctcaggccttgcagctgcacgcgcaaggggccgtgtgggagggagaaaaccgtcactttctgaagaagatgttaaacaaattagaatcttacttgctgatcctgaaatgacagttggtgcagttgctaagcgcttcaacgtttctcgcatgactatttatcgctacaccacaaaatcatga

SEQ ID NO: 198820 - DNA, 168 bp, Klebsiella oxytoca
atgctgtccatcgtcgagccggtggccggcagcccggttccgcccgccatcggtacccacgtcggcacccaggtagccagcatatatttacaggcgcgcagggcgagcggttcaactgccgcgcgcacggcggctggtaacggtgtgaggaccatatccgggcgctga

SEQ ID NO: 198821 - DNA, 456 bp, Klebsiella oxytoca
atgctctcggcacggggatcggtcgacgagcgcgttaaagggcttcgccttggcgcagatgattatctccctaagcccttttcccttattgagctggtggcgcgtattcaggccctggtgcgccgccgcgctacggatggcgcggacatcacccagctgcaaattcacgatctgcatctcgacctgctggctcgccgcgtatttcgcgccggaacgagactggagctgaccgcaaaagagttttccctgttgagccttctggcccggcatcagggagagattctgtcaaaaatgatgattgcggagcagatatgggacatgaatttcgacagcgatgccaacgtggttgaagtggccattaaacgacttcgggccaaagtggatgcgccgttcgatatcaagctgttacataccgttcgtggcatggggtatgtcctcgaagtccggtccgaataa

SEQ ID NO: 198822 - DNA, 351 bp, Klebsiella oxytoca
gtgtcccggctggcccttgatgccggggtgagcgtgcatatcgtgcgcgactacctgctgcgcggattgctgcgtccggtggcgtgcaccccgggcggctatggcctgttcgatgatgccgccttgcaacggctgtgcttcgtgcgggcggccttcgaggcgggcatcggcctggacgcgctggcgcggctgtgccgggcgctggatgctgcggacggcgatgaagcggccgcgcagcttgccgttctgcgccagttcgtcgagcgtcggcgcgaagcgttggccgatctggaggtgcagttggccaccatgccgaccgagccggcacagcacgcggagagtctgccatga

SEQ ID NO: 198823 - DNA, 477 bp, Klebsiella oxytoca
atgccaccgggaacgacccgcgatagcggacgatgttcaaccgtaaccagcgctggcggatacattcagttgtcttcattttcatgcttttaccagcccttcttttttccatatggccagcgttctgagcacaccttctgcatgcatcaggcgcagttcgtcataggtgtaatcggttgttttcttccgtccgtcgatcaagtcgtggcaacagttgcaggcgatagccgcctgagtatcgtcaggtttgcacccggtgccacaggtgcctgccagtcggtaatgcgccagaacactggtttccggattgccattgcagtacccggggatccgtaccgtacattcgcggcctcgggccgctttgcgaaggttcgccatactcactcccacatcctgttgcgccagcgggagtctggccgcggaggatttttgtcctccaccagctgcgcactgacggtccaggtgattaaatcctga

SEQ ID NO: 198824 - DNA, 813 bp, Klebsiella oxytoca
atggctgagcaagataaccccggtagggtaatttggcatgttgcctgtgatgaatctggtattgatggacagcgtttttatggcttcggtagcctatggatgaaatatcaacgccgtggtgattttgcaaagctaatccgcgacatccgtgaaaaacatggctatttccaggaaattaagtggcaaaaggccaattccaaaaaatacctttcatttcatatagatttgattgagcttttttttaaacatccatggctcgcgtttcactgtattgtcgttgagaaatctatagtgaataaaagctttcataatggcgactatgatttggctatgcgaaaacatttcaccaaattaatgacaactaagatctctagcatcctgcgagctcaccctgaacgggattgcagtttccgggttgaagttgatccaattgcctctcggtacaagaaagcagatgaagcattccatgtaatagccaacaatatgcttttcattcagcacggagtaaaaaacctaataacttccgtagtgaccaaagactcaaaatcatctgaaaacattcaaatctcagactttttcctcggcgccattatgagtgcgtatcaaggaaagatatcttctgaagccaaagtagctttagctgaaaagattgctgaaaatcttgggtgggacgctctgacttatgatacatggcccaaggaaagaaagtttaatgtctggcttttctatgacaaaacccgaggatttcgagacatcgaaactaaacctgtcaaattgaaaaccccgttaccggaaaggagtggcagtagatga

SEQ ID NO: 198825 - DNA, 963 bp, Klebsiella oxytoca
atggtacagcaggcatggtcatttaaaactatacgacaggatgaattaaggtattggggaaatgatggttaccatgatgactcctccacattttatcgctatgacagttttgtagctaatcataaaaatgtcaaagctggagatatcgtaataatcacaagcagagataaagtattgggtatttccattgttaaagcagtttctgagaagaatataaataaaaaacgtaacaagtgtattcatttagattgtaatgcaaagaaaatacttcatcggaagacaataaaacccgagtggcgatgtgacaatggccatgaatttattgagcctcgggttatatatgaacctgctatagagtttgtggcaaattatggtgaaagctataaggaaatagaaaatgtttctatggatgagcttatgcatcaaaccccacgctataatgggcaaatgtcaattcaagaggttaatcttgcttgggcaatgggaatacttaattatcagtctaatatggtaataagtattgagagtagagctgctgatgaagacacaccaattttgtctgctgaagatcagagaaaaatagttgagagacaaattaaacagcgccgaggacagcagaggtttcgaaaccaacttttagatttaaatcctgtctgtgctgttactgagtgcagcttggttgatatacttgaagcagctcatattgaagcttatcgaaatgatagtcataatcatattagtaatggattattattgcgtagtgatattcatacattatttgatttaaacttatgcgctataaatcctgacactaaatgtattcacttctcgcaaggccctttggaacatggttatcaacagtttgaggggggctccataaacgtaacacataaaatatcgctagaggcattgaagaaaagatggggggagttcagtaagttatttaatcatgcagaatgctga

SEQ ID NO: 198826 - DNA, 1431 bp, Klebsiella oxytoca
atgtcagaatttgaattaatcgcgcaaggtcttcttcaacaatcagaagaagatgagaaaaagcggcaagagaaagataaggaactgattactaaggttctggaaatttacgatcaaaaaaccgttgcagaattgttaagaaaagtcggcaaaagtgaatggagtagagaaacactgaaccgctgggtaaacggtaaatgcagtcccaaatcactaacatctgtagaagagcttttactcaaaaagatgcttccagaaccccctaaacatcaccctaactatgcttttcgttttatcgatttgtttgctggcatcggtggtatacgtaagggctttgaagctataggcgggcaatgtgtctttaccagtgaatggaacaaagaagcagttaaaacctacaaagctaactggtataacgatgaacatgagcatcgatttaaccttgatattcgcgagataaccctcagtgataagagcgatgtttctgaagttgaagcctatcagcatatcgacaacaacattccagaccacgatgtgcttctagcaggtttcccctgtcagcctttcagccttgctggtgttagtaagaaaaactcccttgggcgcgcccacggttttgaatgtgaggctcaaggaacacttttcttcgatgttgcgaggattatcaagtccaaaaggccagccatttttgttctcgaaaatgtcaaaaacctgaaaagtcatgataaaggtaagacttttaaggttatcatggaaactcttgatgagctgggatacgaagttgctgattcgatggcatcgggttcagacgatccgaagattatcgacggtaagcattttctgccacagcaccgagagcgtattgttttggtcggatttagaagagatcttaacatccacgaaggattttcattacgggacattaatcgcttttatccccagaaaaggcctacatttggtgagttattagagcctgtcgtagacagcaagtacattctgacaccaaggttatgggagtacctttataactatgccaaaaagcatgcagctaaaggaaatggctttggttttggtctagttgaccccaaaaatcctgatagtgttgctcgcacgctttcagcgcgttaccacaaggatgggtcagagatattaattgatcgcggttgggataaagctgttggggagactgattttgctaatcaggataatttagagcgacgtccaagacgattaactccacgagaatgcgctcgtttaatgggattcgaaaaacccggtgaaaaacctttcagaattccagtatcagatacacagtcctacagacagtttggaaactctgttgttgttccggtcttcgaagccgttgctcgtcttacagagccatacattctcaaagctgtagtagcacgtaaaaataagatagccagttaa

SEQ ID NO: 198827 - DNA, 1200 bp, Klebsiella oxytoca
atgtctggtttgcaggaatggctacttgataaggctggcaggaatttttacctttatataaaacgtctttcggcaaacgataccggagctacgggagggcatcaggttggtttatatattccttctgttattgttgccgagctttttccgtctatagatcatatcttggaaaaaaatccttcagtactgctacacgcaacatattcttcacatgcatgcgcagatagtgaggctcgtgcgatatattataacaataaatattttggtcaaactaggaatgaaaaacgtataacccgatggggtcgtggaagtcctcttcaagatccagagaatacaggcgccttgactatcctcgcatttgagcatgagccaggaaatgacagtagaagtgttgatgtttgggtttgctcgaatcctgacgaagaagatgttcttgaatcagtccttggcgaggttataccaggtacatttgtttttggtcctgcaaatgaaatgcttggaatattgttatcagttagccatacaaggcgcagagaatataaaatccctgaaagttgggtaagtcaatttcctactggtagtgagattattcagtacgcagcagactattataaaattggaacttctaacccagatgaacaacttttagagcgacggagtgttgaattcgatcttttcctaaaagttgaggaaatacacgttctcgatattatccgtaagggtttcgggtccgttgatgagtttattgcgatggcaaattcagttagtaacagaagaaaatcccgtgccggaaagtcgcttgaacttcatctggagcagctttttcttgagcatggtcttaaaagttttgaaacacaatgtataaccgaagggaaaaagaaacctgattttatattcccctcttcagaagcttatcataacgataagtttcccgatgagaaactgcgaatgctcgcagttaaaacaacatgtaaagatagatggcgtcaggttctaaacgaggcgaatagaattacctgtattcatctattcactcttcaagaaggtgtatctcttactcagtttaaagagatgcaagaggagggtattaggttggttgtgccctcgcctttacattctaaatatcccgaatcaattagaggtgagttaataactttaggaggcttcattgctgagttaatcgggatttaccaaggctaa

SEQ ID NO: 198828 - DNA, 333 bp, Klebsiella oxytoca
atggcatttatacgtaatccgcaaacaattatttcagtgaaaaatattgaatcagtaaatgaaaaggagtttaatgagctggtgacagaattatcagtgcagggatttacacatagctcggaggtttctgaatatattgtcaaaaataaccttggtgctaaatataaaaatatatctggtgttcttcagatgaagaaacgtggtgatgaatggtcatttgagggaggttttcctcctgatatttatgctcggttatgccaaaaactaaagcttaaaaataaaggatcacaagctcgcccgggagaatttactccctataaaaacgtcaagtag

SEQ ID NO: 198829 - DNA, 780 bp, Klebsiella oxytoca
atgaatttggaaaccaaaaaaaattgtgcttattgtaaaagcacaacaaacttaactaaagaacatatattcccttcagcgataattaaaagttttgatattgaacttttagcgatgactgataaaagtgactaccattttaaaggcgatccagttattggggatgtatgtgccgagtgtaataatggaatactgtctcaactagatgcatatttcgtaacttgttttaaaaaccagatgctcacgcctttaaaaccaggagatgaaataacatttgaatatgattatgatttattattacgtgaacttctaaagatatcatataattcagcaagagcatcaaatggcggttatgatgccagaaccactttagaaaaacacataccattcataattactggtaataaaaaagtagatggtgtaatcctttctcttctaatagtaacttctgcaaacaggattgatgtggaaactggtaaacctgaagagcctttagaaccatatctattaagaagcacatcaattggtggtttaaaccttaaccctaataattatattgttaggatggttgcattcaatagtttttggttctttctgttaattccgaagaagtcagttacatccaaaatgaaaaaagaattctgggatgaatttaaaagtaaaacccatctgcatggagttttattaaaaaaaggcaatacatcaataaagatcacaaaagataaaacaacatatttgcatcctcacttaacagaaatgatgtggcgtaaaataaagtag

SEQ ID NO: 198830 - DNA, 1227 bp, Klebsiella oxytoca
atgtacaatgaagaaacaaaagattttgcgaagaagcaagagcaaaaactgattgaggcgctgggacacagccgtgagcatactgatgccagcactgaagtccgaagcagagatgattaccagcgagactatgcacgaattctttactcatcctcattccgacggcttcaggggaaaatgcaactttttgaagttgatcctgaaaaatttaaccgaaaccgcttaacccacagccttgaggtcgctcagatagcacgcagtattgcatcggatcttgaactgcaatatcccgtggttgttgagctggcagccctagcccatgatattgggaaccccccattcgggcactcaggcgaaaaaatgcttaacagtttatccgctaaaatcggcggatatgaaggaaacgcccaggcgcttcgtatcttgagaaaactcgagaaaaaatatgccggctgtgcaggcttagatctcacctaccgcagcttactgtctgtcatcaaatatccaaatacgaaatccacttcaaataaattcatttatgatgatgactatgccttctatcagcggttgctggaagataagcaactagatatgaaggcaggtgaaaaaaccattgatgcgcagatcatggatctggccgatgaaattgcatatgcagcgcatgacctggaagatgcattgagcagaaacatggtgactatcgaagatattgaatatgaatttcttaagtcaccagactacaacgttgctttagaacacttcagtgagattgtcagcacgtctaagaaaactgcatctgaggcaaaattactgaagtcgtcagaggaatttgccataatttttcgtaaagagctgacgtccaacatcgttaaccgtctggtcatggatattggcgttgttgaaagtgacaattgttacgaagagctggggtacaaaacgttacagaaacttgctgaaggccttaaaaaactgctcttcaaagtcattatgcgtaaaaggaacatactgacttacgagtttaaaggaaataagatcatcagtgatttatatgagttttataatgccggtgacaactataagtttctgtcacctgagcttaagtcttcgttatctggtacagatccgtctcagctcgaaactaaaaaagcgcgggctgtggttgattacatttcaggcatgatggacacattcgccatcaaggaatgggaaactcattgtaagaaataa

SEQ ID NO: 198831 - DNA, 594 bp, Klebsiella oxytoca
atgataaaccttctcccaatagggaaaataatctcaataatcgccgttatctatgcgactgcctgctgtctgattttatggggcgtatatgatgaaaacacaactttcgtgacagctctatctgttgcatctggaggttcgtttcttcttaacactattttgatatcaatttttttctttggatggcgaaaattatggcaatggttccctaagctaaatgatctactcttccctgatttgaacggaacctgggatatggttattcattgggaatgggaggataaaaaaggtacatcctacgcacaagcaactataaggcaggattttcttagaattggaatggatgtcgaagctgacgactccgattctcagacgttagtggctaagcctaaaaaggataccgaaacggggcgaccagcactctactacgtttttttaacaacccccaagcataaggcaggttttgttgcacaagattcttacagaggcacagctattctcaagctaaaccttaatggtaaagaagtgctaaatgggaactacttcacaagccgtaaaacagtaggtcattacgagctgacacgcattgactaa

SEQ ID NO: 198832 - DNA, 213 bp, Klebsiella oxytoca
atgaccactaaaccttccctgctcgaagatcggttcgtcaatatggctttcattaccagcctcaccgggttaactgataaatggttctacaaactcatcaaagacggtgctttcccggctcccaccaagtttggtcgcagctcccgctggcgacagagtgaagtagaagcctggctgcaggcccgtatcgatgcatcacgctcacagcgctaa

SEQ ID NO: 198833 - DNA, 534 bp, Klebsiella oxytoca
atgatccattcaattttactcaaccattatcagacctggctggatgattttacccgcatcagtctgtcccacggtttatgccagcagcacataacgcaatggcaccgactggcgataaccaccagcccaacattggacggaagcgtaatagaaattgtcattccacagcgcctgctaccgatcacccgtaccgttcgactggaatcctgtactgtcgaccccggcctaactaaaaacacagactatacccttctacccggcgtgctgctcagcgagtgttaccggctggggaagagccggttggcagatcagttacaaatgttactccggcttcatgtacagcccggtatgcgacagacgctgaccctactgtgctggtgtgagcttgcaacaggaaaggatatgagggaatggtatgcgctgcatctgccgctacctgaaatgctgaggcaatggcttacgataaaacaacgggcataccggggtctgaagacgctgacagaggattacattcgcgccacccggccactataa

SEQ ID NO: 198834 - DNA, 423 bp, Klebsiella oxytoca
atgcgcatgctgaaatgttaccttggcaataatcgtgacgggcacgttgtcactgctaaagacgctatgcagtcaccgggtaggatatggacctgcacttcctgcggctgtcagttgatacttcatgcgggttcatctggtgaggctccctggtttgaacatgaccagcgaacagtgacgacaaacgttctgatgcaatgtacccatctcgaccctgaagttaaagccgaagcccgatgccaaaaattacgcagtatcatcggcggactggatgcacctgtaacggtgccatcctggtactgcgtatggtgtggcagccattatcaggggcggaagcactgcggccgctgccactcggggatttacagtattgaagagaccagctggcagagaaattactgctgtaacacactccccggataa

SEQ ID NO: 198835 - DNA, 3618 bp, Klebsiella oxytoca
atgaataccaataacatcaaaaaatatgctccacaggcccgtaaccagttccgcgatgcggtgatccagaagctgaccacattggggattgccaccgataaaaaaggcaatctacacattgccgacgccgaaatcgtcggcgaaaccgtgcgctatggccagttcgaccaccccaaatccaccctcacccgccgcgatcgtctggtaaaacacgcccgcgagcaaggctttgacgtactggttgaacactgcgcctacacctggtttaaccgcctgtgtgccattcgttatatggaaatccacggctaccttgaccacggcttccatatgctctcgcacccggataacccgaccggctttgaagtgctggaccatgtaccggaagtggcggaagcactgctgccggagaaaaaggcacagttggtcggaatgaagctgtccggtaaccaggacgaagccatctaccgtgaattgctgctggcccagtgtcacgccctgcaccgcgcgatgccgttcctgtttgaagtggttgatgatgaagccgaacttctgctaccggataacctgacccgtactgactctattctgcgcggtctggtggacggtattccggaagaagactggcaagacgttgaggttatcggctggttatatcagttttatatctctgagaaaaaagataccgttatcggcaaggtagtaaagagcgaggatattcctgccgctacccagctgtttaccccaaactggattgtacagtatctggtgcagaactccgtcggtcgccagtggttgcagacctacccggactcgccgctgaaaggcaaaatggactattacattgagccagccgaacagacgccggaagtgcaggcgcagctggcagccattacgcctgccagcattgaaccggaaaatatcaaggtgctcgacccggcctgcggctccgggcacattttgattgaagcctataatgtgctgaaaaatatctacgaagagcgcggctaccgtgctcgcgatattccacagataattctggaaaataatatttttggtctcgatattgacgaccgtgctgcccaactttctggctttgccttattaatgatggcacgccaagatgaccgccggatattcacccgtgatgtgcgtctgaatattgtctccctgcaggaaagcctgcatctggatattgccaggctgtggcaacagctgaatttccaccagcagatccagaccggcagtatgggagatatgtttgccgaaaataccgtattggcccataccgacagcgcggaatataagctcttaatgcgcacgttgaagctgtttgtgaacgccaaaacgctgggctcgctaattcaggtgccgcaggaagaagaagcggagttgaaggcgtttctcgatacgttgtaccgtctggagctggaaggcgattttcagcagaaggctgcggcgaaagcgtttattccgtatattcagcaggcgtggatactggcgcagcgatatgatgcggtagtggcgaacccgccgtacatgggggggaattatatggaggcagaacttaagaattatgtgtctactaaatatcctcaaggtaaagctgacctatattcttcatttatgattagattaatacaccaaactaaaaaaaatggtgctttaagtctaatgactccattcacttggatgaatttatcttcatttgaagaagctagaaaagaaattctaacaacatgttgcttgcattctttggtacaaccagaatatcattcgttctttgaatcagcttatgtccctatatgtgcctttaccatttttaaattccaatccagctggaatgcaacattctttgatctttctgaattttatggagaaagaaatcaagcacctaattttcattatgcaatacataataatgattgtaactggaaatataaaagatctacccatgactttctgagcacaccaggttacattattgcgtactctctaccaaattcagcattacactgtttcaaaacatcgccaaaactaaacagtgtgagcaatctaaagcaaggacttataactggagataatgatagttttttgagatattggcatgaaataagcttaaatttatttagctataatatcaataatattaagcccaaatggtttccatatcaaaaaggcgggacttatcgaaagtggtatggtaataatgagtatgttgttgactgggaaaatgaaggatataaaataagaaatttctataatgacaaagggaaattacgttccagacctcaaaatatacaattttattgtaaggaagggcttacatggacaagcttaacaatatcatccttatcaatgagatatgttccaaatggatatatttttgatgctaaaggaccgatgtgtttcccaattaacgcagcggatatttgggatatccttggttatacaaacagtaaaataataaatatttttctcaaacatttagctccaactatggattactctcaaggacccgtgggcaatgttccattcaaatcacctactagaaatataacaaacattataaaagagctcgtaactattcacaagaatgactgggataccaatgagatctcttttgaattccaaaccaatattttggttaagttagctaacgactataaaaaaattagtgatggatatacatttagagaaaatgaaaacaaaaaaataatttatcgtgttaaagaacttgaagaatataataactctagtttcattgatctttttgaattaaatgatattttatctccagaagtaaacctaagtgatattacattagatcgagcggcgcaagaaaatgacattataaaaatgatttcttattcaatcggctgcatgatgggtcgctactccctcgatcgtgaaggcctggtctacgctcacgaaggcaacaaaggctttgccgaactggtcgctgaaggtgcttataaaactttccccgccgataatgacggcatcctgccgctgatggatgaggagtggtttgacgacgacgtcacctctcgggtcaaagagtttgtccgcaccgtctggggcgaagaacacttgcaggaaaaccttgaatttatcgccgaaagtctctgtttatacgcgatcagccccaaaaaaggcgaacctgcgttggataccattcgtcgctatctttccactcagttctggaaagagcatatgaagatgtataaaaaacgcccgatctactggctgttcagctctggtaaaacaaaagcgtttgagtgcctagtctatctgcatcgctacaacgacgcgacgctggcgagaatgcgtactgaatacgtggtgccgctgctggcccgctaccaggctaatatcgaccgcctgaacgaactggtcgatggtgcctctggcggagaagccacgcgtctgaaacgtgagcgtgatagtctgagtaagaaattcaacgaactgcgcagcttcgacgatcgcctgcgccactatgctgatatgagaatcagtattgatctcgacgaaggcgttaaggttaactacggtaggtttggcgatctgctggcggatgtgaaagtcattaccggcaatgcgcctgaggtgatttaa

SEQ ID NO: 198836 - DNA, 342 bp, Klebsiella oxytoca
atgaatactttacctgcaataaaccagcgggctgttcagttatgcccatcgcccgtaactatctggcaaacgttgctaactcgtttactggaacaacattacgggctgacgttaaatgacacgccgttcagcgatgaagctgtcattcaaggacatattgaagctggcatcacacttgtcgatgctgttaattttctggtggaaaagtacgaactggtacgtatcgatcgcagagggtttaactgtcaggagcagtccccttatcttcaggcggtagatattttacgggcgcggcaggcaaccggtctgctgcaatatcgccgtaacaccctgccgctctga

SEQ ID NO: 198837 - DNA, 252 bp, Klebsiella oxytoca
atgagaaatcatcaggttccctcattgccgcaagggacgttcacccgcgctcaggctgaagctatagccgccgcatacatcaatattgctatcgaagatgaccagggcacccattttcgtctggttatccgcgataccgacgacatgcttatctggcgcgactggaattttgccccggaggctggcgtgatgctcaacagctatattgccagcaacggcatcccaatgccccctgcagttgacgacaattaa

SEQ ID NO: 198838 - DNA, 177 bp, Klebsiella oxytoca
atgatgaaaaagactggagagtgcaaaaatagaaaatgtaaaaaacctatttccgagtatggagaggccaatgaaaatcgttattgtgaagaacactatcagttatctgtagaaaaaaacaaaaaaaatcttcaaaaaagaataagtaaaattgctgacagcaaccatatccattaa

SEQ ID NO: 198839 - DNA, 492 bp, Klebsiella oxytoca
atggatagcataagggccaatttaaaacacgaacacagaaatatctttagcacatttccgcctttttttaataatccaatagaaaagtctttaccttttttccatttagcacaatctcaatatgttagagtttttaaaaaagacgctgaaaatgtgtttatttcactagaaaaagaactatctacctttggtgtttatttagaggcatatggattgttaggtttacacgaattaatgtcgggaagagcgattggtaatgatctgataaataaaaccaggcaatggattgaaaatgaaaaaaaggataaaagtgacctttacaataccatggtaaatatacagactgaatttgaagttgtatttaaaataaaaataagcgacaagcatatattttcaaaaatgtacaactcatatttcagtgaggatatcgcgcaagtttcatccataactggagaaatagaggctataagaaaaaataataatacaaattaa

SEQ ID NO: 198840 - DNA, 240 bp, Klebsiella oxytoca
atggcaactatatataaatcagcagcagacaacaaaacgagcatcacggcattgctggacgaccagctggtggacatggcgttcatcacaaactttacaggcatgacggataagtggttctaccggttgatttccgaaaatgcgtttccggcccccattaagctgggccgtagctcgcgttggcgtaaaagtcaggttgaggcgtggctgctggaacgaatgaaactctctgaggattaa

SEQ ID NO: 198841 - DNA, 585 bp, Klebsiella oxytoca
atgcatacttcagacaaatatactcccggctattcttcaggctggttcctgacatcacttctaaggaatcataccagtgaaatgataaacaggtacgcctgcctgcgggctttacgtgttgatttattttataagcgtaattccttccgttttcggcattccgatcatcgacagctggaacatgaagtacggatcctgatgcaggaaatgatgaaacaaaaaggaattgtcgggtatttctgggtaattgaatggacaacagaccatggctggcatgcgcatgtagcattctggttagatgaccacatcacacagaccacctggccagccgctgaaaaagcctctgtcatctggaaatcgataaccgaacaggaaggcggcttttaccgctgtgaatacaaagaaaactaccaggccgatatcaatatcccggtttgctatcacgatccatccagcattgagaatatccatcaggtccttggctatctggctaaagaagaacagaaagacggattttacctctatggttgcaatgatgttcctccacgctcagcggcagggcgtccacgtaagccaggcccctga

SEQ ID NO: 198842 - DNA, 303 bp, Klebsiella oxytoca
atgaaacagccagagaacacgatcgcggtaaaagtggcggaataccgtttatacatcacccggctaagggtctgccaggatagcttgtctggatgttgcagtgatgccgagcggcgtggctggcgcttgagggcccttgggcagttaagtaaagcctcactgctctactgccaacgggcaagttctgacgatacctgcaagtttcaacaggcctgtgaaggtctccagcaacacatcagcagagttttaccagaaggccagtggtgcgctgatttggctgcattacctgctacccacgaataa

SEQ ID NO: 198843 - DNA, 2547 bp, Klebsiella oxytoca
atgtcgtcagacaaacaacaaaagaccagcactatgccacatcacgacatcagtacaagcgtatgcgtacacggagcaagaacacataacctcagggacatttcgtttacattcccccgcgacgcaatggtagtgtttaccgggatatcgggctcgggtaaatcctcactggcctttgataccctctatgcggaagcccagcggcgttttatggaatctattgcccctcatgcacggcgtctgattgagcaggcgtccacaccggatgttgatggtatcgatggcctgccgcctgccgttgccctgcaacagagtcgtgccggggctcaggagcgctcaaccgtcggtagcctgacccgtatttccgtcaccttaaggctgctgttttcgcgatcaggtattcgccccgaaggggttccgttcctgcccgccgagtcgttttcaccgaataatccccagggggcttgccccgtctgccaggggatgggaatggttcatgaagtgaaagccgatgcgcttgttccggacggtacgctgagcatccgtgaaggtgctatcgcctcctggccgaatggctggcaggcgaagaaccttcgttctattctcgatacgcttggctacgacattgatgctccctggaatacgctgtctgaacaggacaaagagtggatcctgtttaccgatgaacagccttctgtacctatctttatgggcctaaatgcagagcagcgtcaggaagcgatagcagccggaaccgaacctgcttataccggtacttataccagtgcccggaaatacgtactgcaaagctattccggtgggaaagaatctgtaaaaaaacgtctttcacgttttattaccgtggcaccatgcaccgcatgccatggtaaagggctcaaccagaatgcattgtctgtgacttttgccgggcatgatatcgctcaaatcggtgagctgacgataacgcaattgaaatctttatttttaccctttgccaacgggcactctcagtctctgcctggcgaagctgcgttaaaggaagccactatcagaatgacgaccgacatttgcggacgtctcgaacaactcgaaaaactgggtcttggtcatttgtctctcggtcgccggaccacaatgttgtcatcaggggaactccagcgtatccggcttgcaacccagctcatctctcgcctttttggcgtcttgtatgtgcttgacgagcctgcggccggattgcacccggaagacgtgcgggcgctgattcagtctttacgttcccttctggaggcgggtaactctctcgtcattgttgagcataacctggacgttatcgccgaagcagactggctgacggaagtcgggccagggccggggcgactgggtggcgaaattgtctataacggcataccgtccgggcttgcacaggtttcccgatcgcctacggctggttatctgttcggccagcactatcagggcctgcgccaacgcagacttccggagcgctggctgaagcttgagcaggttacgtgtaataatatccattctgttaatgtccaaatcccccttgagcggatgaccgtgatcaccggtgtatctggttcgggtaaatcaacgcttctggcccgggtactcccgacgttgctacagcggctcgataaaacccccgaagatgaggatacggaagaagaaaccgtatctttggacgttcatgggaaaatcacggctggaggaacctctctcaaacgacttgtccgtatcgatcagaggcctatagggcgcacaccgcgttcgaacctggcgacctatactggattttttgacactgtccgcaagctctttgctgaaaccgatgaagctaggaaacgtggctttgacaccagtcgcttttccttcaacctcccgcccgggcgatgtcctgcctgcgaaggacaggggcagataaccattgaactgatgttcatgcctcaggcaagtgcgctatgttcggcctgtggcggacgtcgctacaatgaggaaacacttgaagttcgctggaataacagaaccatagccgatgttctggcccttaccgtagacgaagccatcaccgtatttaggaacaatgaagtcatacagcgttctctggcagcgcttgcttcgcttggtcttggctacctgacgttaggccagccagccacggaactgtccggaggtgaatgccagcgcatcaagcttgcctgggagcttcagcgggtgcagcggggtaagacactctatctcctcgacgagccgtccacggggctgcatcctgcggatatggataagctgatgcaggtgctagacaagttggttcagcgaggggatacagttgtgatggcagagcatgacatgcggatagcctcggaagccgactggatcctcgatctcggtcccggctcgggtgagaacggcggagaaatcgttgcggctggtaccccggtggaggtcagtcatgtaggtaacagcgttactgcgccttacttgttcgcaagattaaaaaaacggattgactcaccacggacaaactaa

SEQ ID NO: 198844 - DNA, 921 bp, Klebsiella oxytoca
atgcgttttcagtggtatatcatgaaggagaagaagatgaaccttgttgacggtatggaggcattcgtaaagattgcagaccttggaagctttgccgcagcggcacgtgagcttaatatctcgccctcagccgtaagcaagctggttggtaaaacggaggaagagctgggaacacggcttctcaaccgaaacacccgtggattaagcctgacgcaggaaggggagatgttccttgaacgctgccggatgatcctcaatgaactaaaatctgcaaaagaaaagctttcatctatatcgagtgaaccaaggggaaagttacgtgtaagcatgcctaatatgccttcgttctttgtgcccctaatcagtcgatttatcgagctttatccagctgtaatgctggaagtggatctcagcgacaggctggttgatgtcgtggatgaaggctttgatgccgtaatccgtgtcggacatctctccgattcccgcttaacggcccgctcgctcggtaactgccccatgaatctggtggcatcaccggagtatctgaagagatacggtacaccgtcctgcgcggatgacctcggctcacacagttgcatccagtaccggtacccttccagcggcagaacagagccctggccgttactgaataccggggctggggacatcaatatcatccccgctgttgtatgcaacaataccgatgttcgcctggggctggccctgaacggaaaaggaattgtttttatgcccgggttattgacagaaaaatatcttgcgtcgggagaactggagattgtactgggtgatatagttgggcgaagttacgatatgaatatcgtctggccgacgaatagatatacaaccccaagacttaaatcttttgttagttttatggttaaatattttaacctgtcgtga

SEQ ID NO: 198845 - DNA, 327 bp, Klebsiella oxytoca
atgatttcctatctcattctgtttattgccgggtgcttcgaggttgcgggtatctccaccctgaatggctatgccaatgctgaaaccgttcgcagtaagatcacgtttcttctggccaccattgtactctttgccattgcgctcagctcgttgagtatctccatgcgcgagctccccctttccgtggcctatgccatctttactggggtgggtaccatcggtgccgtcgcggtaggcgtatttattaacggagataaaatccgtctactcaagggggcaagtatctttctcattattatcagtgcgatcatgctgaagctggtttaa

SEQ ID NO: 198846 - DNA, 327 bp, Klebsiella oxytoca
atgaacaccaaaggtcttatccttattattatcggcgctatgttcgaatgtgcctgggcattcggccttaaacacgcgaagggctcatttgaaatatttctgactgtggtctgcgtagtagcaagtttcgtcatattcatgttttcgttcaaatatgttggtgcgagtattgcgtatgtggtttataccggtctcggtaccctgtttgtggtgctggtcgaaatggctgacaccctgtctcacggaggtcagccagaaattctccgtatcgtatttgttgttaccctgatgctgggtgtcattggagtcaaaggagctaaatcatga

SEQ ID NO: 198847 - DNA, 831 bp, Klebsiella oxytoca
atggacgaaaaaaaactcaaagcccttgcggctgaactggctaaaggccttaaaaccgaagccgatctcaatgctttttcccgcatgttgacgaagattaccgtcgaaacggcgctcaatgcggagctgactgaccacctcgggcatgagaaaaatgcgcctaaaacaggctcaaacacccgcaatggctactcgtcaaaaacggtgttatgcgatgacggcgagattgaactgaacacgctgcgtgaccgtgaaaacaccttcgaaccgcagttgattaagaagcaccagacgcgtattacgcagatggacagccagattttatccctctacgccaaaggcatgactacccgcgaaatcgtcgccaccttcaaagagatgtacgacgccgatgcgtcacccacgctgatatctaaagtcaccgacgccgtaaaagagcaggtcactgagtggcaaaaacggcagctggatgcgttgtatcccattgtttatatggactgtattgttgtcaaagttcgtcagaatggcagtgtgataaacaaagctgtgttccttgcgctggggatcaataccgaaggccggaaagagttgctgggcatgtggctggccgaaaatgaaggtgcgaagttctgtttgagcgtgctgacagagctgaaaaatcgaggccttcaggacatactgattgcctgtgtggacggtctgaagggcttcccggatgcgataaacagcgtcttcccgcagacccatatccagctgtgcattattcatatggtgcgtaacagcctgaaatacgtagctggaaagactacaaagccgtcaccagcggcctga

SEQ ID NO: 198848 - DNA, 1257 bp, Klebsiella oxytoca
atgaagacattttcggcaagccttagcaggtatggcagcgttctattatttccgttggcgatgattatttatgatttttcagcctacctgacaatagatcttattcagccaggcatcattagcattatcaacgagctacgggcagatgtaactctggcgccagcatccgtcagtatatatatggtcgggggtctggcgctgcaatggctgttgggccccctgtccgaccgtattggtcgtcgccccgtgctgttaaccggcgcgctggtttttgctcttgcctgcctgagcatgctgtttgtcacctcgctcgaacagtacttagtcgctcgctttatccagggcacaagcatctgctttatctcgaccgtaggttacgtctcaattcaggaaacgtttggcgaaatggattccatccggatcatggctgcgctcacctcgattgtgctgctcgcgccggttatcgggccggtggccggcgcggcgctgatggcgttcattcactggaaatggctgtttgccatcctcggggcgttcggactggtagcatggtccttactgctattcaaaatgccggaaaccattatctctcagggacggggatttaagccgggtgaagtattatgcgatttcatcgcggcatttcgccatccggtggtgctgaccggttcactggctgtcgcttttggcaacctgccaatcatcacctgggtcgcgctctcgcccgtgatcctgattgagcacggtggtatgtctcctggcacctatgcctggacacaggtgcctgtgttcagcgggatcatcattgccagcacgatcgtcgcaaattttattaaagatccgacttcaccgcgttttatctggggtaccgtgccaatacagcttgctggcctgctaaccttgctggccggcaacctcctttggccacacgtctggttatggtcagtgctgggtacaagcctttatgccctgggtattggactactctaccccgtgctgtttcgtttcatacttttttctcataacctgccaaaaggcacggtatctgccacgttgaatattatgactctgagcgcattagctatttcaattgaggcgactcgctggatctacttccatgctgtcagcaggatagcttttcacggtacggcgctactggccggtatagccgttatcatactggttgcccgattgcttaaactgcgcaggcaacatcagggccagtcagtatcaccggctggctgtcagtggcaatga

SEQ ID NO: 198849 - DNA, 207 bp, Klebsiella oxytoca
atgaggccatttctggcgtacttcaacatgcattcgtcagtgtcatcagcctttcccagtaaatgggttggcattcaatttccaaagtacatcacactttttctactgaaacatatccttcctaaaactacgtgttactattcgctccgtaaatacctttcaactcaacccgaggctttgatgctggagaatgtaatcatccgataa

SEQ ID NO: 198850 - DNA, 1467 bp, Klebsiella oxytoca
atggatatcagcacccttatttccgcatcccggcgcatccacctgtcggcggaggagagcaaaatcccctgggacgaaccggccttcagccagcgcatgctggcgaaccatttgtcgcaggatcacgactgggccagccgcaggcagaaggtcattgagcagcaggtcgagtggatcgccagccagttatcccctggcgcacatatcctcgatctcggctgcggccccggtttttatacccaccgcttagcggagcgtggatttcactgcaccggcgtggatttctcaccggcatccgtgagctgggcccgtcagcgggcgcagaacaccggattgaatatcgattatgttcagcaggatgtccgcgcatactggccagataaatctttcaatttcatcatgatgacattcggggaactgaatgtgtttagcacggcggatgcacgctcactcgtcagccgctgcgcgctgtggctggaaccgggtggcaggctgctcgctgaagtccatactttcgacgaagttaagcttcagggaatggctgaagcaagctggcaacgctgtccggacgggctgtttctcggcgtccctcatctgctgctgacggaacatggccgggatgaagaagcacaaaccagctcaacgcagttctgggccatcgaagcaaacggtcaaaccacccgtttcggcagccagatgacggcctggcgcgatgatgagtacgtcagcctgctcgacaatgccggatttaccctgcttcctcctcctgaaagccacgactggccagtcagcaagacatttgaagggaagctgtttgttttgctggccgtaaaagcaaaaacatcagaggaacgtcctcttaatactcaacgcaataaaaggaattccacattggatatcccacgtatttttacaattagtgaaagtgagcaccgtattcataacccgttcaccgaagagaagtacgccacgctgggtcgtgtgctgcgcatgaagccgggcacccgcattcttgatctcggcagtggctcaggcgagatgctctgtacctgggtgcgcgatcacggcattcgcggcatcggcgtcgacatgagcgcgctgttcagccagcaggctaagctgcgggcagaagagctcggcgttgccgaccgcgtgatgtttattcaccaggacgccgccggttatgtggccgaggaaaaatgcgacatcgccgcctgcgtgggcgcgacctggatcggcggcggcgtcgccgggactatcgcgctgctgagcaaaagcctcaagcccggcggtatgctgctgatcggcgaaccgtactggcgccaggtaccggcaacggaagagatagcacaggcctgtggcgcctcttcgctcgccgactttctgacgcttgccgatctggtctcctcttacgatgcgcttggctatgacctcgtcgaaatggtgctggcggaccaggaaggttga

SEQ ID NO: 198851 - DNA, 540 bp, Klebsiella oxytoca
atgtttatatattcagctgatcagtatttttctcttgccatgaatgaactattgagcgaatttaaaaaccggacaaaaaaagagctcatacttattgattctgggaaaaaatatttatatatctttgaaatcaagacccttatcggaacattacatcaggattccttttctgcgctcatcaatagccagtacatcgcctttccgagaagcgtaacgattgctcaactgcgtagttatatcgcaactggggtagtatcattgaataagcggaagaagaaaatggatatgactcgcatggaggaatcggttttgcgtgcgctctgtgccggattgagtatgaatgagattgcagagcactatggagtgagttccaaaaaagtcagctcattaaagagaggcgccttgactaaaatgggcattgataatatttcgttatttttttctctcttgcgatgctgggattttttctggccatttatttcatgcttttatccatcactagcaaaaaatactgaaaaaatattccttcatgcatcttag

SEQ ID NO: 198852 - DNA, 435 bp, Klebsiella oxytoca
atgaagatatttggttaccttcttggaaatgaaaacgatggtgttctctttttcaaagaaaaggatcttttattaccacttaacggtcgatatagtccattaagattgagaagcacaatgtcacgattgcttctgtacttgcttgaaaaagcccacattggtctggtgcgagatgaatatataatgaaaaacgtctgggaaatacatgggctgaaagcctcaggccctcggttatggcaagtcgttaacgatcttaaaaacagacttaatagagtaggccttgaccacaatttcattaggcgggtggaggggcggggctatcttattaacactaagtattttgaatcaatctacataaaagcagcctgggtagtatttgacaggtccatgatagaaagccccaatatcaataccttcaaacttgttgaggagtag

SEQ ID NO: 198853 - DNA, 561 bp, Klebsiella oxytoca
atgaaatattgtgttatttatgcccatcccaatccatcgagtttcagtcatgcaatcaaacaacgtgtcgtggaaattatagaaagtcatgaggatacgtatgagttaatcgatctctatcaagataacttcaatcctgtattaaattcagaagattttatctcattgcagaatggcaaggtattaccggatgttgaacaatatcagcagcaggttgccaatgcggatcatttgatttttatttatccgatctggtggtatggccagccagctatactgaaaggctggatagaccgtgttttctcttggggtttcgcctatcgtgatgatgaaaatggatttacgccgctactaacagataaaaaggctacgttgctgctaccgctgggatctagtaagaagattctggagcagtacgacatgctgcgatttatcgacaatatgattatagggactcttaatctggttgggataagtagtgtaaattaccaaccattttatggtttaccgagtttaactgacgaacaacgacgagagctgcttgagcagatcattatttaa

SEQ ID NO: 198854 - DNA, 435 bp, Klebsiella oxytoca
atgaatatcagaactattgcagcgttgataaaaacagttagttactcatcaattaatgaattcaccgccagtgataatactttttctatccggatttctcaggtaccccaaaaacgacagtcaactgttgaaaggacaaaccatccactagagaaaaaagagatttgtgaatttgatgatatcaatccgattagtgtggatgaatttaaatccccgatggttggtatttattattcttcactaaatgaaaacacagagccgtatattgtcattggcaatttagttaatcctggtgaacgacttggagtaatccggtcaatgaatattaataccgtcatatatgctagcaaaaaaatgactatttcagatattttagttaaaaacggccagcccgtagaatatgatcaagcgctatatttagttaattatggttaa

SEQ ID NO: 198855 - DNA, 576 bp, Klebsiella oxytoca
atgactttggggaaaaaaaaaacaggaaaagacgaaattttaactacagcaaagttcattctttctgaaaagggggcgcggcatttcagtatgcgtgaggtcgcaagagcctgcggaaagtcgcttagtaatatccagtattattatccatctttagaggaactgctatcagcattatttgagcatgtcatagatgacgcaattcagaaactaaatgaagtcattgttaatgacgttgatgaattaaagtggttggttgatcttattgtcaagaattttagtgatgctacactatgtaagttgatctgggaaacttggattaatagtaccaattatgacgaatcattttgtgcgctggataatttttacatcaaatatattgagcaggttaaatttattattttacgaaaaattccggatatgcaggacaatgttgcgaagcaaaaagcagttatgtgtgtagctttatttgagggagtagcagcactacattctgtaggaaaaaatacctttattaattttgatattaatgatgcattgtacagtgctgcatttgggataattaatacacaatag

SEQ ID NO: 198856 - DNA, 1212 bp, Klebsiella oxytoca
atgtcttcaaaaaaaataccacttaatatgaatgtgctggaagctgcaagagagagaattgaatgggcatttaaaacatttccttcggtttgtctctctttttctggtggaaaagattcaacagttcttttccacataactgcgaatattgcaagaaagctcaataaaaaatttagtgttttgtttatcgattgggaggtacaatttcaacacactataaatcacgttatgaacatgcaacggctttatagggattcaataagtcatttctattggattgccttacctctgacaactgtaagtggtgtatctcaataccagccggaatggatttcctgggaaaaaggtatcaaatggatcaggaacccccccaagttttcaattacagaatatgattacttccctttttatcattatgctatgacttttgaggagttcgttccagcattctctgcatggctttctgctgatacagggatgataacgttaactggtatgcgagctgatgagtcgcttaaaagatttacatcaatcatttctgtaactaaaaaacgctactcatctgataaaccatggactactgtcgccaggacaggtaattactgtactgcatctccattatatgactggaaagcacaggatatatggatttttcatgcacgctattctttaccttataatccactttatgatcttatgtatagggcaggggtgtctgtaagacagatgcgggtttgtgagccatttggtccagaacaacgacaaggtttatggctttatcatgtccttgaacctactacgtggtggttggtttgctcccgtgtatctggtgctaattccggggctctttatggcaatcaaagcggtgctttttattctaaaaacatcacattatccaaaccagagaacatgacatggtgtgattatgcttattttctattagattcaatgcctgaacgaaccgctgaacattatagaactaaaattgctatttaccttaaatggtattcagaccgaggtgagaatgttccggatgagcaagaccatgatttaggttctaaggatattccttcgtggcgaaaaatctgcaaaacaattattaagaatgattactggtgtcggacgctgtcatttagccctaataaaccttctaactatacacgctacatgaaaagaatgaaagagagaagatataaatggaatctaatctaa

SEQ ID NO: 198857 - DNA, 657 bp, Klebsiella oxytoca
atggaatctaatctaatgaaaaaagaaattattgatatgctcagtcatcaccttaatactattaccaatgtagaggaaaaggtagaattactcaatgagattaaaatattattgcatcatcacagcccatttaatgatgagcctgttgattgtgttatttgggttaagcatgataatatcattgcaaacaattataaccccaataccatggctcctgctgaaaaaaggttgttacgtcattcaatcaaaaaagacggcttcactcagccactagtcacgcttaaatgtaaacctgaatatatactcattgatggatatcatcgatatatcgtaagtaagaaacatatgaaaagtcgcttacatggatacttaccagtagttatggtcaataaaaatattcaggacagcgcgaaacagatggctatgactatccgacataatcgtgctagaggtaagcacgcgattgcagaaatgtctgtaattgtacgtgacttggctagattaggttggaatgatactagaatttctgaagagctcggtatggatgctgatgaagtattacgccttaagcagttaagtgggctagcagagcttttctctaacgaaaatttcagcgaagcgtggactgtcagtgatgaagggaatagctttatttaa

SEQ ID NO: 198858 - DNA, 723 bp, Klebsiella oxytoca
atgtatacttttgaacagcatattgctgtatccgattttatccgtcaaaagagaactggttttgcgaatagtcatccagaaatcggcgtctgtcttgtggagtttgataaatcttgttatagagatactcttttcactaagttttcgcttccgtttccggatgtgttgaaatctgctggtgacaagcgtcgagctgagtatcttgctgggcgttatgccgccacacagttgttacaagaagttggatctattggtactgtgactattggtgcagatcgagcacctatttggcccatcggtttgaaaggaagtatttctcacaccgagacatgggccattgcgattatgacatcacagttttctaatataaatttgggtgttgatattgaaatgtttcgtccgggaattatgatgagaattgcttcggattttactacagcgaatgaacgtaacgtattggccgcaagccatctaccattcgagactgcgttgctcattaccttttctgccaaagagagtttgtacaaagcactatacccaatcgtacaatatatgtttggtttcgaagttgctgagatgcgtgaaattaatcaacataatcagagtgttactctagaactgactaggcagctgacaccaagtttgccggtgggatattgcattacaggtaattatttaattggtgatgatggtgtaatcactatgatcatcgtttcagcataa

SEQ ID NO: 198859 - DNA, 870 bp, Klebsiella oxytoca
atgagctctgccggagcaatggagcgcacgcgaaaggagctagcggactttctacgtagcagacgtgagcgcttacaccctgttgatgttggtcttccgtctggtggacgccgccgtacaccaggtttgcgacgtgaggaagttgctgcattggccggggtcggattgacctggtatacatggctggagcaaggacgagatatcagcgtatcggcgacatttcttgacaacctgtcacgtgtccttaaattggacgcatctgagcgtaggtatctttatctgttaagccaacagcgtcctcctgcagaaccaggaaagacatggtgtgtcgtaccacaagtggtacaccgtctaatgggtgatctgacactacgcccagcctacgtgatcaatcttcgatgggatgtgctggcatggaacaaggccgcggaccgagtattcaacttttcaaagcaccccccggaacgccggaacctgctctggatgcttttcgctgatcctacgactcgagcgttgtttagcccctgggaggatcaagccctccatctgctatctgagttccgacgggattttgtccgagcgacgcaagagcctgacatctgtgccttgatcaaggacctggaaaaagtctctccagatttcaaagcttggtggcaggaacagacaatccatgatctaaatatgtcttggcagcgtttatcccttacggattacgggcatgtcgcgttcgaatacacgaagcttacgattgacgaggatcgccatcttcgactgctttactacgcggcactggatcaaagcgataaagatcagagcttcatcaattggctgacccagtgcaggacaaaccttgacgtgaagggcgggtga

SEQ ID NO: 198860 - DNA, 1236 bp, Klebsiella oxytoca
atgtaccaaactttattgaatgagcagttaagtactttgaaagcatccgggcagtataggacctttgttacgctaaacagaatttgtggccaatatccgctagcccaacttgaaggtgacaatgaaaggtctgtcattgtctggtgtagcaacgactatctcggaatgtcacagcatcctgtcgtccgtcaggcaatgcacgacgctatcgatcgatacggggctggttcaggtggttctcgcaatataggtggtactcatggcatctttagccagttggagcgcagccttgccgattggcactccaaggaggcagctctcgtctttccgacaggtttcagctctaatgacgcaacgctgcaatgtctgctgaaacaaattccagattgcgtggtgatcagtgacgagaaaaaccatgcatccatcatcaacggtatccgtgcgacttccacagaacggcaagttttccgacacaacgatgtagagcatctggaggaattgctggcgcagtatccgctcgaacgtcccaaaattgtagtgtttgagtctgtgtactcgatggacggtgacatctcaccgattgtaaagatcgttgatatcgccaagcagtacaacgccttaacctatctggatgaagtacacgccgtcggaatgtatggcccccgcggcgccggtttggcggcccaattgggggtagctgatagggtagacattattcagggaacgatggcgaaggctattggcgtaataggcggctatatcgcagggacatcgtggctaattgatgccgttcgctcattctcaacagggtttatctttacaacctccttgccaccagttgtggcagctggttgcctggcaagtgttgaacatttaaaaactcaatcgcaggaacgtgagttactatacacgaaaacccagcaattgagggaggcactcgacttatgggatattcctgtcatgtcgtgttcctcgacgcatgtacttccagtgcttgttggggatgctatcaaatgcaaagaagccgcagaaaggcttctctccgttcatagtatttatctccagcctatcaactacccgtctgttgctgcaggaactgagcgtttccgagttaatgtcacacctaatcataccgataaccaaattaggcaccttgctgaggcattacgtgaagtttttgaatatttcgacatccctctaaaaatgtcttctgcttctgctcgggagacgtcctga

SEQ ID NO: 198861 - DNA, 501 bp, Klebsiella oxytoca
atgccaattaaacaattgaagattcgcagtgctgtacaatccgatatcgacatattgatatcactacgtgcgtaccttctggatgggactgagggtgtggggtattcaagccgtaatgccgatgaaagtcatcgctggaaagctgcctacaggctctggttgtcgcaggttcttgaaactgatgatcgtacgcagattatcgtcgctgagaacgatggtgaggttgtggggtgcgccacaggtattatcgatcgccgagctcctgcaccagattgcatgagtggttggtgcggctacgtgcagtctatggtggttttaccattgtggcggcgcatgggtatcgccgaaaggttgatgcatgagttgttgcaatggttctttatgatgaaggtaacgaaagtggtgctagaaagcacccaggttgctgaggcgttgtatcagaagcttggattttcgccccattcagaacgtttattcagtctttctggaggtcggccatga

SEQ ID NO: 198862 - DNA, 1068 bp, Klebsiella oxytoca
atgaatgtactgatcattgggtttggctatgcaggacgacgatatcagcgtgctttctctcatttggccagcaagaatggggtggatttgacgctagcttatgttggccgaaagtcacgtacagatgttaagccgtactatacccagatcgggacggccttgactgagttccgaccagacattgttgttgtcagcgtcaacgatcacagccatgtggcagtacttcgggaactggctagtttcgaaggtttcattatatgtgaaaaaccgcttgcggtgcctagcgatgactggtctggcgtctgcgctgggctttctcacattaaagggttcgctctggatcttgttgaacgctattcggaagctactgagcggctgaaagaaattgtatctcagcgtcaatggtcgttggtcagatccagcttctattggggcaaggatcgtttgaacgactatagaccaacatgtggtgtgaccagtgaaatcattcacgcacttgatctcgtaaaatggatatgtacctctcaagaacctttacaactgcagcaggcgataggaatcggttcggacttctccatttccggggattctataccagatacggttctccttaccgccacattgggtaatgccccggtcgccgggtatagcagttttgtcaatatacagcgtcaacgaacagtcgattttacatttgcagatcctgacggtcggatttttcatgctcgtatcgtttatgacactccgaactgggatcacgattatctacgcatttggagtcgagatgtcagtggttatgaggtcgtggaggacgagtacagggctgtgccgcagcaatccggcctagaaacagtctataaactgtccttgctgtgcgacgacgctatgcgggtaactatgggtaattcaccgcggatgcccttggcagatttggaggtttcaaagcaactacagagtttacttgatgctatcagtctgcaaattactgcgttaccaacagctcgctatgttcgaggatctgaacgcatcctcatccctgaaaatgcagatctcgaaagcctaggatag

SEQ ID NO: 198863 - DNA, 1860 bp, Klebsiella oxytoca
atgtgtggaatgactggttggatttcgttcagccgtgacctcgctggtcagacagagagagaaacactgcagcgcatgactgatacattggcattgcgtggcccggatgacgaaggggtatggattgaaggccctgttggattgggacatcgacgcctgtcaattatcgatctggagggcgggcgccaacccatggtggccaatcatcaaggacagcgcgcggctgctatcattagttatactggcgaggtttacaacttccaggaactaaggcgtgatctggaagggcgtggtcatcgcttcgaaacgcgcagtgataccgaagttgtattgcgggcctatttggaatggggctcagcgttcacagaacgtctcaacggcatgtacgcctttgctatctggaatcgtctgtcgcaagagttgctgttggtccgcgaccggatgggcgtcaagccgctctactattaccaaaccgatgatggtgttatttttggttcagagcccaaagctcttttggctaatcctctggttcctcgcaaggtgaatgctgatgggctgagagaactcctggaaatggtaaaaactcccgggcatgcagtttttgccggtatgcgtgaagtccttccaggggaaatgctcagagtcaatcgcagcggtttgacccgccaccaatattggaaactggaagcccgcgagcatagcgatacgcttgagcaaaccatccagcacactcgtgatctgctagaagacatcattgaccgccaaattgtctcagatgtgccgctctgtagcctgctatccggcggactggattcttcaatcatcactgctctggcatccaaaaagctgctagcagcaggtaaggaaaatatccgctcattctccgtagattttatggaccacggaggcggtttcactggtgattcggtgcgaggtacacccgatgcaccatttgttcgcgatcttgtggagcgtattcattcctctcatggcgagattgtcattgatagcagagaaatggccgatccggaactgcacgtcaagatagtcagagcgttggatttgcctccagccttttggggagacatgtggccctcgttataccgcctgtttcagaaagtacgcaaacactctacggtggccttatcgggagagtctgccgatgaagtatttggcggataccgctggttccatgacccagatgcaattgcagcccagaccttcccttggttaacctcagttaccggcaaatatttcgacggcaaaacgctgttctcacaggatctactgagcggattggagatggataacttcctgcgagatagttatagccaggcagtgtccgaaacgccggttctttccagtgagaacgaaattaaccggcgcatgcggcaaatgagttatgtgaacctgacacgtttcgttcaaaccttgctcgatcgtaaggatcgcatgagcatggccgtcggtctggaagtacgagtgccattctgcgaccaccgactggttgaatatgcctttaatattccgtgggaaatgaaagcattcgatggtcgggaaaagagcatcctgcgtgctgctacacgggatttattgccagacagcatctccgagcgcatcaagagcccgtatccctccacgcaagatcctgcatacgaacaaggactacgcacttcgttggccaaaattatggctaatccggcttctccagtattgccattggtcgaccgtgatcgaattacccaaaccttagctaaacctcttggcaatttgtcgcctatgtatgaccgcatgggcatggaattggcaatcggcctgaatacctggctggcagaatataaggtatcgctttctttttaa

SEQ ID NO: 198864 - DNA, 1206 bp, Klebsiella oxytoca
atgtgttgctccaattttattcgttggaaatctatgatgtcgaacaacaaaaaaagctcaccagtctatctcatatctttaggtgcatttgccctggggatggcctcctacgttacagctggtctcctgcccatgatcgaaacggctttttctgtgtccgtagcgattgctgcgcagttggtcaccgcttttacgctggcctatgggctgggctcacctatctttgtcgcgttgttacctgtgcataagcaacgagccggcttactgttcgccctcgggctatttgttctagctaatgtagccagtgctctatctaccaatttcacgattctcatgattttccgcgctatcgctggtattggcgccggtgtttatcttgctatgggcattgctgcctctgcggcgctttcccatgttgaccagcgagggaagtcaatcgcagtcatcatgggcggcatggccagcggaacagtgctaggggttcctgtgagtctgctcctggcggaacaacttggctgggaatctgcgctatggctggtcgcgctgttggggggcatcgctttcgtagggctgtttgcacgccttcctgcattgccaacggcacaggcaattccactcaaagccaagatcgctttgctcacggatagccatgtggtggtcatccttttggtttccctgcttgctgcgatttctagcttgggaatgtataccttccttgctccgctgatagctgccgctgctcaacctggctcttctccgaccgttacaccgtatctttgggtatggggtgtcggcggggtagtgggcagcttcctgatcggtccattggtggatcgcttcaagggaccgatgctgacgttatggattatggccattctggcaattgcgctgtttttactgccagctacgttgtcaactggtccatggctagtgatgcttccgattgctatctggggggctgtaggctgggcgctgcaagttcctcagaacaatgagctaatcaaagctcgtgaacaacagggagatggaaatctcgctgtagccttgaatgaatcagccctctatctgggaagcgcgctaggcgctgcaatgggagggattttacttcttcagctatggccagcatggatgttggcgaccagtgcaggggctgttgctattattggcgcaatactccaactacttaatttacgcaggcaaccttga

SEQ ID NO: 198865 - DNA, 471 bp, Klebsiella oxytoca
atgtcgaccatgaaaatcttcatctctgagcaacaaaaagctaaacttgaacgtcttcacgataccagccgtgacaagcgggtctgtgattgtatcaaagcggttcttctggcttccgaaggctggagctccgccatgatcgctcaggccctgcgtctgcatcagacgacagttgaccaccatatcagcgagtttctcaataaagggaagttgaagcctgaaaatggcggctcggacagcaagctcagtgcggagcagagcgcgcttttaagcagtcagttatctgataatttgtaccaccatacccatgaaatcattgcgtttgttgcccggacctgggatattgttttcagtgtcccggggatgaacaaatggctgcatcgtaacggcttcacctacaaaaaagcctcaggtattcctcataaattcagtgaagaaaaacaggttcagttcattgtagtggtcaactaa

SEQ ID NO: 198866 - DNA, 174 bp, Klebsiella oxytoca
atgccatcaaaggaaatgaaacgtcatgtcatcctctacacgatccatatccctgaacgtaagttgcgtcccgtaaaatggcttgccctgatctcatccctactctttatgtcacaactggcaattgagaccgtaatcatgaccgatgttagcgccagtgatataagacggtaa

SEQ ID NO: 198867 - DNA, 1155 bp, Klebsiella oxytoca
atgtcaattgtgagtttaaaattgagaaactctaaaagagctttaaattcaatttcttgtattaaggccaataaagaaatcataaacaatagattgaataattgtcacggcattaaaatcaatgttattgagattcacttaacggacatttgtgatttaaactgtagctattgtagttacaaaagcggtgttgttaacaaaagggatactctcaaatattctacacttgatacaataatcgagttaaaacctcaagcgattgtactggcgggtggtggggagccagtactgtataaagataataattatactattcataacgtcatagataaattacacgcaaactctattgccgttgggcttattactaatggtggcaaagatgttgcaattgatattttaaataaattgagttggttgagggtttctttggatgctattggagacgttcctttctttgctttaaaaaaaggtaagttctcaaagagattagcattcctcaaaaaggcaataagatcagattgtcgccatatagggattggatttctttacaatgataataatttaagagacacactttctgcatgtgagtacattcacactcaactgaaagatgatagagttaatattcagttcaggccaacgtgtaaaattcagtcttgtgattgcccttcagagaactattcttcggataatacccttaccagtaatcgtgaaacatggtgggctgaggaaatagcaagtttaacagaaaaattagaaattattaaaaataaaaatgtcgatttatataattttattataagacagacgaattttttatcgatattgaaaccaaatttcaatgaaagaaaggcaccatttagttcttgttatatttcgctggctagatggattattcgtgcagatggtaacatctatccttgcgtcatgaaagcaacaaatttcgggatacccatcggaaatataaaccatgattcaccagtgaagattaaagaaggaatgaaagggtattttgatttagagcgaaaatattgtcaaggtccatcagaatgttgcaattttgtcagcgttactaatgaacttatagagtgtaatataaaaatatacgctgtaaatgaaaccacgcttaataatgatgaatattttttctaa

SEQ ID NO: 198868 - DNA, 1227 bp, Klebsiella oxytoca
atgctaaatttccccgtatggccgcagtttgatgataaaaatattaacgatattactgagattttaaggtctggaaaagttaattactggacaggtcataaaggggttcaatttgaggctgctttttcagaatggataggttctcaatattcagtttcatgttcatcgggaacttcagcagtccatattgcggtaagctctctaaatataggaccgggtgatgaggttatcgtgccgtcttatacctttatcgcaacctcatttgctgtgttacaggctggcgcgatccctgttttttgtgatgtaacagcagatcacacaattgatccgtcaaaaattgaggcgctaataacaaaacggaccaaagccattatcgttgtacatctctatggtgttgtctgcgatatggacccaatcatggcgattgcaaagaagtaccgcttacgcgtcattgaagattcggctcagtgccttggtggcagatacaaaggaaaaaaagttggcacgattggtgatgtgggtacatttagcttttgccagagtaagcatttcactacgggtggtgaaggtggaattgtcgtaacaaataatgaggaactttcttgggagtgtagagcttttagagatcatggatttgatgtgaagaagaaaatcgatttattaacgttggaagagcaaacgttccatgtccacaaccgcattggatttaactacaggatgaccgaaatccagtcagctattggcattaacgaactctcacgctttgacaattggaacctgccaaagagaaaagagtttgcgaaaatttatgatgaagcattcatcgatatgccggaaatacactctatcccatttaattcaccagatagagagaatgcttactggctttatccacttgtattaaatagagatcaattcccaatggatgcaactgtcttattgtcagaactcaaaaaagaaggaattccttcttttaaaattcagtggccagaagcttatggcgaaaaggtttatcgcgaattgaatggtttcggtagtgtggattttccctttaaatctaaagagtatacatcgcctgattcggttaattataaaaatgtggtatgtgaaactgcacgcagtcttctgccgataacattcagcctttacttgcatccgacatgggagagaaggcatattttaaaatgtattagtggtgttaaatctgttattaatagattatcataa

SEQ ID NO: 198869 - DNA, 894 bp, Klebsiella oxytoca
atggataaaatagatcttcacattcactcatcttacagtaacgatgcagacttcccggtatctgaaattttcaatcttgctgagaaaaatgacttatctctgatttcaataactgaccataactcatcaaggtcagcattggatggcgtaaattattgtgttaataaaaaaattgggttcataactggcattgaagtagattgctcttttaataatcgaaactttcatctgttaggctatggatataacaaagacacgcttgattttgattgtattgaaagtgactttataaaatcacaaatagaagcaacacccattaaaataaaacttttaaaagatttggggttttattttgatgaagatgagctatatataggtttgaaaggttcagtacctcaagaggaaagtatggctgagttaatcttgcttgatgagcggaatgctgggaatgctttgctgttgccttaccgagaagggggggagcgttcagatatgccgctagtgaattttttctgggatttctttggcattggtaaaccttgccatgtggaaattaagtaccctgaattagccatgattgctgatgtgattaaggataacggtggtattccagtgattgcacatattggggcaaatgtggaagcagaacatctaaaatttattaccgaaatgaaccgtgtaggcgttgacggcgtagaggtattttcaagttatcacaatatggagttgagtaaaactctatttgattattgtgttgagaactcattattcattacctgtggtagtgattttcatggggcgaataaaccgaacattactatcggtagctgtaaatataatagtgaagaactgatggctattcaaaaacttaccgatcgagtaaatatttactga

SEQ ID NO: 198870 - DNA, 228 bp, Klebsiella oxytoca
gtggaaaaattcataatctttatcaagggtaaggatatcgttcctatacgtcttgatgatgcagattttggtggtattgctcagagcttgataaaacaagattttttaatttctcccattcaggtcatggcaggaaatagcttgctggctaccaataaatacaagagagctttaacaatgtatatttctttacaattaaaggaattaacatctccgatactcatttaa

SEQ ID NO: 198871 - DNA, 1179 bp, Klebsiella oxytoca
atgtcgtatattactgcgataagccctatttctcgtcagcgtcgtaacacgttgtctcataagtggaattcccgcgaggagtctgacatacttcctttctctgtggctgatatggattttcgtgtatctgacgctatacaaaaatcactggcaggcatagttgagcaagggatttacggctattccttcgtcccggaagagtattacactgcgtttatacactggatggacagacatcacgatttacttgtatcacgtgactggcttctgtgctcatcaggggtgataccggcaatcatggccgtcataaattcagttgcttcacctggggatgaaattatcattcaggagccggtttatcaccgtttcagacaatgcattgaacacgccggctgcaaaacaattgtaaatacattgatcaacagggaaggccactatgaaatcgattttgcagacctggagcttaaagcagcgcgtcctcaatgtaaaattttgctgttctgtaatcctcataatccggtaggaagggtctgggataatgaagaattgatgcaactatgcagtatctgtaacaagcataatgtgctgattatttctgatgaaagccactgcgatcttatcctgggcaatggttctcacatccctttaaacagcagaagtatcaacccgttatgccgtacaactctctgctattcaccaggcaaaacattcaatgtatcgggactgagacaggcaatgatcgtgatcaatgacgacgtgctgagagaaaaaaccgcacaattccttgctaaaattcatgctgatgatatcaccgctatggctgtcgcggcacagattgccggctatgaacattctgaaaactggttaaatggagtcctgcattatatatatgaaaatattcggctgatgagacgatatctgagtagatatttctctgtatatattcttcctcctgaagggacgtaccttgtatgggctgatatcagtaacacccattattcaggttacagcctttcaaaaaagcttgaatctgttgccaggatacgagtcactgatggtgcggtttttggcccttccggacgtaattatatccggattaacatggcgtgccaccgggagatacttcggactgcattgcgtcgtctgggggagtgccagtggctgactgacaaaccgtag

SEQ ID NO: 198872 - DNA, 1200 bp, Klebsiella oxytoca
atgcataaaaattttaatttctttgtagctagttcagctttgtccctgctagggattgaaatttaccatattgcattacctttgcttgcgttaagccttggcctggatcctgtagagataagctggtgtgtttttgctttttacagtccggttatttttatcaaaattgtttcttcaactttcattgaaaaaaccgataaaatttgcacacttaaaattagtgaagcaggcaggatgctatgtacaattttatttattgtgtgtctgaagttggttcatgactacggcttacccgtgattttaatgatatctttcctgtacggtatttttacagtctttacagaggtggctgagcctgtagttattaaaaatcttattcggggacaaaaatcgactacctctctttctacttatgaaataaggacacgagctgtgcagctgctggcgcctgcgttgtgtggctatttaatcgctgtggatggtttccttccttattacctgttgctcatgctctcatttcttgcgcttttctttctttctttcatcaagataaaagagcctgcacagatcataaacatgaaatccggtataacaactgatatacatcatgcccttcggtggttatcctctcaccggctcttttctttaatgatcctcctgacggccatcaataattttctgcatccggttctttatctgaccgtaatctgggaactcagagaacagagcaatgcttttgaaatcactggtctggtactgtcaggtctgggggccggtgggcttattggcagtattctggcaaggaaaatcatcaaccagcttaacttcagaaaactggttctcgtcatcaatatcttgcgtgtcgtggtatttgccggttttatagtttcagctaatcctgtatggatgttcgtgcttttcgttttcaaggccatcctgggcggtgtctggaacgtgggttataatgtatttaccattcaggaaatgccggcagcacttgctgccagaatatcggcaatcagtggcacctttgtgaagctcagcgccggactggggagtcttgttgcggggtatatgctggttctcgccggttcaacgacaacgctgttcattcttgtttttctcaccctttttatgttgtctctgtcattcatctgcaaagatgaatatcagcgatatagtgtttctcgttctgattga

SEQ ID NO: 198873 - DNA, 966 bp, Klebsiella oxytoca
atgtctgtaaaaataaacagaacaccaactgacagagaatggaaactcttcactatttttggttccaaaaaaaattatttttcaacggaaacctatttcagagaaagcttttttgatggttatgaggttatcggtgataactttgccgacctgatggtcagaacagccgttgttgtactcaagccggaagtctttgcttcaggtaaggccagggcggttatcagtctgatagaaaaatacgacttcagattgaaagcattctccactgtgaagtatgaccgccttaaaatcagggaaacctggcgttaccagtacagtgaagcaactatcgacagaatgagtcttgttgatcacctttactgtctgggagatgccatgatcctcttttttgaagacacgtcatctgttatcagaatgcctgccagtgcaagattacataaattaaaaggtgcttcagaggctcgtcttcggacggcagataatttacgtagcatcattcgtattcctaacggtgttatccggttatttcatatacctgatgaacctgctgatattatcagagagatgggtattctttttgagcgagagcatcgtttatccctttacaaccagcttcgttctgattcacgggcagacaacaaactacttgatgaagctgttactgaactggaatcgcaacacccactacatgattttagtcttgataccgcgtggaacaacattattgcgagtagtaatgatgagaaattcatttctgaaattgaaaacctgaaagagcaagtagagaaacaggagatcgttggctgggacgatgtttattctttgctgaaaaagcataactgcagcatttatgatattctgacagtcgcttcttacgtactcaagcaggatgtggactatgaattccatcttattgatggcgatgctctcagaggctgggatccgacatttttcgcggaacactaa

SEQ ID NO: 198874 - DNA, 789 bp, Klebsiella oxytoca
atgaataaaccaataattggtattttatgttgtgcacgaatgattgacgaagattcagaccttcatcatgtcgtctttcgtagctatatagaatttatcaaggatacgctgggtgctgtaccaattttaattccagcattatccactggttttatggaaggagatattgaccaacttgtagatatcgttgatggtttctttcttcctggctcacccagtaacatctcgctcagaagagcaaaaggtaaaccagacatattttatataactggcacaccaggaactcatgacttacttcgtgattatacggcgatgaatatacttcattactcgttgactgcggacaaaccccttcttgccgtctgcagaggttttcaggagatgaatgtattttttggcggtgatttgcataaagatcttcacctgatacccgggagactggatcaccgggccggtcaatttgatactctccaggataaatatgcaccggcacatgaagtatctgtaaccagcgacgcgtttctgaataaaatttttgcagagcaggataactcaacatccggtctgatggtgaattcgcttcatactcaggggatttcagtcgtgggggaagacctggttgtggaatgtctcgcaccggacggaaccgtggaggctatcaggcataaaaattcatcgtttatctacggcgtacaatggcatcttgagtggatgcggtctcctcttgatagctatattgcacgcgcatttttgtctcaatgtagcaggagaatttataaaggagattag

SEQ ID NO: 198875 - DNA, 1026 bp, Klebsiella oxytoca
atggaatatatgtcatttaatttcactttaccagatagctctgttattgatttaaacgcttatcttatgccacttaagataaaaccagatgatatagttattgcatcaggtactctggtagaaggtataggaaatgaatactccgatatagatgtttatattattactgataaaatcagaaattcatctgatatcgatattactaatttttttagagctataagccccggaaaagaaatcatacaaaaaggtgaacataaggatatccttttggtacaccttcctgttgaaaaaacaggggtaaaagtcgatgtagaatttaaaacatacgatgatataaattccattgctgagcagttcaaagaaaattacagttatgctgtaaataatcatatcttacttacaaaagaaatgccggaacggcaaatgtcgtttatgcacaggatacataattgtatttgtcttcataataatgatgcgttaaaagagattaagagtaaattccctgtaagtatgctaaattattttctctatcgtcttaatgcatcggattttgcagattttctggatatcacaggtgcctggagaaaggacgaaacagaaaggtgtgttgatttggctcgtgaaaacctcattaaacagatgctggcttacacatgtcttatgggaaatacagattataaaagaaaatggttactcacccgaatgcaacaagttggtgtagacgagagacttagcaagcaatttcttacccttttcttaagaaataaacttatgacagataaaaattatatcattgaaacactacgtatggtcgatgaaatattttttgcgttagcgcagtttttcaataacactacagacccactgataccaaattctcaagttgtactttcatggttagaacaggaaagaaagaaatgcgtaaaagagtacgaatttgctgaggttgattatcgctgtaaagcctataaccttgaatctcagtggtctacggaaaaatatctggataaatcgctgatatga

SEQ ID NO: 198876 - DNA, 153 bp, Klebsiella oxytoca
atgaaaatattcattctaattatgatggtgtttttattcctattaataattacgacccattcacatctaacccattcatttcccggcgataactcatttaaagcaattgattttagtgatccttctgtcattgttacccatttcttaaactaa

SEQ ID NO: 198877 - DNA, 255 bp, Klebsiella oxytoca
atgtggaaattaagcggtcggcttatgtttttaactggcattattcacactataataggcgttattttaggatatagtgcgatcaatgaaatcggccatagaggatatttcaatgtaatagcccaggatataaatcttgaatatcatttttggtttcttttttgtgggttaattattatcatgcttggtcaattgctccatgttttatacagaaaacacaggagcccgcccctaaacttctgggttatagcataa

SEQ ID NO: 198878 - DNA, 150 bp, Klebsiella oxytoca
atgaacaaagtttgttaccgaccaattttcctcaatgctttgacaagtccgtttgcccacggtatcagagtaatgctctctgatttacagggagttttcgtgatacagcaagccattgagaacatggaggatataaaacagtataaataa

SEQ ID NO: 198879 - DNA, 927 bp, Klebsiella oxytoca
atgagcaacgaaccagtccagcttctcccgcccgacccgcacatgtgtaacggcgatgaaaaacagacccgtagcccactctcactctattctgaataccagcgtcttgatgttgaactccgtccaccgcacgctatgccagccagccactggcacggacaggtcgaggtgaacgtgccatttgatggtgacgttgaatacctgatcaacaatgaagtcgtgcagatcaagcaggggcatatcaccctcttctgggcctgtacgccgcaccagctcacccgcccgggtcattgtcagcagatggcgattttcagcctccctatgcatttgttcctctcctggccgctggaccgcgaactggtcaactacgtcacccatggcatggtgatcaagtcgctcgccactcagcaactgagcgcctttgaagtgacccgctggcagcaagagcttgccagcccgaatgaacagattcgtcagctggccatcgatgagatagccctgatgcttaagcgttttagcctctccggctggcagcctatcctgctgaataaaacctcacgtacgcacaaaaacagcgtctcgcgccacgcgcagttttacgtcagccagatgcttgggtttattgccgataactatgatcaggcattaaccatcaatgacgtcgcggaacatgtgaagctgaatgccaactacgcgatgggcattttccagcgcgtcatgcagctcaccttaaagcagtacattacggcgatgcgcatcaaccatgtccgcgcgctgttgagcgatacggataaaactatcattgacgttgccatgaccgcggggtttcgctcaagcagccgtttttacagcaccttcagcaaattggtcgggatgtcgccacagcaatatcgcaagctgagccagcagcgcagacagcttatctga

SEQ ID NO: 198880 - DNA, 1353 bp, Klebsiella oxytoca
atggcagcacccaaaattacgtttatcggcgccgggtcgacgatttttgtcaaaaatatcctcggtgatgtttttcatcgcgaagcattgaagtccgcgcatattgcgctgatggatatcgatgccacgcggctggaagaatcacacattgtggtgcgcaagttgatggattctgctggtgcttctggtcatattacctgtcataccgaccagcgcgcggcgttacagggcgcggattttgtggtcgtcgccttccagattggcggttatgaaccctgtacggtaaccgacttcgacgtgtgtaaacgccacgggttggaacaaacgatcgccgatacgcttgggcctggcggcattatgcgcgcgctgcggaccattccgcatctctggcgaatttgtgaggatatgagcgagctatgcccgaatgccaccatgcttaactacgttaacccgatggcgatgaacacctgggcaatgtatgctcgctatccgcacatcaaacaggtggggctgtgccattcggtacaaggaacggcggaagagctggctcgcgatctcggtattgatcccgcttcgctgcgttatcgctgcgccggtattaaccacatggcgttctatcttgaactggaacgcaaaaacgccgacggcgagtatgtcaatctctacccggaactgctggctgcctatgccgcaggcgaggccccgaagccaaatattcatggcaatacgcgctgccagaacattgtgcgctatgaaatgttcaaaaagctgggctacttcgtcaccgaatcgtccgagcattttgctgaatatacgccgtggtttattaagcccggacgcgaagatctgatcgaacgctacaaggtaccgctggacgaatatccgaaacgttgcgttgaacaactggcaaactggcataaggagctggaagagtacaagaccgctgaacgtattgatattaaaccgtcgagagagtacgccagcaccatcatgaacgcgctgtggaccggcgagccgagcgttatttatggcaacgtacgtaacgacggtctgattgataacctgccgcagggcagctgcgtggaggttgcttgcctggtcgatgcgaacggtattcagccaacaaaagtgggggcgattcccgcgcaccttgcagcgatgatgcagaccaatatcaacgtgcaaacgctgctgacggaggccattctgacggaaaatcgcgatcgtgtttatcacgcggcgatgatggatccgcataccgcagccgtactgagcatcgacgaaatctatgcgctggtggatgacctgattacctcccacggtgactggttgccagcctggctgcaccgctaa

SEQ ID NO: 198881 - DNA, 1431 bp, Klebsiella oxytoca
atgagtatctctctgacaacaaaactcagttacggattcggtgcgtttggtaaagatttcgccatcggcattgtttatatgtatctgatgtattactacaccgacgtcgtcgggctgtcggttggcctggtgggcacgctgttccttgtggcacgcatctgggatgcgataaacgaccccatcatgggatggatagtgaacgccacgcgaacgcgatggggcaaatttaaaccgtggatccttatcggttcgcttgcgaactcgctgattctgtttttactgttcagcgctcatctgtttgaaggcaccgcgcaggtcgtttttgtctgcgtcacctatatcctgtggggaatgacctacaccattatggatattcctttctggtcgctggtgccgacgattacccttgataagcgcgaacgcgaacaactggttccctatccgcgttttttcgccagcctggccggatttgtcacggcaggcattacgctaccattcgtggaggccgtcggcggcgcggatcgtgggtttggtttccagatgtttacgctggtgctgattgctttctttatcgtctcgactgttgtcacgctgcgcaacgtgcacgaagttttctcctccgacagcgacgcggcttctgatagtgctcgtctgacgttaaaagggattgtggcgctgatttacaaaaacgatcagctctcctgcctgttggggatggcgctggcttacaacattgcctctaacatcattactggttttgcgatttactacttcacctacgttattggcgacgcggcactgttcccgtactacctttcctacgcgggcgcggcgaatttactcactctgattctgttcccgaggctggtgaacgcgctgtcgagacgtgtactgtgggccggggcgtcaattctgccggtgatcagctgcatcgggctgtttgcgatggcgctggcggggtatcacaacgcgccgctgattattgtggccggggtgttccttaacgtgggaaccgcgctgttctgggttctgcaggtcatcatggtggcggataccgttgactatggcgagtacaagctcaacgttcgctgcgaaagtattgcttactcggtgcagacgatggtggtgaagggcggttcggcatttgcggccttctttatcgcagtggtgctggggatcattggctataccccaaacgtggcgcagtcggtgcaaaccgttctgggcatgcagttcattatgattgcgttaccagcactgtttttcatcatgacgctggtgctgtatttccgttattaccgcctgaatggcgatgccttgcggaaaattcagattcacctgttggataagtatcgcaaaacaccatcgcctgccttagcgctggaaaatccagcccgaatggtgagcgttgtacgggatgtgaaggcgtaa

SEQ ID NO: 198882 - DNA, 255 bp, Klebsiella oxytoca
atggagtgggtctcgctgattggctatctggcggcaagcctgacgacgctctcatttttaccgcaggcgtttaaggtcattaccacccataacacccaggggatatccgggctgatgtacgtgatgttcgtctgcggtttgactctgtggctggtttacggcgtgatgattgaagatacggcggtcagtgtggcgaatatgttaacgttactgttcgccttgccgattctgattatcaaactgcgtcggggatag

SEQ ID NO: 198883 - DNA, 204 bp, Klebsiella oxytoca
atgctatttgggacggatattcgaacctgccgggtcgtttataacatcacctgctccggcctacatcttatttgtgttggccggagagatgaggttccccctttctatccccgacgcagtttgataatcagaatcggcaaggcgaacagtaacgttaacatattcgccacactgaccgccgtatcttcaatcatcacgccgtaa

SEQ ID NO: 198884 - DNA, 150 bp, Klebsiella oxytoca
atgccgttcatgatcggcctgtttttcccggtatttccccagcgtatgggcccgttcaattccctgtttttgccgctggcgacgactcagccagtccttatgagacattgcggccatcagatggataagcatgttattgataacggttaa

SEQ ID NO: 198885 - DNA, 543 bp, Klebsiella oxytoca
atgaatcaatacgcgtacagaccctggttaagccgctggaatctgattccggatggtcctccctttatgactcattcctcacaacttatcccggtcaaaactgcaactgatggcatgaaagccatgctaaaaattacacatgataaggatgagcaaaccggcaacgcccttatggcgtggtgggatggaaacggtgctgcgccggttattgcccatgaaaatgaggcaattcttctggagagggcgacggggctcaggtcactgtcctctatgtccggggaaggtcaggacatagaggcttgcagtattctgtgctttacagcaagccggttgcatgcatttaagaaacagagtgaactacagcttacgcctctccatgtctggtttgccgcattaaaaccagccgctgataaatatggcggaatgcttacacattgctctgaaatttcagaagaattgctctccacacaacaagatatggtcacactgcatggcgacttacatcatggtaacgtccttgattttggggcatcaggctgttag

SEQ ID NO: 198886 - DNA, 573 bp, Klebsiella oxytoca
gtgaaaattaatcgcctctttctttcaacactggttgccgcaggtttaatgtcctctggggtaatggcggcagacggaacgatcacctttaccggcagcgtaacggccagcgcttgtactaccgttgtgggtgcaggccagaccggaggaagtatggcttccggttctgcgaccgtctcattaccgaacgtaccgtctgacatctttaccgcacagggcgtttatgccggccataccgcgttttcaatcgaactggctggttgtgaagcgacgggttctttacagaacgtccgcgcgctgttcactaccgcatcacctgccgttgaagacagctttgtaatggcaaacacggcggccagcggcgctgctggcgtcggtgtggcgatcctgaccccgacaggcacgcagattgatcttaacaacggcgcttcgattgatccgggtgccgcgctgcctaccggcactccgtctggtatgacgctgaactatatcgccgcttacaaatcattggctgcaagcgtaggccagggcgatgtgaccggcgtggcggattacgtcatctcttatttctaa

SEQ ID NO: 198887 - DNA, 2583 bp, Klebsiella oxytoca
atgagtcaccctgtctgcttaaaagcggtaacaacaataaaatacctgtatttttttattgtcgggggttactgcactatatcgtacagcatatatgctgagactgaatttgaagaggcttttctgcgccgtggaaaaaacggggttacgccggatgtcttttattatcgcaacgccatatctcccggtgtgaaaacggtggatatcagagtcaacgaccgctttgcccagcgtatggaggtgccttttctcagtaatgctgataaggccgtaatgccctgccttacccgtgaacaatttcaggcgctgggagtgaaaacgtcactctatgatggctggcaacgtcccgggaaagcggatttaccgctgtcattgaccgactgcgacaatattaccgccattattcctgcagcctcgctcagctatgaggatgcccgccaggaattaatgattaccgtgccccaggaagctatcgacagccagcgttattctatgatctccccgcaggaatgggattcaggcatacccagcttacgcaccagttataacggttattattactcatctcatcagaaaagccgcagcgtcgacggatggcatgttccctcaacaacatctgacagcacctggcttaatttcaccacaaccggttcgctgggggcctggcgtttccacagcattgattccctctaccgtaatcccggccagggatggaagtcagagaataaccgcagctatttgtcccgcgatatcgcgtttttacgcagccagtttcagggcggggatatttttacccatacctccggttacatgatgggcgccgtgccgctgagcggggtatcgctggccacacgcgatcggatgtcgctggataatcagttcagctatgcgccggttattcggggcacggctcgtaccaatgcgcgtctgctggtccggcagagaggcaatattgtatacagcaccacgttgacgcctggcccatttgcgatcgacgatctctacagcgcgcaggttggggccgatctggaggtgaccgtggaagagtccgacggccagattcagcgttttcgcgtgccttacaccgccctgccaaatatgatccgtcccggcgcgttacgctacagcctggcctccggccagtatcgtagccagaaccacctggcccgggagccctgggtgacaagcggcagcctggaatatggttccgaacacgttacctttaacagctcgtttctggcttcgccgggatatcaatcgctctctacggggctggcatggaacgtgggcccgataggcgcgttttctgctgaagtcgcccacgcccgccatcaggagtcgtggggggagggtgagacgcgcaatggttcggctgcccgtttactgtatgcccgacattttgacgccacaggaacctcgttacagatcctcggctatcagtatcgctccagcgattttctggagttccaggagttcaatgcccggcagagtcgtaccagtattgatggtttttatccttatgatgcggagtggtcgcggcggaaacgtagccgggttgagatgaaccttaaccagaatatgcaaggttatggcagcctctatcttgctttaagtcaggagcgttattacggttcggatcataaaagcacctccatcagcggcggtaccgggacgacgctcggcgacgccacgctttcgctgtcacttacgcgcactcaggaacgtctgcgtgatgataatcaggtcagcctttcggtaagcatgccgctgggcggccggaatgaacgcagccagcgcttcggctcgctcagctacagccttaatcgcgaccgggataaccgctacagccagtcgcttggctatagtggaacgcatccggacagcggatggaactattccgccaacgtacagcgcaacacccagggacagtacagccagtccggcaacctgggctatagcggcgcctctggcagcatcacgggaggtgtgagccgcggtgagggctatcgccagtattcggcaggcatgagcggcggcgtcacgctctatcagggcggggcgattctgtcgccggtaatgggcgacacggtggccatcattgaaaccccgggagcttcagggattggcatttcctcctctaacacgctgcgcaccgattacttcggcagagccgttgtcactaacctcacaccgtaccgctacaacagcatcactctcgacactcgccaaaacgagcgcgtggaattaaaagagagttcccggcgagtggttcctacggaaggggcggcggtgttgttgcgtttcgcgacgcgggttggccggcgggccatcgttgagattgccggttcgcacgccataccgctgggagcgccggtgtacatcgaaggcgataaagacgaagccgggctcgtcggagataaagggatagcctacctcagcgggctggatgcgcgtacggatcagtcgttgcggattgtctggggagcgtctccggcggagcagtgtcgttttacgctgcctgcgctggctgagtcacaggtcgagcaagagtggtatcacaggcagcgtgtggtatgccgataa

SEQ ID NO: 198888 - DNA, 732 bp, Klebsiella oxytoca
atgaaaatagcaggtaaggcggctctggtgctgggcgtggttttcgcggggctggtggagagttcgcccagcgcggcgatcaggccgcaattaaccagggtcattgcgtatgtggaagacagggaaacggcggttgaggtcattaatgacagcaatgaaacctatatggtgcagtcctggctggaagatctggatgggaaggatgacagcattcctctgatactgacgccgccggtgatgaagcttgaggggaaaaagcagggcaaactccgtctgatgccgatggccggcgcgatccctcaggacagagagtcggtttactggttatcactgcaggagatcccgccgaaagccagcgaaggggaaaatcgcctggtggtggccattcgcagtcggctgaaagtttttgttcgcccctcaggactggattctgccggggcccgcgaggcggcgaaaacgctccgctggagcatcgaaaatgacggcggcaagcgctggctgaaggccaccaatccgtccagttactatgtcagctttggcaaactgaacgtgacagggggaggccagaaagccgtgatggttgaggacaagcacctgatgccgccgccgaagggcacgatgcgttacgcgctgccggcgaccgtgggaggaacgaaactcaccgtcacctggagcggcgtcagcgactggggcggggcgggcgaagagttccgtcaggacatcgcgcaatga

SEQ ID NO: 198889 - DNA, 1305 bp, Klebsiella oxytoca
atgaataacgtgcgcgcgttaatcgcctccacaaatctaaattcgccagccggcgtgacaaaaggcgctatgtttacctttttattcatggcgctgtttcatccagcgagtatggcggagaccagaatctacaactggagctcggggacgaatgccggtaaaccagctggaacatgttcaagtatctggcctgtcaaccggcctttccaggtaccaatgacgctggttgtggataatcagcttcctgtcggcacggtgctgcattcatggagttataatgattttctgcctaatttcactgatttgtgtacaagaataaatacgaactctacggcaaatgtctcgtcaggtagtgccaccgggaacgttgtgtttgatacaacgctaaatttgaatccgtcgtcggcaccggttaatggcatattcccgacatcgatcgatggcatcggaatgaaactttacgtttattcgaatagtgaatattggacaagtgaatatggtatcgtttacggttatttgcagctatggttaagcaataattcggaatacggtgcacaagggctcgagtatcctgttattcgaaatggtcaggatcagcggattcgatccatgatacagacttacttgagtgcttcaggctatatgcttaacggtttaaaccagttctccatcagagcggaattaatcaaaaccgggaatattaccaactacggcaggttgtcgacgatttttagcccgacctggattaagggaagttcgcctgttgctatgcctccaacgtcggcgccgacggatattttttcgggcaatgcgattcaaatcgttgcgccatcgtgtcagttaaagacagcggaacattatgtgacgatggggccgtgggaaagtcgctcgctgacccagtcgggtagcgcggttcgggggcccaatgttcctctcgatgttgaactggagtgttctgcgtcggtttcagatgcccggtttcggtttgcggatacgggactctcgccttctgccgctgcggaaaagaacgtcacgctttatgatgctggcgataataaagttgagggtctggaagtggagcttcgctataatggagagcggatcaatattgatggtctgacagaaatcagtaccggcgggcatggaactgccagagtggtgccgccgggccagaatgccttctccgttgccagtagcgttcacttcaccgcaaactacatccagaacggcaatataaaagtgaataataaccccttcaccggttccacaaaggggaaagtgaacttatgggtgacttataactaa

SEQ ID NO: 198890 - DNA, 282 bp, Klebsiella oxytoca
atggctctgctgatctgtcatcgccagctggcggtgaacgggcgctacctgccggtctttattttttctggcgcgtgcgggttcactttctattttctggcctttaataccgggagtgtctcccttaacccgacgacagccagcattattatcgcgctatgtccgataatcagcgcgcttctagcccgggtgatatttaacaaaaagctgcgcctgcggcagtggatgtctaattggttaatggaatgtaaatatgaatatacttgttatttcagacgataa

SEQ ID NO: 198891 - DNA, 573 bp, Klebsiella oxytoca
atgaatatacttgttatttcagacgataaatacttttccagtggattgaaggagatccttcatgaagaaggagttaaatgcaatagcgtaaattttaacaatctttacctggaaagaacaaacatcaggattgtagactatgatctgacgatcgttgatctaccccttgtaaaaaatatccagaggctattgccgctgtacgacactctgaaaaagacgctttttgtccttgatatacaatctgattttatggaggataatcactttttaatatcgaagcgctgctctgcaaaaaaaatcatcaaaaaaataaggcaatgcattgtttttaaaatcccgcaggtacgcccaatagagcttgaggcattacagttatctaatgctggccataatatgttaagcatatcttcacgttttaatattaaagaaaaatcagtttatcgattgagatataacctggttcagaaatttggttttttacgttaccatccactgatggcaatttattgtgaagaaataacctcatggtttattgttccggaacataaaaaaaactgctttaataaaatttaa

SEQ ID NO: 198892 - DNA, 1347 bp, Klebsiella oxytoca
atgtcagataaagagatccaccgtttaccggtgatacaggcagtttgcgaaaagcgtctacgacgtcgcgatgcagcttcactgcatggcatctcagaacgtcaggcgcaacggcttatcaatcgttaccgggtttctggtgctgaaggacttgtcagccgtaaacgcggtcagccaagcaaccgccggttgaccgaatctctaaaactacgcgtgctcaaactgatacgtgaaaattacagtgactttgggcccacgctggccgcagaaaaactcagggaacgccatgatatccggctttcaatcgagaccgtccgtaactggatgacgtctgacggactctgggtcccccatggtcgtcgcaagtcacaggtttatcagccccgacatcgtcgtgattgtctgagtgaactgatccagatctacggctcccatcatgactggtttgaaggttgtgcgccaaaacgctgcctgcttgtatttatcgatgatgccaccggccgcctgatgcatttgcggttcagcgagtcagaaaccgcctttgactacatgctggcaacccgggaatacattgaacggcatgggaagccggtatcgctgtacagtgacaaacacgcaatatttcgcgtcagtggtccggagaaccgcaatactaccgtaacccagttcggacgtgtgctctatgacctggcaatcgagcttatttgtgccaacagctctgaagctaaaggccgcgtggaacgtacgaatcagactcttcaggattggctgatcaaagaaatgcgtctggaaggtattaccggcattgaggctgcaaatgcctggcttgccactttcattgcagacttaaaccgccgattctcacgtccggccaggttcccgaaagatttgcatcgtccggtgcctgaaagccccgatgagttaagagacatctttgcctggcatgatgttcgtaccgtgtcgaaatcactgacattccagtacgataaggtcctttatctcatggaccccacagaagaaaatagccgtcttgccggtgaaaaaattaaagtactggactatcccgatggcaccctcgccttccactatggacaccggagccttaaatgccaggcatttgataagctggcgtgtgtcgaccaggggcagattgtcgataacaaacgtctcgggactgtactcagactggctcaggtaaaacaggatgagcgggaaagtgaaggcaaacgggaacgaagcaaaaaatcgcccagccgtaaggctcaggtgcgcgtccaggaacagctacgggctatcaatcccgttctggcagacccgagcttgtttgtggcaagttcaaagcggtag

SEQ ID NO: 198893 - DNA, 654 bp, Klebsiella oxytoca
atgacgtataaattgtttcatagcgcgttgacgagtattttaaatggtgagtatgaaaaagaaattcatgactggattattattaagaaaatactatcacacattgtaaatcataattatcaggggtttggacgtaatattgtagatttcattgatagaggtagttgggacagtatctcaaaaatagatttcaaaggcgaaagtagacagcttgagatggcgtggactcatagctggctatatcatgcgtcagtcgagtctgtttttattagtgagtataagcaggcattctttgtcttactaaaggcatactaccaagataaaaaattgatcaataggttatactctgcgcgttgccggtcatatacgataagtaattttggtgactacatgttagaagttgagcgggtgacccgaacaggtgaagaattcatacagataccgaacataaattgttatacaacaactataatgttacgaccaccaagtggttcaccggtaagtaattgcacatcggaactattaatgcatgaagtgaatcttatgctggcaatcaataaattttcgtcattgttagctgaattagagcacattaacgaatatgaacgcgatgctttgcaagaaaaaggaaatacagcaaggcgttatttttaa

SEQ ID NO: 198894 - DNA, 1782 bp, Klebsiella oxytoca
atgattatcgatgctaaaacattctccattcttgccatttttcaaatgtataatgaaggaaaattaaaagtcaatagaaaatatcaaagaaagcttgtttggacaatggatgaaaaagaggctttaatagacagtattaagaatggttatcctataccattaatactattagcagacatcaatgggcactatgagataatcgatggtctccagagacttaacgcgataatatcttatattgaaaatcaatttagctctaaaaataaatactttaatattgagtccttcccactagcgaatcaattagctcaaaatggtattattgttgctcatccaaatggagatgagattgatgatgtatctagctctgtaaatttcacgagctatcagattccggtaacaataattcctaaagcaagtgaagcagagattactgaggttttcggaaggattaactcctacggtcgccagttaagtgatcaagaaaaacggcaggctggcgttgtatcaacttttagtcagctagttagaagacttgctatagaaattagaggtgacgtttccgacgatatagttgatcttagaaaaactccagaaatcagtaccacaaataaacgggagccaaccaaaaaatactcaattgtagctgaaaacattttttgggttcaacaagggatccttaatgcaaagggccttcgagatagttatgatgaagaactcctagctgatattggtgtatctatattactaaatgagccattcaagtatagcaaagaaaatttggatgagatttatcaaattaatagtgaaatgcagttgcaaattgagcaaaaacttacttcatatggagaggacattttgtccttggagataaaaagtgtttggtcagcaatagagtctgttcttgcagaaagtgatggcgcctccttgaaagatattgtaagggtcagaaaaggtatgcctgctataagacagccattttattatatatttatggctttctataaattaattattaatgaaggaaaggaagtttccgatgctaaagcaatactgaaatccttaaatggttgcgatgcaaatataagtacacaaagacatcatgcagatgttgctgatcgcgcaaaaaatatcagcatcatatatggtttaatttctgatcatttcattacttcatctcgcccgttcttacagcatggtagacaacttactttagaaataaggaacatattaattagatctgaaggcggcgaatctaaatcatatgaacttaaacaaggcttatattctcttgatcaaggcagagttcttaacactgaattgttagaaaaaaccataccaaaatctttgtgcgcaattgcaaacgccaaccatggtgcgaaagaaggttttttcttgattggagtagctgaaaataagaatactgcagatagaattgcatcattggatggaataacttcaaaagaagttcaaggcttgcatgttgttggcattgatagagagttacaattaaagaaggaatcaattgattcttatatgaagagaattattacctctataaagaactctccattaacagatgattttaaagcacaaatcatatcgaatatggaacatgtcaagtttttcgacaaaacaattatcattataaaagtaccaaagcttaaaacccctgcactttacaacaataacgagttttatttaagacaagattcaaacactactcttgttactaatattaccgagattttagctataggtgcattgttcaatagaaactga

SEQ ID NO: 198895 - DNA, 687 bp, Klebsiella oxytoca
atgccagcgctctcaggtgatgaagatcggttcagccctgcccgggcctacctgctttccttgaactcctcccgcagccgtcagactatggcctggtttcttggcattatcgccggtatgctcgaggccgcttcccttgaatcctgccgctggggcagcctgcggcgctatcacgtgatggccgtcatggaactcctgcgcgatatcggccgtgccaccgccatcatcaatacctaccttttggccctcaagggcatggcaaaggggtcctggatgctgaagctgatggacttcgagagttttcagcacatccgggcggttcgtaaccgggccctgcccccggaggagatcagcgcactgtttgcggcctgtgaagcggataactcgagtgtcggcctccgcgatgcggcgttgatggctgtgatcctcggctgtggcctgcggcgttctgaggcagtaggtattgatttacgacacgttgtcactaatgagagggcacttcaagcactgggtaaggggaacaaggaacgcctgtcctacatgccgaccgggacctggcgtcggcttatggccaggatagacctagtgcgtggcgagaatgccggcgaagtggctcactgcgggggatactggcgaatctatggcaccacgatgacggatacatttacatatgtacaagggggctga

SEQ ID NO: 198896 - DNA, 237 bp, Klebsiella oxytoca
atgaggcccctcactgtgatattccgtcagccagcgctctgtgaattcccgtgcttcattcagggttctgaacagataaaaatccaggatttctgtccggtatgtccgattgaaccgttcgataaagcattttttttagagtttataacagaaaagcccattattcataagtataatggcttttctgttatgaacaccgacgctataccaattaatatcaaccaaggtgaagtataa

SEQ ID NO: 198897 - DNA, 369 bp, Klebsiella oxytoca
atggtatacccacatatattcaatctattcgtagtagaaacaaccaagtcgcaagatttgaatctttatctcttgggtgtcgaaaaagcaaaaggacaactaaactcctccatatcattaataaaattaataaaggggtttgtgtttttatcgttagcgcttgcaatgtgtggaccattgtattatgctgaatttatttacttaacaaactacaatatatcctctctagcactatttcttgtttcacttttctgcataataattaatgctatacaaataaccggatttgtttactttgagtcaatctcatccaacgtgatctatagagtaaaaaatggggttgttagtgaacatgaaactaaggtgtaa

SEQ ID NO: 198898 - DNA, 165 bp, Klebsiella oxytoca
atgattcaggcatttacctggtacgaaaggatagggagggcagaggcagatttatggcttcgctggtttgaaaaaaactttgtgcttaaaaatttctcctacacttttaaggcatttgagattttcgaaacgaatacttacctgagcgactgggtacaaaaatga

SEQ ID NO: 198899 - DNA, 528 bp, Klebsiella oxytoca
gtgggaaataaaaaacagcgtaaatctgtccggtttgcggtgggtttcctcaatctgctgttcccggtgcgggatatcgcccgcatagtggtcacggcaccaaaaccactgctcatgacgctccggcgtacccgggaggtttttcatcagcaggcgaaagaacaggctgacctgagctgggcagaggccctcgcggcctcgggcagcacggaggcggcacttgcccgacgttatcgccgcagtcagtggctgtggcgtgcggtcatgtgcggaagtctcctgctcagtctagtgctgttgacgctgatcattgggtccgggacgacgctgagtgcgtttgaggtcctgcgggccgtgtcatttctctttgtgctcatttcgctgacattgctggggtttgtcaaagcgatggaagccacattccgccgctggcagctgatgagccaccgcgtcagcatcacggagaaaggcacgttcagggactttacggcagagaacgcctggatacgccagacgatgggattctga

SEQ ID NO: 198900 - DNA, 2148 bp, Klebsiella oxytoca
atgactcttcttaaaagactcttctggggtgggcttgcgcttgccctgacgacggccgtccgtgctgactcagtgacttatggcaccatcgctgatgcggcaaaaaataatgaagacctgtcccgacaggcactgattgccgtttttggccaagtggttgccgacccgtttcaggcttcggaaatgacgctcatgggggcactgtttgccctgatgaacggtgtactggcctgtatcgcgctgttctggtttttgactatcacgctcaagcacgttaccaccagtggcgcacagggccaggtattcggttccggtcggagttacatgtatccggtcatgaccctggcaggcttcatcagcattgtacccaccggctccggctggtccattgcacaactgaccatgctctgggccgcctccattatggggattggtagcgccaatctgctgacgaacaagggtgcagagatgatcgggaatggttattcactgattacacaacctactgcagccagcacccgtacagcatcccgcaccatcttcgagacaatgctgtgccgtaatgccatcaatgcacggcagagtgaaatggaaaactactttactcaacagatgatggagattgagccttctaaggacaatcgcggctacaccattacgaacgggaattccgtctgcggtaccgtaggcatgccagccatgaccagaagcagcagctggaacaataaattcgatatagcttcaggcatcgatgtgacgtccattcaggatgcgcagctgcgggcgatggatacgatggtacaaacgctggatacggcggcaggtcattttgtgaacgcctatctcaatgaccgcatatcaggagaagtatcgcttccagatgcggaaaccgccattcagaatgctgcagcggcctatgaaaacagcatcaaccgggcgattaacagtctgaacgttaatgagaacagcatgcagagcaaactcattagtcagttaaaaagctacggctgggttgcactgggctcctggtaccacacttttgctaccgcaaatgaaaaaacagcagccgttgcacagcagtcccctgtcaccacgggattcaacggtaaaggggattcaggtcagcttgatacctataacgcggttatggcggcctatacacaacaactacagaacagtgcctatactccgcctctgggaacgatgacctcgggtgttgagataaatacaggtgactcacaggatccaaattctattctcaaaactgtatttcaaggttcactagaaataatcgcttcttatgttgctctagattggagtgaaaatggcacaaataaccaaaccaatcctttaataaaaatgaaaaatgtaggcgattataccttgggtgcagtgcaagctacatttgccagttatattgctgcaaaagtaggtgttgcatgggtaacgggcaatttttttggacgagcaattaataccattactggtggcggtgatgtcgcaaaaaatgtgctggaagccatccagggaccgttgtattttctgttatttgttttgttgtcagttggatttagtttatcgatattcctgcctttcatcccgtttatctactggatgggagccatcactaactggtttgtcagtgttctgattggttgtgccgctggccctctctgggcagcgacacatataggcacagaagcagataaaggcagtcgttcagcttatggatatgtgtttttaattgatatgatgatccgtccatctttaatggtgttcggcttcttttttgcgtcactcggcgttgtagccgtaggtactatcctgaactatttatttgctgcagccatcgctaatgttcaggccgattccctaacaggtgttatttcacttatcggcatccttatgatttatgccagaatatgtaccacactgttgacgcgattatttggattacaggttacaatgccggactatgtaatttcattcctgggaggacgggaggctgcaaatgttatggggggtatggttgactctgtcaaaggtatgtttgccggatttggtcgtggcgccggaagtattagcaagcctaaacaaattgaaagtaaaacgccctctccggatacaaataaagatggtgttagctga

SEQ ID NO: 198901 - DNA, 675 bp, Klebsiella oxytoca
atgataaaaagaaaaagagggttcttcgaggttatacctctcgtaatattctatatgtatagagtatttgcatcgccaatattaattttattaggaggcttaatcgttattgtttgcacctctcctgcactgcactcagaacacatagcaagtgtgaggcagcgatactttgaacaaatgatggcaggctggcttataatatctataggtttactgccacacgtgattgcatttatcctcgcccggcttaaccgaaagaaaatccgtaaaatcctcagctccattaaaagctctgagtctttcctgccagaaccacagtacgagttctgggagccacactctgaagcttacctcggcattgatgctaagcgcggtacctttgtgtatgtacgtctgattcgtcgcgggcaggttgaccttattggttttgatatgcacaactgggtcggcatcgagctcgacggacgtctcctgaacatcaaaacgaagaccattgaagcacccgtgctgtcgatgggaacccgtgccggcgatggtgacaggatactggccctcattaacaccatgtctcacagacaataccgttacgattgctattacttcccgggatatgttgctcacaatgcgaaacgcattgctcaacaacacaatgtaacgattcctgtgtatgaatga

SEQ ID NO: 198902 - DNA, 1392 bp, Klebsiella oxytoca
atggaaaaaattccttacccaattgatgcctttccaacaatcatgagaaatgctgcctatgaagagcaaaatatcactaaagctcccatggcaatgatagggtctgcaatgttgagcgcagtatccttggcttgccaaagcaaagttgatgtagaaaggccaggaggacttaaaggtccaacatctcttttttttgttacaatcgcagaatcaggtgaacgaaaaagtgcaattgacaaaaatgtattttctgcgatacatgaatgcgaaaaaatgttcgcgcagcaacacgccgaagaaatgatttggtattccggtgctgttgagatctatgaagcagaaaagaaagctctattagctaaattaaaaatgcagataaaaaaaggtcttgatacctctcaaaccaaagacgatatcaatgaattaaattcaaaaaagcctgtccttccccgttcacgcagattaattatgagtgacaccactccagcggcattaaaagatcatttatctggggaaggtcgatcggtcggcattctctcagatgaaggtggtgtggtgtttggtggttcggcactgaataacccttcgctcatcaatacaatatggagtggcggggatgtacatattgacagaaaaaacaggccaccactgactataactgatgcaagactcacattatcaattatggttcagcaaaatgtattggatacatttctaagaagcaataataaaattgcaaaggattcaggatttaatgccagatgcctattcagccatcctgtatcaactcaagggtatcggcagataaataaccccgtaacatccagagaacatatgccaattttcagtgagcgaattaaagaattaattctatctaatcagcacaatgatagaatcatgttgcagttttcaacaacagccgccagcgcatggatcgactggtataatttcgttgaaactcaaattgcctcaacaggagaactttttgaaatcagagattgtgcatcaaaaattgctgagaacacagcaagaatcgcggcattgctccatttcttcagaggcgacgaaggcgatataacacctatagctatggatgcggctgaaataatcagctcatggtatcttgaggagtatcaacattttttttcaagtggcaataatagcaacgatgaaaacgaactattcgactggattatccattattgccgttaccatggtttggcacgtttgaagaaaaacatcattcttcaatatggaccagttcgacttaggaataaaaaggctttagaaccgttgttgaataatcttgcgtatacgcagaaaatcatttttgaagcaaggggaagaacgacttacttaatcccagtaaactcaggatcttggcatttataa

SEQ ID NO: 198903 - DNA, 240 bp, Klebsiella oxytoca
atgagcggcatcctgttatctcagttacctaaagatattcctgcatcttccctgatttacataaaggaagtcgccagccttctcggactacagcctcagacgatcaggaagtggatttgccatgattcattgcctgaagggctaccaaaaccaaaaaagctaaacagaaaaaactgctggctaagaaccgatattgaatcatttattgcaacaaagttttcaaataacagtaaattctga

SEQ ID NO: 198904 - DNA, 1299 bp, Klebsiella oxytoca
atggcacttccgagacaaaaactcaccttcgagcgcattcgaaaatttgctttaactgaagggaaaaaccaagcatttctttgggatgcggatgtaacaactctggcatgccgggcaactcgcggaacaaaagcttttgtgttccaaagcgtatatgcgggaaaaacccttcgcatgaccattggcaacattaacgattggaggattgatgatgccagggccgaagctaggcggctgcaaacattaatcgatactgggatagatccgcgtatagctaaagcagaaaaaattgctgaagcggaatcacagcaggctgaatctcgtaaaacgaaggtaaccttctcaagcgcttgggaagattatcttcaagaattgagaaccggaatcagcgcaaaaactaaacgtccttactctgcacgctatattgccgatcacgtgaacttgtccagccgtggaggcgaaagtaaaaaaagaggccggggcccaacttcggctggaccattggctagcttgctcgacctaccgttatcggaactaacaccagagaacattgccgcatggctaagtacagaaagacaaaatcggcctactgttactgctcatgcttaccgtctgttgcgtgcatttatcaaatgggctaattaccagaagaaatatcagggaataatccatggcgatcttgcacaagatcataacgtgagaaaaatggttccagtatcagcgagtaaagcaggagactgcttacaaaaagaacagttaaaaaattggtttcaggctatacgtcaactcaataacacagttgcatcaacttaccttcaggtgcttttactcaccggagcgcgacgcgaagaaattgcgtcacttcggtggtctgacgtcgatttcaaatggtcaagtatgcggattaaagacaagatcgaaggcgaacgtatcatacctcttactccttatgtcactcatctgttaagcgcattggtgcaaacaccaaattctgacataaataaggaggattgggttttcaggagtaatagcaaaagcggcaaaattattgaaccgcgttccgcacacaatcgggccttagctaaggctgaattaccacacatcagcctgcatggattacgtcgtagttttggtacgcttgccgaatgggtcgaagtgccaactggcatagttgcgcagattatgggccataagcctagtgctcttgccgaaaaacattaccgacgccgtccattggatttattgaggaagtggcatgaaaaaattgagatctggatcttagaacaggctgatatttga

SEQ ID NO: 198905 - DNA, 408 bp, Klebsiella oxytoca
atgggcaataatgttcattatacgtctgaatctatttcttatattcgttcagacgatctgtggatcgaaggtttagcgatccaacaattacacacgacggcaaatttaccccacatgcagcgcgtggtgggaatgccagacttacatcccgggcgtggctatcccatcggcgcagtcttcttctcgctgggccatctctacccggcactggtgggtaacgatatcggctgcggcatggcgctgtggcaaacggatatcctcgcgcgaaaatacaatgcggataagtttgagaagaaactgtccgctatggaggacgttgcgcaagcaagctggctggacagagcatctgccggaacatttattgacccatccctggcgcagcgccctgggatcgattggcggcggtaa

SEQ ID NO: 198906 - DNA, 795 bp, Klebsiella oxytoca
atgaactctgagttactgcaagcgtaccgcaccggcaagctcatgctttttgtaggtgctggagtgtcagccaatcttaacctgcctacctggaatgagctaataggtcgcatagctcaggacttgggttacgatccgaagattttctccacttacggaacaccacttgctcttgctgaatattacaagagaaaaaaaggtacacttgggccacttcgaagttggatggatcgcgaatggcacaagcccagtacagatgtctcaacttctgaaatccaccgattgataactcatggacgattttcacgaatttatacaacaaactatgatcgttggttggaaatggcccacgataagttcgaggtgccatacgacaagatcgctaacgtttccgatctcgtatctgccaccgaggggcggcgtcaaatagttaaattccatggggactttgatgatgaagattctatcgttcttgacgaaacaagctactttcagcgattgaactatgactctccactggatattaagctcagcaacgatattttggggaattcagtactctttatcggatatagtatttcagatatcaatatccgactcttgttctaccgactgactgagatgtggggacgctcggtgctgccatctgctagaccaaagtcatacgtcttcacgaatcgaccgaatcctgtagcgaaggaagttttgagtcagtgggggatcgaaatgattgtttcagaagaggacgattcaaagaaagcactgacggaattccttcaaaaattagtgagctaa

SEQ ID NO: 198907 - DNA, 561 bp, Klebsiella oxytoca
ttgaaaattcgatttatgtccggaaatcagcacaagatcaacgaagtccagcgaatacttactcctgtcggagttgaagtcgtaccggtgtcacgaaaaattgaagagttacaaactgaagatgttcatagcctagtgcgagataaggtaacaaaagcatttgaagcgataggtcgaccgctctttgtcgaacacaccggactttatctaagcggcctcaatgggcttccggcaggattaacacagatattctgggataagctagaggcggagcgatttgttaagctagttgctggtctaaatgatgctaaagtgatcgcgaaaacagttctcgggtattgcgatggccgggagattcaattgtttgaaggctctatcgagggaacagtacctattaaacctgcgggcccagcggactttcaatgggactgtgtttttgtcccgaacggatgtacccaaacttttgctgagatgggctcggagaaggatgccatttccatgcgccgtaaagctctcgatctgtttgccgaatatctcaaaacttctgaggatgtaagatga

SEQ ID NO: 198908 - DNA, 1053 bp, Klebsiella oxytoca
ttgaatcaatgtaaaaatgactcggcaaagaagtatagttggactggcgaacatagtattgagcagtatgagagtacaaaggcgaaatttagcgacatagaccgagcagagcttcacgtacacatgaacggatcgatcccgctctcaactattcaagacatttttgcggacgaatcaacagaattgccagcgggtttcttgattgagcgggatatactgcgatacaaaccttgccagtcgttggcgtcatacttgacaccttggcaagtactacgactttttcccaaaaaacgcgaaaatctaaatcttctgtccctagccgtttttgagagtttgtcgcagaacaacgtgcgttttgttgaactgcgaagcagcgttttatatctcgctagcttgcaaaattgtgctcctgctcatgcgcttgagcgtcttttagaatcatctagatctgcatccagccgcttcggtatacgaactggtttaatactcacagtgacacgtggtgattacagctcagtagccttgtccacccttcttcaagcctaccaagatctcggccagccaagtgatgtggtggggctggatctggcaggcgacgaggaaattacctacccagccgaattaccttctctatttcgtaaggcgaaggatcgattcgggctaggaatcactatccatgcgggagaaactggacgtgtggataacgttcgtacagcagtagaattgtttggtgcggatcgtattggtcatggaacagcggctagcaaggcccctcaactactagatttcttagcaaagaaggatatctgtattgaagtttgtccgatcagcaacagattaactggagcggttctcaaaaacgaagcccatcctttgcttgcattccaacgtcatggggtccctttcgtgatttgctcagacaaccccgcgattcatcaacgaggcctagcagatgatcatatggcggctatgaatgaagggctatcagccagagatatttacgaacaattcgacgtcgcaaaacggtactcatttatagagggtttagattga

SEQ ID NO: 198909 - DNA, 1263 bp, Klebsiella oxytoca
atggaaacgttccacaatcctgatcggtttatgtctgatttgcgacaggtactgtcacagggcaggaagcgtattggaattcttgttggtgcaggagcaccactcgcaatccgcgtaaatgataagaatgagatagacccagatggtaagtcgcttattccgggtgtagaggcactgacactgcaagcaacctcagggctgacagacattcagacaaaggcggtcgaagcaataaaagaaagcttaggaaataccgctaacattgaatcagttttatcacgtattcgtttattagaacaagcgttggggaaaacgaaggtagaggggctcaattcagaagattataggcaactaggcaaagatatctgtaaaaagatctctgaaattgtcggggtttatttgcccaaagaacgaaacgcatattctgatttaatcgcatggattactggtaccgttcgttcaaattctgtagaaattttcactacaaactatgattttcttttcgaagaggcgtttgaaagagtaaggtctccttactttgacggtttttcaggaggcagtaaacctttctttgatcctgtttcggtagcaggtgatgacttacctgcgcgatgggcaaaattgtggaagatgcatggttcccttggctgggcattggaagacggagctgttgtccgaggacatgggcgagaagctgccgaattagtttatccagaccatttaaaatatgatttaactcaaaaacagccttactccgctctctttgagagacttaaaagatttttacttactcctgactctttgttactcacgattggattttcttttagggacgcacatatttgtgctgttcttgatgaaagtttagcgatgaatgccaatacagctgtattggcatttcaatatcaagttattgcaatggaagagcctgccgtaaaattagcaagtgatagacctaatctgagcgtctacgcagcggatggagctgtcataggaggcgtcccaggaaaatggcgtccaggggaattacctaaaaactggggaagtattcgcgaaagtttttgggctccacgatcttcgaaagagccaaaccaatttttattaggggattttgcagcttttgctcgcttctgtgcattagcccaatcaaatgatttgatagcacaatctttgaaaagggatgaaccagatagaacggagtatgaaactaatggaagcggcagaaatgaggttgagctagaggaaagccaaaatgagcggtaa

SEQ ID NO: 198910 - DNA, 1833 bp, Klebsiella oxytoca
atgagcggtaatgatccgacatatttaggtgtcgttagtgctgtttcaggtgccaccctcactataaaacttgctgagtccttggactctggttttgccgtcattaaaggacatacatatcgagttggccaagtgggcagttttgtcagaattcctcagggctatcaggatctatttggtatcgtttctgagatcggggccactgccgcaccctcacaatctgatatttctgaaatcgactcaggtaggtggatgactgtccagcttgccggtgaaacagtcggtgggcaattcgaaagaggcttaagccagcatcctaatataaatgactcagtacacttggttaccgaaactgatctaagaagaatttacggttcaatcggtgatgaccaagtgaaaatagggcatcttgcgagcgcggaaaacattgacgtgcgtctttctttagatgctcttgtaacgcgccattcagcaatattaggctctactggggcaggtaaatccacaactgtcgcaagcctcctgagatcaattattcgaaaagatgaaactcagggatcacctggcgctcgtatccttatgctcgacatacatggcgagtacactaaggctttggaagatgtatcgactgttttcagtgcaacccctagtcaggatcaaaagccattatttgttccctattgggccttagaagctggtgaacttctagatttcataacaggaaggctttctgaagctcacgaaattgcctttacagataaaattgtggagttaaaagacaagggtattcaagtaaatccaagagcgggtattgattccagaactcttactgtagatagcccggtaccgtttagcttaaaacaactttggtatgaattagttgattttgaaacaacaacttatatcggtgtaaatcgtgatgaacctgcacttgaagaatccggagatgcagaaaccttggtcgcaccaaaatatcaacctcacgctatgggcaccaaagggccattcacaaacacagcagctagaggtattcgaagaccattaaatttacttcgttctcgcctactagatcgccgctatgattttcttcttcaccccggcgattgggagcctgatctcacgggaacagttaaaacagatctcgataaactgttagaaggttggctaggtcatgataaacaaatcactatattggatttgtccggagtccctagtggagttttaactcgactcatcggctctattttacgtattgtttatgaagcacttttttggagtcgggaaaaatctgagggaggtgtagagcgtcctcttttagtagtgatggaagaggctcatcgttatctaggacctgatgctggaactgtcgcctctgaagtggtaaaacgcatagcaaaagaaggtcgtaaatatggtgtaggggctatgattgtgtcccagcgaccagcagaagtagatgagaccgttttatctcaatgtggcacgatcatcgcgcttcggttatcaaatcctgtagatcgtgcacgcgtgaaaggaactttgccggataacttagccgggctgatggacctcttgcccgtgttgagaactggtgaagcaatcatcaccggtgaagcggctcgactccctgtccgttgtcgcattaccttgccctgccaaaagcacttaccccgtagtaacgatcccaaagtcacccaggcttgggctagcaggcgttcagccgaaggctatgaccgcgtggttgcctcttggcgtagccagcagactaacgcagttgtccaaaaacttaaaatcacccgttcaccaatcgaagatgaacctgaggagagctaa

SEQ ID NO: 198911 - DNA, 210 bp, Klebsiella oxytoca; identical to SEQ ID NO: 105500

SEQ ID NO: 198912 - DNA, 390 bp, Klebsiella oxytoca
atgaagtatcttgataaccatcacccgctacagaagtcactttccggcctgccgcaaataaatcagttaactcactacgagccgataattggcattaaaggcaaaactggcgcaggaaagagtagcctgtgtattgcgctttttgccgggaaggtgtcatcgattagcgttgttgctgcatgtgcccgtgaacctttaagctttcatctccgggtcggagaacgcttactgacgatttttgatttaccaggagtcagtgaatgcacgtcgcgggatgtggagtccacctcactgtgccgtgaacaacttccccgcttcgacctgtgctgtggcttattaatgccgatgaccgggtgctggcggtggatgagcatttttatcgccgggtga

SEQ ID NO: 198913 - DNA, 927 bp, Klebsiella oxytoca
atgacgatgtttcatgatgttcatctggaactgctggtcgacgcctattcacttccccaggcagaacgacttgcgtacatagatctctgtattcgctatcttggcagcatctccagagctgaaattatggctgagttcaaggttgctcaggctgcagcatctaaggatcttgctctctatcgggagttaaaaccggataactgctgcattgatactgcaaccaaaagaactgttatccttgcagacagctataccccactaattaggattggtgtccacacggcccttaaccttattcagtatgggtttacacgctccgaattaatgcaaaagcgcccaatgctacccattgatgaagtggacccgctctatcagccggaacgcctcaaagaagaacaggtagcggcggtaacaagggcaataaagggacaatgtgcaattagatgttcctacggttcaaaaagtggtgatcacagggaaaggatactgtttccatcagcattgtttgttgatcgtaagaactggtatttcagagcttatgaccgaaatgaggaacaaccacagcgcagtggttttaagaacttcaaattatctaggctttttgatgctcatttggaaacaacaatttcgccgactcttgccgagaagacggatagagagtgggacgaagaaatcacttttatcattgaatttaaaaaaaatttaccaaaagaaacaattaatgaaatatcgcgcgagttctctataaatggtaacgtccattccgtcacttgccgtgcagcattggcctgttatgtaaaaaccaattggaaaattgacttggtcaatgatgaaaataataagtggttatactttgatgtactgaatgcagaagctttacaagaagttcagtgtttagcaccattgtttgaagaaaaaaatgggtaa

SEQ ID NO: 198914 - DNA, 345 bp, Klebsiella oxytoca
atgaaaaaaattcttcgtaatatcattcttactacagctgtggtttctggttcagtgttcgcagcagatagtagccagcaggttgctctttctgatcttcattttgccacaacgccaaatgggatgcagcaaattgaaggtaatggtattaatactactaatcaaacactaaagcatgtgttcgtgaaatttaaccttcttcagaataataccgtagtggggcaaaccatcgctatggtagagagtctggaggccggacagagctggaaagtacaggctccttataatagtttttctgttaagcctgatagttttaaggttaccgagattaacgttataaattga

SEQ ID NO: 198915 - DNA, 684 bp, Klebsiella oxytoca
atgaacacactgacagtatctctagtaacaataatgatccctggtgtcattatggcactaatttatgatacctacactcaacataaatcctgggattcatttcgatatgttctgatgtcggttgtatttggtatcgttacttatctggcaatgcaggcagctgtgagcttatttcaactgattgcagggatcggtgataccaaatccataagctggagattactgtcggtctggtcaattcccaatgaggaaaagatagcaattaatccactggagatcttgctgggcgggctttgtgctatccccttggggctgatagctgtctatcttgcaaccaagcgaacatttcatgaactattactacgtaagggtatttcaaataaatacggtgatgataatgcctttataaggtcggttgagatcatgcatagaaataccgggcaatgctacgttctgttgcatgaaaacaacatgctcattcatgggaatgtctatctgtataacgaaaatgacaaatctcaggaactagggcttctaaacgcaactgtactcaattccgaaacgggagcagttctctggacgacggggtttatctatctttccaaagaatacggtaaaatggtcgtatttgaaaattacattgaggcttcaaatgtcaaagaatcagacaccgaaaacaactag

SEQ ID NO: 198916 - DNA, 864 bp, Klebsiella oxytoca
atgagaaatcaggaaggcttgcattcgctgcagggctcacttataggcttaccagaatgggcctcagaacaagtcatgcagcaaattcgtcaactgacaaattacgagccaatgatcggtattatgggaaaaactggagcgggtaagtcctcattgtgcaatgctctgtttgcgagtgaggtatcgccagtcagcgacatatcagcctgtacccgtgaacctttgcgattccgtcagcaggttggcgaacactttatgaccatcgtcgacctgcccggcgtgggtgaaagcagagctcgtgataccgagtatgctgcgctgtaccatgaacaactcccccaactcgacttggtactgtggctgattaaggctgatgatcgggctcttggagtggatgagcacttttattatcagataattggggaagcttaccgccataaggtgctgtttgttatcagtcagtcggataaggccgagcccactagcagtggagagacattgtccacgaaacagaaacaaaatatcagccgtaaaatctgtctgctacatgagttgttccaaccagtaaatccgatctgtgcggtgtcggttcgtctgcaatggggactgcgggtaatggcggagcgtatgattcgttgcctgccacgcgaggccagcagtccggtggcggtacagcttagtgctccacttcgtaccgatgccgttaataaaaaagcccgtgacgattttggtgaaacggtcggctcggtactggacacagtaagttccctgcccctgataccggccccggttcggacagtcatccagtctgtacgcgacatcgtggtatcagtcgctcgtgcagtctggaatttcttcttctga

SEQ ID NO: 198917 - DNA, 459 bp, Klebsiella oxytoca
atgacgacacaaacgcaatgcaaattgatgtccgctaatgaacctcaatttgaccttactgcatcaccagtacctgacgagcagcgtctcgatttctggccgctgcactttggtgctatcacacagtggataacgctggaatcccgtattttcgcctggatggaacgcttctgtgatgagtacagcggtggtatctggtccttttacacgctcagcaatggcggcgcgtttatggctcctgatgctgacagtgacgacaaatggcatcttttcaacagcatgaacggtaatggtgcgcaaatgagcgcagaagccgcaggtattgctatctgcctgattgaatacagccatcacgcctgtcgcaccgaatgcgatgccatgacggagcactattaccgcctgcgggattacgccctgcagcaccctgaatcccacgccatttttcgcattattgattaa

SEQ ID NO: 198918 - DNA, 318 bp, Klebsiella oxytoca; identical to SEQ ID NO: 105503

SEQ ID NO: 198919 - DNA, 321 bp, Klebsiella oxytoca
atgaaaaccctacctgctataatttcgcgggcggcgaagccctgtctgtcgccagtagctgtctggcaaatgttactgacacgcctgcttagacagcactatggcctgacactgaacgacacgccgttcagtaatgaaactgttattaaggaacatatcgatgccggtatctctttagtcgatgccgtgaattttctggtggaaaaatacgaactggttcgcatagatagtaaggggtttagctggcaagaacagtcgccttttattactgctgtagacattctaaaagccagacgggctatgagggaaatgagaatttaa

SEQ ID NO: 198920 - DNA, 333 bp, Klebsiella oxytoca
gtgatttatggttttggtctgctcagcaaaaaacactggcacaccggctatatatatgtcgtcaacaaaagtgggatgttcgcgtttgtagttatcgaccatctccgtaataatttgatatgcacgcatctgcgccaccgaatcatcaggaagaatcccaagctcaatggtgatcattgtcacctttccatcccgattcaccacccccatattcatgagttcattattcatcagggcattccgcgccatctccggatcaaccccaatattatttatggtcacagccgccttcaaggtatcaccatctatcagaaacgcattttccgtcgctga

SEQ ID NO: 198921 - DNA, 813 bp, Klebsiella oxytoca
atgaaatataaaatttactctctactcttttgtttgttttctgcatcggcattagctacaccgcaggctgatgagatattagttaaggtacgcgatcgctatgatggagatgattatgtctcccaggtgacactcagaaataatagcaatggcaatatccaggataaaaatatgtatatgctgcaaaaggatttcccagacagggaaatggttagcatgttttttcattcaccttccgatgtgcgtaatgtgagttttctggtcgccaactataatgaatctattgctagtgacgatgagcaatggatgtacctaccggcgtttcgtaaagtccgtcgaatctccgggcaggataagcgaggtgctttcatggggagcgcctacagctattctgatcttgataaactgcgtgttaaagactatcaatccactctagaaggtgaggataaagtgaatggccgtgactcgtggaagattgaacgtatacccgtttctcaggatgttataaataaaaatggttataaccgcaccgtactttgggtagataaagaacgcgacattgtgttgaaacaagattactacaatagtaagaatgtcagatataaatctttggaggcaaccgaggtaagattgattcaggatatctggactatcacgcacagtaagatgaagaattttgaaaacgataaagaatcggaaatgatatttcacgccattaaatacaatgctggcgttgatgttgattatctgacacaaaatattctgaaaactagcattaaagatagtgaattcaaaaaacttattggacagtaa

SEQ ID NO: 198922 - DNA, 1194 bp, Klebsiella oxytoca
gtgcggggtttaattctcctcttgctgctttatggtgcgaatacgtacgccagttttttcattgagccccggatacagctcaatggtgctaatcaattatcgtcattttctggtaccgagcgtagtatttatgctggcacctatgtggactgggaaaatgattatttttatatgcgcttcaacggtgaatatcgttacgacgggatttttaatagtcactactcttccgccagtcgcgataaatatcgttcggtgttctggttagatgaattctacctagaaagaaaattcgatatttttaacctgtacctcggctatcagaaagtgatctggggacaggctgatgagctgcgtgtggttgatgttataaacccactagattatcgacagttcgtcctgatggatctgaatgattatatgtatcctctgccgatgctaagggttgtgagcgatgttgttcctgactggacgtttgaagcaatgtgggtaatgaaatttaaagccaatcagtatcctccacctggaagtgaatttaatatggggatgcctacagatctaccacataaaaaaaataataaaggagaatttgcattcagcgtaacaactaatgtggaaggctttgatctgggctggtatgcatttcgtggttatagtgacgacccgctgtaccgtgctgatgaccatgctccttacatgcactatccgcaggaaagtatgctgggtaccagcgtcagtactgcattgcagaattgggtgatacgtgctgaaagtgcctggtttccaggcaaatattacaaccatatttatggtgatcaagagcgacacgatactgttaaatatttactgggccttgattatttgtataaagactggatggttactgcgcaaataactgaccatcatattgtgggctggcattcgaaactggataccttatcatcggatccttattatactttgtctcttgaaggaaaaacgttttctgataatttatcgctacgattaagtaatacttggtctggcagcagcggaggtgggaatttattgcagagtaagatcaaatatcaatataacacaaatctctcttttaatatatacctggatataatgggggggacatcgagaaatctgattgggtctcagtccgattcatcccgcattatgtactctgttatttacaaattctcaggataa

SEQ ID NO: 198923 - DNA, 744 bp, Klebsiella oxytoca
atgaaaaactatatagtatctggtgccgctaatggcatcggtaaagccattgtattatctctggttcgtgaggggcaccaagtatttgcacttgatattgatgaacaaaatctcatgttattaaagttggaggcaccaaaacaaatagagaccctaactgttgatatgacagattgcggtgcaattgagagggctctgttaccagttattaaggagagaccactgttcggtgtgattttgtctcacggtatcgataacgaacataccatcagtgaaaatagcgtttgggacagaattatagccactaatcttacctcaacccaacgtatgctgtcgttgttatgtccggtcgttagtgtcgggggtagagtagtactgatttcttctattttgggtaaagtcggacgaaaaaataatagtgcctattgcgcctccaaacatgctctgcttggaataactaaagcactggctctggaactggctccgaggcagataacggttaatgctatattgccttcttgggtggatacgaaaatgttaaggaaggggttaacgcagcaggcacgaatgatgggcaataccgttccacatctgctaaaacgcattggcaaaaggatccctctgggtcggcttatcagtactgaggatgttgctggttgcgtgaactttttgctttcccctgccgccgccatgatcacggcgcagagtctggttattgatgggggggacgggtgcggggtttaa

SEQ ID NO: 198924 - DNA, 747 bp, Klebsiella oxytoca
gtgaaaatatcatccccggagaaaaaatacgccatagtcactggtggtagtaagggaattggtaaagctattgtcaattaccttctcgacaatcagtatcatattgcgtttagctaccgacaaagtgaagatatgcaaaaattgatggacgatgccggtgataaaaaaagatatcttctgcctatttgcgccgatatgtcggttcgtgaagaatgcgtgaagtttatttcggaagcttatctgaaatttaaccgtgttgatctactggttaataatgttggtatcacccgcgatgggctgcttgctactgccagcgatcgagatatttacaatatacttaatactaacttgctaagctatattttctgctgtcgtgaagtattaaaaattatgctgccacagcgatatggtaatattattaatatatcttctatatcagcccagcgtccaaataaagggcagtcggtttacgcggcaacaaaaggtgctatcgaatcaatgacaaaagctttgtctgttgaaatggcaccaaagaatatccgtgttaatgctatcgcgcctggtatcatcagaaccgaaatggttgagacttttcttaaatccaatcaagatattattaaagatcgtgttttgctaaggaagcctggcgatgttgttcatgttattcgcggcgttgaatacttgctaaataatgattatgtcactggtgaagtgattaatattaacggcgggttatctcttacttaa

SEQ ID NO: 198925 - DNA, 2853 bp, Klebsiella oxytoca
atggacaattatattactctttgtaagccaacgctttcaaaagcgctgttgtcgattgggctagataaaaaatattttaaagctagcggcaattatctctattaccgtaatcgcgatggtgaagaagttgaagttcttgatttactcggtggctacggggctacactgatcggtcattttcatccacagattggtgcgcgctataaagactatatcgagcagcaggtgccttttcacaatcagttttcaatacgtgagggcgcaggagagttgtctgctctgttgaatcgacgtctgtgccacgagaccagttatctgggtggcttccagttttgctataccagcactggtgcggaaacgatggagattgcacttaaacatgcggaatatgcccgtagtctcgaactggatgcaatgcggcaacagcttaaagcagactatgacacactgaattatcaatatccctaccatctaatgccacaacaggaaaggttgctcggtgtttctcgggaggcatcaccagacgtcattaagcaggcactggttttctataacacagaacaacttaaagctcatccgattttcatcgctatggaaaattcgttccacgggaagatgatgctgacggccaattgtactcacaatccgatgtaccgttcatttctcagggggctgaacatcgacacacgttttctgtcggctcatgcgatcaatgatatcgttcaagacatcgggcgtcagggactgtggggggaagcactacaaccagaggtgattgatggagtgattcacctgaagccgttaaagattcgacgggttgtggcgattcttgtcgaaccggtacagggggaaggtggagtgtggccgctaaacgccgcaatcgcagaggatctaaataaattgcgcgatttgctgcactgtccacttatcgctgacgaagtacagtccggttccggtcgctgcggtaaattggtggcagcatctaatatcggtctgaatgctgactattacgcactttcaaaagcgctgggtgctggatatgtcaaaattggtgttgttgctattaaaaaaagtagttttgctacagggttcgatctcatccaaagttccacgttcggtgaagacgatctctcctgcaaagttgcccatgattatttggagttgctgtataacggtgatgatccattaatcaaaagagtggataaaatcagcgaacaacttggaaaagttctcaaccagttaaagaaccgatttccagatgtaatcaaagatgttcgctatcaggggttactgctgggtatagaatttaacgatgctacagagtcatcctcttatttaatgcaaaatatcgcagcccaaggctcattggggtatatcatcgctggtcatttgctgaatgcctacaatattcgcgtcgcaccttcgggaagttcggcgaacgtgttgcgctttgagccttcggtgtaccttgagcaacgtcatatttctctgttacagagaggactggaaagcatctgccttgggctccgctatgcggatatcggttttctccttagaccgataattaaaaacggtaccagcacagccattcagcctaaggattatcggccatctgtcagcgaaattgctaaatattcgtcaccggctgattttagcgttaccttcattaatcaccttatttctccctctggattacgggatgtggagccctcatttgagattttcagtgataaagagatcgaggatttcctgttaagttcgagttttaatctgtcgacggtacctttccccgccagcaggatacgcaataagtatggaaaaaccgtcgattttattattcaccctattccagtgacatcgcagatgatagcccatgcactggaaaacaataatctcacccaactgagggcagaggtcaatcaacggatagatgtcgcgatacaaaacggcagccgagccgcagggctaggaatgtttacctcaattattacaaataatggaaaatcagtaaaaaataaccgtatcacggtgacgaccggaaacgcgttaactgtaggcatggggatcgcggcggtgaagaaggctttcggccagcgagatttagtctgtgcgagactgagcgtgattggtgccgcggggaatattggtagcgtttatgccgaaatgttaggcgctgaatgtcaatcgcttctgctgttgggcagcaataaacaggattctctgcaacgtctaagcgttgtgaggaataacatttacgctcattattatgacaatttcagcgccggaaaaacatacccggagggaggcttggctgcgcgtcttgcggatatttttgatacgatgcaaccggatgtacgccagcaatgccatactgcattggctggatgctttatcagtaattatctggagaatcattatcctggagaaatctttatctccatctcaaaacaacttgatgacgttgctaacagtgacatcattatttgcgcaactaatgcgaccaattctattttgccaatcgaaagactacggcaaaatgcggtggtctgcgatattgcagttccccacaacgtgcaacaggacgatcttatcgacagacccgatcttctgctgttgcgcggtggtgtagtaaaaactccgtacgacgatggtctggacccccgggtcagagcctatcttgaggaaaatcagctatatgcttgtatgacggaaacgatattactggctctggaagaatgcaccgaacattattcttatggaaatataacgccggagcaggtagataaaattatgcaaattgccgaaaaacatggatttgtgttggctgatgtgaagaaggaatcaagtttgtga

SEQ ID NO: 198926 - DNA, 705 bp, Klebsiella oxytoca
gtgaaaaaagtggttgttgtagatcatgaatttattactggcgataattccgtaaatccggcagaaaacgagacgctgcatattgagttgtcgttgaagaaaaatcgtcgtttcttttctattggcaccctcaatgggattttatccgccaaaactatattttcccggttgaaattgacggaggagcagcttacccggcatactgggatttattgcgcacagtttggttatttgcatccgaattttgacgatctgctggggaagattgatacacagtcgctaaatggaaaagatgggctgtttaatacaatatggcattctaataaaattaatccgtttctgatcacactctcgttaagcaataatctgctggggttggtgtcgcaggaactcggaatgaaatcggattgtgccgcttttcttcgcggtaacacaggattgctggcggcactacgtgaggctcaactgtcattaagttgtaataaagtcgactacgctttggtgattgcctccggaatcatgggtaagatatcgtcagatcaacagaaaatagaattcggttttagcttaatgctaaagcgagaaaacgcacaggaaaattatccacacttacccgattataatgaactgctgaactactatcagaatgaagtagattgcgaaaataatttttcatttgttcgtaagctaatttcagtctgctga

SEQ ID NO: 198927 - DNA, 1272 bp, Klebsiella oxytoca
atgtcaaaagcaaaaaatagggtggtgatatccgggatagggatcataagtgcctggggatattgtcataacaccttctggcgaaatttatgtgctggacgttcggcaataaaacgcttgtcattaacagaagaaacatcattaccggtgagatatggtgcaccggttgactttgagttgcttacagcagcgtttcctcatcttttaccgcccccgggagtcaccgatcgtcgaggagtcatggggttgatcgccgccaacaaagctattaccgatgccggaataaaggaacacgaaacccaagatatgaagatgggggttttcgcctgtagtggtgtagtagaaattcaggaggttgatcgcgcgttatgtgcaggtagtccgtctccattgcaaactctgcgcgataaatacgccgaactgtcacgtttctcaggtttaacctgcccaaatgacggaatggttgtagaaatcgcaaggcgctaccgccttaccggtccgatgagcaatgttaatgcggcatgttcgggtggtagccatgcaattggtctggcttatcgtgccatacagcgtggagaagccgatgttatgctcgctggcggtgctgattcggtattgagtctgcgtaccttgataggcctaaaactacttggtgcaacggcaaccaccgaaaaatggggggaaaccctgtgtcgaccttttgataatacccgcagtgggctagttgctggtgaaggcgcagcattcatgatccttgaaagtgaggagcacgcccggcagcggggagctaacatttatgcggagctaaaaggttatggttcatctctagatgcctggaaactgacggcaccccatccccaagggcggggtgcagaagcggcaatcagagaggctttgtatgatagcggtctccggcaggatcaaattcagtatattaatgcccacggtacctccacacagcttaatgatgtaattgaaacagccgttatccgcagagtttttgacggtagcgcagttcctttggtttcttcaactaaatcaatgacaggacactggattgctgcagctggcgcaattgaagccgtaattacagcattaaccttgaaacataattttgttccgccgacgatcaacctatccactcccgatcctgaatgcgatctggattatgtggcaaactatggacgtgatattcctgtctctaatgccatgagcaattccttcggttttggcggtattaatagttgcttggttatgggagattatgagtag

SEQ ID NO: 198928 - DNA, 1050 bp, Klebsiella oxytoca
atgaaagtttatgtaagtgcaggggcaacactgttaccacaatgttttcgtattgaagacacgggcaaagaaaatttctcaataccgctgcacaatgatggcgatatgtttatagaaaacatgatagcagacagcgattttcagctatgcaatatagacaaaacggtcaaacgtatcagtaatcttcagtcgcgctggttattgcatagtggaattaaaacatggaacgactcaacgataggtgagttcgtgtctccggaggaaagagggatatttctgggactaggaactagtgactctgatgacaatattacgccagttggtttttctgagaaagataaaaatagttatgtcgccaccgcgctaactaatatgcaaccaacaattggactgacgctacttaatacctcaagcgctagccaactggcacagcatttagatatccgaggcgataatgcttttttttcaccgcacagtgatgctggtgctagtgctgtgattgaaggtttttacagtatttaccataagaaaaataaaatagctttgtgtggtggtgtaagccagaagatctcagactggttttatcttagttatgaaaaggtactaagggatagaaactgcctgaacttgactgaggctagctcatttattttaattcataacgatgcagaacatgcatcagctcagttagggcatatacagcgctctgtgattcatgatcaaacacaataccaacgatttttaaaaaaatatcaccatctggcacgtaatcgccttgctctcattcatatcggactaggttgcgataactacgattatctggaaccggatgaccatgtttttgcaggtgttccgtcaattaaacttgagcggcatttgggttacagcggagcggcatcggtattcctcgccatcaattatgctatctaccgacacaataacggcaaagcaaatgccggaaaccagcctcctaacctagctaatcaggtcctgattattaatcacggactacatggaaattgcgcggctatgatgctgaattttaattag

SEQ ID NO: 198929 - DNA, 1272 bp, Klebsiella oxytoca
atgaataatgtagttatcacaggatatggcactgtactgcggaaactattaacgccagaaaaattatttaattttctggctgatggtgagacgttgttgtgcgaagatgaacgtctcaaaaacctggggatttccatggtgcccagcgtggcattgagtgaaaatgaacgacaaattatcgttgaaaggttgcgtcaccgtagcatttttttgcagtatgattcgatagttcaggcgatggcgttaagtgccatccttgatgctatggaaatgagtcagttatccgtcagtgatctatcttcattatacccggaactcttcttcgcaaataataaaatatttccctctctagaggcgctttatgcgcttgcagaagatcaaggtatcgacgctatatttagcgacatagatatagagaaacagtgtgaagtccctcaggcgacagcacttttcagagaaatagcagaatgtttaaattcatccgctcctccgcgaatatacagcgatgcatgtaccgcaggcatgtcagcattacattccgcttttctcagtatccgtcatgggcattgtgatgtagccgtagtttgtgcatctgaagaagcaacccacccgttgatgcaattgttgttcaaaaaagtcggtgctctttacaatggaaaattttcgcaaccgaaggaagcctcgcgagcatttgataaatctcgaagtggctgcgtgttggctgatgcctcagcatgtttaatccttgagagtcagtctcatgcattggcaagaaatgcacgccctctggtagagattaaagggatgtacaggagctccgaagctcacaagatgacgtcatctgatgaaaatggcactaattatctggagacgatggcgagtgctttacgtgacgcaggaattaccccggaagatatccaccatatcaatgcacatggcacttcaacggtcagtaatgatcaaactgaaagcagagctatagcttccctatttaaatcccgatgcccgcctgttatttcaaccaaatcggctcttggacattcgctgggagtcagtggtttgctggaatgcattctctcctgtgaatcgatattgcacgatactcttttgccgagccttaacttccatgaacagagtatgaaagatggcaggatattgatcaacacacaaacccgtcctaatgcccatgtaaaaactgtattaagtaattcatttggattcggcggcgaaaactgtagcgtgatactgacgaaagcaggaacattttcatga

SEQ ID NO: 198930 - DNA, 450 bp, Klebsiella oxytoca
atgaatatttatcttgatacagttcgcgcagaaacagcaaaagtgttatctattgaagaaggtgcaattctcgatgattcatcacttgttaacgatcttggtgccgactctctggatatcatggacctaacatactcgttagcgcaaaaatttaaaatcaccatgcccacagccagtctctatcaacacgctgttgataatctcacggagcaagaacttgctcagctttttgatgacggaacgctcacagcaaagggtaaattactgtttttggatagtttctataaatataccaaacaacaactagaaaatattcaaactattggggatgtttacagcgagactaatattttaaactgggctgcgttatgcaaagcggtcacagaatctgagtcaaagaatgctgatcagctgttaattgagagtattaaactttttttcaaaaagtaa

SEQ ID NO: 198931 - DNA, 363 bp, Klebsiella oxytoca
ttgccgccgattaaccgcatcaacgccggcgaggcccagacggtccgcctcagctacaccggcgtcccggcgctgccccaggatcgggagtctgtctactggttcaacgtgctggaagttccggccacgaagcaggacgagactctgagcaagctgcaggttgccttccgctcccgtatcaagctgttctaccgtcacgcggccctggttgaccgggagcaggtccgggcggggaccgaaggcctgacgtggatggtctggcgccgaaaaccgggcggcgaggtcatcgtacatagcgatcaggaaaggtcagttacgttggtggtaacagcaaaagctcggtgctgttcatcagcctgctga

SEQ ID NO: 198932 - DNA, 216 bp, Klebsiella oxytoca
atgaactccgggagattcatcgaatctcttattgaatcaggtgattatcgaacgcagagtgaggtgatccgcgattcacttcgtttcctgcgcgagaaacaggcagaatcacgtctccagaccctacgggatctactggcagaaggcctgagcagcggcgaacctgcggtatgggaaaaggacgcgttcctgaaaaatagtaaaagctggcactag

SEQ ID NO: 198933 - DNA, 153 bp, Klebsiella oxytoca
atgatcactcaaaaccaaaaaaatgccggagatctgattaatatatctgtcggcctgctcctcaccgaaatgggggtatccgtaataccagatattctccagatcctgactggctttaggtgtgagtttaacgtttttcaccggcagacctag

SEQ ID NO: 198934 - DNA, 972 bp, Klebsiella oxytoca
atgaaacgtgcccctatcattccaaagcatacggcaaattctcagaccgtagaagtcgatgcttcccctgcaccagcagcaccgatggtcgattcattgattgcgcgtgtaggagcaatggctcgtggaaattcaatatccctgcctgtatgcggccgggaagttaaatttacactggaagttatcccggggaactctgttgaagatatctcaacagtctggtcaggtaacgagcgagatcaggaacttcttacagaggatgcacttgatgatcttatcccctcttttctgctgtcaggccagctgactcctgcctttggtcgccggatttccggaactattgaaattgcagatgggagtcgacgtcgtaaagcagccattctgacatcaagcgattatcgtattcttattggcgatcttgacgatgaacagatggcagcattatcccgtctggggaacgactaccgcccaacaagtgcttatgaaagggggcatcgttacgcaatacggctggagaatgaatttgcggggaacgtctctgcattagctgaagcagaacacatttcacgtaagatcatcaatcgttgtatcaatactgccagattgcctaaatcggtcgttgccctcttctcccaccccggtgaactttcagctcgtgccggtgaagcgcttttaaagtcttttacagacaaagaagaacagctaaaaaaacgtgcagaggaactgcatgagcaaaagaaagccggggttatttttgaggctgatgaagtcatatctctgttgatgtctgttttgaaagaagcatccacctcaagagttaatctcagctcacgacaccagtttgcgccaggtgcctcagctttatataagggggataaagtaatactgaatctcgacagaactcgtgtgccggctgtgtgcattgagaagattgaagcaatacttaaggaacttgaagggcaaagatcctga

SEQ ID NO: 198935 - DNA, 192 bp, Klebsiella oxytoca
atgtgcttcaatattgtcctgatcgatatgcctgatgaacgcaagctgtgccggaactccctacagaatgacctgcaggaggatctggcagccgtctgtcaactgatggctgaagacgctgacaatatattggtgctgactggtgccagagatgatggcacctggatatttgagcgtgaaactcccacttaa

SEQ ID NO: 198936 - DNA, 552 bp, Klebsiella oxytoca
atgcgcgggctggctgatagcggagtcctgggcctggaaggtcgtgattctccccgttcagccggtcagagagtgggtctgccgttcagaaatccagtgtgtcgcgaacgaagccctccacgcaattactgggcatgcgcaggcctttcgctgctttattcacgtcgcctgattcccgtcactctcgagggttcctcagtggtccgttttctcttggcggatacgtccggcgtacagccggacgtatccggagtcaaaaaggtcgagcccgtagcggtcatcctctttcgccgtatcggcggaaggcggtgtttcccgcgatacattttatgcccggtagagctgacgccgtggctaaactttagctggggcggcgtgagcaacaagagaagcaacgccgcgctcctcacctgttcacgccaaatatccgcgcattcagcactgattttcgcctgcgctgcggcttgcgatcacgcccttgttcccctcgttgaacacccggttaggttattggtcaaggcgacagccgtatcctctaaccgttttggatag

SEQ ID NO: 198937 - DNA, 501 bp, Klebsiella oxytoca
atgtgttatcaacgaccactccgctatgcagatttgttcttgactttacgcttgagttgttacacgttatcaaaacatatttttaaatatccccatgcgtattatccatacgccgtaaaaatcatgaataaaaatttaatatacgccctgctcataactcattgtttattaaataaaatagccattgcttcggacagcgacaccctatatttcccagttttgggtgtagtatgcgacaaatatttttgcgctaattcgagggaaggtgtgtcattagatctgacaaaacattatcttggtaaaaaagcaagcgaacgcttggcgtcccagggtacttttgaacacggttcatttactttttcgaatggtgtgtattgtgatatcagaaaaagagcatgctacaaagatcgttttttcgatgcagatggtaatccctccgcttgtgtagaagtcacgataacgcagaagctctttccagaacgacgcggctttattgaataa

SEQ ID NO: 198938 - DNA, 510 bp, Klebsiella oxytoca
atgcgacatctggtgttatgtcttgccctgctgtttaccccgctcgttacaggtaccagtatcgaggtgggcttttccccgtcagggacagccctggcgcttgtgctgcggattatcgatgacgcacaggaaacgctggacatggaagcgtattccttcacatcgaaggacgtggccaccgccctcacccgggcagcagcccggggagtgaaggtccgggtggtggctgatgccaaatcaaacagcagcaaatactctgcgctgacgttcctggcgaatcatcaggtcacggtacgcctgaatgaccgctatgccatcatgcacaacaaggtcattattgctgaccgtcgccatgttaaaacaggcagctttaattactccgctgcagcgaacaaaagcaatgccgaaaatgtgctggttattcgcaaccagccggcgctggccagtgcgtatctgaaagagttcgaacgcctctggtcggaaggaaagacgcttactccctcctactga

SEQ ID NO: 198939 - DNA, 1230 bp, Klebsiella oxytoca
atggaaaaagtaaggggaagtatctatctgctttgtatttttctttgtttgatttctttgtcattttcattaattgctccacctatacaacgtgattttttctattatgcatcatatatagcattaataggtatgttccttgaaagggaaaacataaaaattaaaagtgactctattttttactcaattattctaattggcataataaaagttgtgtggactttttttttatatggatatgatgattttggtcatggtaatgttcagatcgatgccggaaaaaaattgatcgtaggtgggcttttggcgatgtatattaaccaatacctgaaaacctgcagttacaaaaactttaattaccaaagggcccttttgtttgttttttcattagcatttgtttttacaacagcctatgctttttatcaaatattaaatggaatggaaagggttgaatttagtactaacagagcaactattgctgcatatatttactccactctgtcgctcctgttggtttatcttttttttataaatgaaatgagctttaaatatcgtgtctttttctcgtttttagttatcttaatttctttcattattattatgatgacaggcacgcgtgctgttatgttttcttatccgtttttggttgtatttgtttttttattccattttcgaagggtttcttttaatttttttgttgtttttagttgtttgtttttattggcttgttatatctcgtatggtggttttattaagcctaagatagaacaaactaaaaaagaacttcaactctacaatcaaggtattgattcatcctcattaggttcgagattttctttatgggttgtaggaggagaaattttcttaagtcatccatatggtaatactttagaaaaccgaagaaaacaagcagaggaaaaaattctcgatgcccctgaaaatcagacagcgctgatatatattgatactcacctgcataatgagttactcgaatcggcttctctacaaggagttgtagggttactatctgttcttgcattttatttaagtatgctaattagagctataagacgaagactcactcctcttcttattgtttcgctttgcatgattgtttatggtactacagacgttctcttaataagcccggagtcgatcatgtttttcatattgacgttggcatttttctcaaggtttccggtttctatgaggtccctggttactgaataa

SEQ ID NO: 198940 - DNA, 924 bp, Klebsiella oxytoca
atggaaaaacaaaatatcttcttaagtattataattgctgctcataacagcgattcgtttataagagaaaccttatgtagtttgttagatgccttggggaaaaatatagttgattgtgaagtaattatgataaatgatgcttctacagataacacaggagctattctaaatgagtttgtaagtaatttcccacaagcaaggtattttgaagttaactttaaaaatataggtaaggtcagaaattatggggtatcaaagtgttgtggtcaatacataactatgctcgatagtgatgaccttttgaaaaaaaactcattcaacgaaatactttcttttttgaaaaaaaagtcaccggacttattattgaataaactacatgaagtgcgggatttgacaataactgatacatcctggaaaggattgaaaccagaaagactcactattgaggaagccatctccagatttcttaagcataaggacttccagtcacatttgatcggccagttttttaagcgaagtataattcagaatgtttcatttcctgaattcgaatgttacgaagatttttatatctttccagagctattgaaaagatcaaaggttattttttactcaacagaaagcaattacctttacattaaaaggaatgctagtttatccaattcaccttcaacagaaaaggtactgaatttaatctcatgtcttgagggaatggaacgagcttttgagcaaagatattatgacctgattctatgtcactggttagatctcagattaaagcgaatggaatggatatcaaacccagcacaacgtaaatatgttgaaatgaaggttcgtcgcatttatagaattagtttttttgtaaacccaatggttcgtttcagctataaaagaaaggcaattgagttattatggaaaaagtaa

SEQ ID NO: 198941 - DNA, 1095 bp, Klebsiella oxytoca
atgtcatccaataaattcaaacaagaactgatatcgggaatcataagaggctatcgtttcttcacttcgaatagaattcgtcaacataatgaatataaccctctagaagttagaaaaatcgtcatattctcaactacagctcttggcgattttatgtttaatacaccatctattgaatccttgaggaagagttatcccgatacagagtttacattggtttcgagccataaaaatcaaactctggttgaggatagtacatggttcaatgaagttatttattgggaccaaaaaataaataccttgttaggtgtagcagagtacctgagagcaattaaacctgatgttatagtcatacttcattcaaaaagtccgtatgatattctttgcgccactctgagtaatactcgttttatcttcaaagatgcatacaatgaacatgatttggctatgcgtaaatgggtaacctttttaaccgagccaaattttgatggacatattattgaacgtaaattatcgttagttaaaagtatggggggcacaataaacaacattcaaatgaaattaccctgcacaccaagaaaaattaatcgcagtcaagataaaatcgttataggttttcagcttggtgcatctgaaagattacgtcaatggcctgtaacattcttcagaaaattagcgcaactattactattaagagatgataaatatgaggtagcgcttattggctcaccaaatgaaagagctttgtcagagcaattctttgaaggtctaactgaaaatgaacggtgctgcataaaagattatatcggtcgtagctcgcttaaacagctggttgagagaatagcagaatttgatttattgattactggagatacaggacctcttcatcttgctgtcgctcttcgcattaaaactgtaagtctatttgttacggctaatcctgcccatacaggcccgcttcaggatccatcttttcatacaattattagaggatgccctgttgaggcagaattacttgatgactttcccgaggagccgatggcaattattcaaccagaaacagtcttggcggctatacttaatatttttgagtaa

SEQ ID NO: 198942 - DNA, 270 bp, Klebsiella oxytoca
atgatcattgacaatggaaggctagaaaccgaacctggagtaaaaatcgctggcgtcatcattctgggcatggaagataatccccccttacagtttcagcgtgctgagatagcagagagcaagcagctctgccggcaggtggattttcatgaaatcgcgggcagtatccggctgggtcagaaactgccggaacgtctcatcatgaggagtgggggtacggtttttctacttcatcggctcaggctccgaaaaacatcctggctatggtaa

SEQ ID NO: 198943 - DNA, 909 bp, Klebsiella oxytoca
atgcgttttttggctgtatctcagaattcagtatattcacatcatattacctctttattacatgaggatggtcatattacagatatacaggaccagtccctttcacctcttacaggcattagctcatatttaaatgattatctggtgacggctataatactggattttcaggatgtatcaccagatatagcatatcgcctttatgcagagtgggaatatatatgtgggtcggggataggtattatggtggtggtgccagaggagaagcaatccctgtttcttagtcattctctggcctgcggtgtccatgatgccggttcggatgcccgtctgctgaaagccaggctctatgcccttgtgcgcaggaaacaaaatttttactctgatatcctgtctgttgctcctgtaaaaatggatttaatacgcaaagagttctcgatatatggcacccaggtatatttaacaccgtttgaatttcgggtgatggaggaactgttgcgtaacagagaacgcataatgagtcgggatatactcctgatgcatattttccatgatccgccgggacgcaataaaacactttcactgaatgtgatcgttggacgattgcgaaagaaaattcaccctttgttaaaaaagaataatgccggaattgaagttattcggggaatcggatatcgctactccagtggtccttcatctcctgtcccggatacccgaacacgctcaaaacggaagcgatatcaggccaactcaccccggaccgcaacagaggccggatggcgttggttcaccccacctttaccctgtttgttaaagtctcagccgacagaaagaatcagtccgggaacacaagaccaccagtgcatactgatgaccagagaaagtttcaggaaagggattagtgcctga

SEQ ID NO: 198944 - DNA, 243 bp, Klebsiella oxytoca
atgaaagaccattttatcattgcatgccgtgattacattgtaaataacaaaaacaaacgtccgcacaagcgtaagcccgccgagatcattcctgctgaactgatcgcacgccgcactcgggcacttgggaaaattgtggtacgcgcagagcgccgtcataaacccgttcgtattccggctatgagttgcgcagagctggggcacttcctcacctcaacggaacaaaaccgtgtaagcgcatga

SEQ ID NO: 198945 - DNA, 423 bp, Klebsiella oxytoca
atgggcgatatggttttttacccgaaagggcagttgttttttgaggacgccattcacgacggtaagcagttggtgactcgctacggtaaacagccgctggatgttctgaacatgcagggcgaacagtacgtactggtttcccgtaatgaggcaattgaaatgatccgtgaagccgcgcgtaaaccagttgaagaaatcactgcggaaatttttaacgaccagcttgaggtgatgccgcctatcgactggtacggaaaaggagacgatcagtcattcaaattagctgagatgcacgcggaggacgtgaccgatatttacgcctattaccgtggccgctacttccgttttcgtgaccgcgtgagcatgaaacatagcgaaattattcaacggatagtggaggaggtgtacgcaaagcagaaataa

SEQ ID NO: 198946 - DNA, 234 bp, Klebsiella oxytoca
atgaacaagcatcgacttttactgcagctgatttatccgggccagctgagcgagaaatttccggaccaagttccacgtcaggttctgatccagttttaccaggatctgtgccggaacggcgttagccttgatttttcagagctgtcagaaatggtgaagggccgccgggagccgagtgattttcaaatttctgaatggagcaaagccagaaatttttacaacggtcgctggtag

SEQ ID NO: 198947 - DNA, 258 bp, Klebsiella oxytoca
atgaacggctttgagttgggcctctggcgaagaggaatgatgtggagcatggaacgtgcagctgaagagctgggtgtgagcttgcgaacctacaaggattatgaaaattcgccgaacataaagcgcagtgtcgctctggcaaccgtgaaattatcgctccgggaacaaatgagccatcacgcccggaaccagacaagcggagaagatctgcgctttatgatcagcgcaatgattgctgataccttgcgcagcagctga

SEQ ID NO: 198948 - DNA, 297 bp, Klebsiella oxytoca
atgaataacgtacaagcacaaacagctgcgtcaattcctgagctggtctcgctgataatagaggctgagccggtagagggcgcagagatgaataatgctgaacgatcagcactggctgcggaagtgttatgtatcttcgcgaggagaacgggacaggcccgcgatggggagcctgtcgaaaccatcatggtggatctgctggcgaacctgatgcacctgtgcgaccgtatgagtattgatttttcgggattgctgccggttgctgcgatgcatcatgatgatgagcgtgatacctga

SEQ ID NO: 198949 - DNA, 333 bp, Klebsiella oxytoca
atgacaaaaaaattagcagtagcggaaggccttgaaatacttgcccgctggcttgaggacaatatcaactgtgaaaccgacctgattttcgacaacccggaagaaggtacggattccgctatgttactgccatgcattgaggcggcactggcgctcattcatgccgcggaggaaaatcagacgctacaaatccgggcgcagggtgatgcgaaccaatatgttctgttaaagggaaaaagttggtttgcccaggtgctgatgaatggcgaaatgaccgttacacagcaggaacagcaccttaaagcgatgattgccggagtcaccaatgaataa

SEQ ID NO: 198950 - DNA, 501 bp, Klebsiella oxytoca
atgaacgcatccaccactactgcccagactgaacaggttacaagctttgaaattacacacccgcgccagcgcctgaatttcatcccccgtctgtttgtctccccacttggcgatcagatggctgctaacttcctgcaacgacacagcaattatgacggtggcaagtggcgatactttgaggttccccgtggcattactggccagatcggaggatggacggaaattgccacaacccgccctaccgggtatatcacgccgcctgatggcacatatcgcctgaccatccccggtaactactttgacgaggaagtttctgcggatgctgtggggatcatcgcaacgctttttgtgctcaatttcctctcatgcaagttattcgaaatgggtgaagagtatgcaatgacgtgtcaggggcttgtcgatcgtcaggatgcgcttaaggactatgtcagcatcatcaaacatccggaaaagagccagattttccgtgcaattgactga

SEQ ID NO: 198951 - DNA, 393 bp, Klebsiella oxytoca
atggagcgtgctcggcagcgggccagtctcagcggtcataagtacagtgtgaaaacgcgtcgccagtgggaacggcagcgcgagcaggcagcaatacagtatcaccgtgttgtgcagctggccgccattgaccttaacttccaaagtcctgacacattctgtcagtggaataagcgacatcaggagctggaagaggctggatggctgggtatgttctggcactggcaggctcgctttccttccctgcgggagctggactggctgcgctacagccacgatagcatagccgcaatcgtcctgaatctggcagcgattgtcagggaaacacccgaagtgatccgggcgcaggaaaagctttatgtgccgaataaactggagtatgcaggtcgctga

SEQ ID NO: 198952 - DNA, 1305 bp, Klebsiella oxytoca
atgactaaccagaaccacgaatttttctttgagttcccggctattcaatgccagcagggtggacgcgtgcagtacatgttgtgcgcaccgatgaacatgctgaagcgtattatggcgtttgatgacgcaggtgatgtgatgtcccgttcccagcgcgaggttcatctgggccgcgctaaaaagatcaatcgctacctgacgaccggctatgaccagaaaacggactacatcgtgccgacgctggttggtaacatcgacgggatggttcgctttgaagaggccgcgggagttaagggcggtctgggaacgcttttcatctcgatggatgcggatatccgtttgtttgacggacagacccgttcacgcggcatcattgactatatcagcgcgcgtaaagattctccggataccatcacactactgctcactgtggggctgcctcttgagacgcgccagcagtttttctccgatatcaataacaatgccagcaaaccggcaacggctatttctatggcctacaaccacaaagatcctcttaacgctctggttcgccagattgtcagtgacacgcctgcgctacgcggccgcgtagactatgagcataacgttgtgccagccaaaagcgatctgctaatcagttttaaggcgcttcacgatgcgacccgcaaaatgtttggtctgcgggcaggtgatgaaattaccgatgcgctgcgcaatgacgcattgcgcctctggaaagcgtggagtgttgcgctgcactgggaatggctggcagagaatatcggtcctgcaatgtatcgcacgcgtcatatcggtacgcacggcgttatgatcaacgccatcggcatcgcaactgccatgatgcttgaaaatcatgatgccggagccattgccgaaatgctcaatcataggacaacagcctgtattgaagctcttcagccttttgcccacgcggagtggtacggcgtatgtgttgatccggagaccgacaccatcaaatgcgatacacaggcccagaatcgcgctgccgaaaagctactgaacgtgtttggcatgagtacggaacatcctcacgcctggttgcgcccttcttttgctgaggacgtcagcgatgaacaggtcgcagagatggctgaaaaaatcgcaaaggtggcagaggaaaaaaagctcgatctggcaatactgaaaaccgcactaccggaacgccttgcgctgtcagagacgtcaatgaaacccgtatttgccaacatgcgccgtctgcgggcgtggatgagcgaacagttcccactgaccgagcaacagtaa

SEQ ID NO: 198953 - DNA, 1608 bp, Klebsiella oxytoca
atggcctcacttaagacacttttacagctaccgcgcgggtggcaaacctgccgacagattactggtgctgatggaataactctccatctccgcgccacacgtaaaacggcatcatgtcctgagtgcctcgcgcgcagtaattctgttcatagttgccggcggcggcgaatacagcatcttccatgctcaggccaggccctctggttagtcttcgccatccggcactggtactgccgtaacccatcctgttcacgtaaaatttttgctgaatcgcttgctccctttgcaggtccgcagcagcagtcttctgcattgctgaaaaatctgcagcttcagctggggcttatcgcaggtggtgaagcagggagacgagctgcagtagcttcaggaatacagatcagcgcggatactttactacgcagagtggttcaggctccggaacaaacagagaaccggaccaggcatgtcggtattgacgagtgggcatggcatcggggccacaggtacggcacactgatcgtaaatcttgatacccatcgccccctggtgctgctgccaggccgggagcaacgcactctggcggcatggttcaaaaaatacccggagatacaggtcgtctcacgcgatcgtggggggatctatgcgttagctgctcgcgatggtgcatcgcaggcaatacaagtggccgatcgctggcatctgctgaagaatattggtgatgcgctggagcgcatgatgtacagacacatgccattgatacgactggtagccaccgagttatcccccaaaaagcagaacactgaagcgtctttggtgccaacttcaacgttacgtcgccctgaacgtattaaacgagagcggcgtgataaacggtatcagcgctgggctgaggtagactctcttcataaaaagggttgtgggataagagaaatatcacgtatcaccgggctgtcccgagtgacggttcgccggtggatacagtcaaaagcgttccctgaaatatcaactaagccatccagacccgggctacttgatccatggcaggagtggctggaagaacaacggataaatggtaaccataatgccgggcagctatggcgggagatggtaaatgttggcttcacagggagcgaaacgacggtcagggatgctgtggctaagtggcgtaagcaggttaacagtcccgttatcgccccagttcgactcccctcagcatccagggtaagccgctggttaatgccctggcgaatgatcagaggagaagaaaactatgcatcccgcttcatcgaatcgatgtgccagaaagaaccgcaactgaaaatggcgcaacagctgtcgctcgacttctatcgaatgctgaaaacgaagaataaatctcagttaaatcaatggttctctgacgtaagtcaaagtgggctcattgaccttcagcgtgttgcggccagtatggaagcggatgcaacagcaatacacgaagcgataagcagcagatggagtaatggcgttgtggaaggccatgtaaaccgcctgaagatgctgaaacggcagatgtacggtcgaggtggcttcgagttactgcgacgacaagtcatgagccctctggcttaa

SEQ ID NO: 198954 - DNA, 945 bp, Klebsiella oxytoca
atgcgttttttggttgtatctcagaattcagtatattcacatcatattacctctttattacatgaggatggtcatattacagatatacaggaccagtccctttcaccaattacaggcataagctcatatttaaaagattatccggtgacggctgtaatactggattttcaggatacatcgccagatatagcatatcgcctttatgcagagtgggaatatatatgtgggtcggggataggtattatgacggtggtgtcagaggataaacaatccctgtttcttaaccattctcttgcctgcggtgttcacgatgccggatcggatgcccgtctgctgaaagccagactgtatgcacttgtgcgcaggaaacaacatttttactctgatatactgtatgttgctcctgtaaaaatggatttaaagcacaagaaattctctatatatgataccttgatatatttaacaccgtttgaatttcgggtcatggaggaactgctgcgtaacagagaatgcataatgagtcgggatatacttctgatgcatattttccatgatccgccgggacacaataaaacactttcactgaatgtgatcattggacggttgcgaaagaaaatccacccttttttaaaaaagagtaatgccggaattgaagttattcggggaattggatatcgctactccagtggcccttcatctcctgcaccgggtaccagaatacgctcaaaccggaagcgatatcaggccaactcaccccggacagcaacagaggccggatggcgttggagtataccatccttacccattgcgcttaagatcacgtcagataggacagaaaaagtcagtccaagaacacaatactggactgaccccatacctgtagacaaattctgtcctcacgacgaggcctgttcgaaggcctccggactgacgccgccgaggtga

SEQ ID NO: 198955 - DNA, 129 bp, Klebsiella oxytoca
atggcagataaagttaccgaagccgccgttgtgggtggcgtggatacatataaagatctgcacgttgccgctgtcgttgatcagaacaataaagtcctggggacccagtatttcgccataacacgataa

SEQ ID NO: 198956 - DNA, 795 bp, Klebsiella oxytoca
atgcggtttttaatcgtatcagagaattctctttactcacatcatattgcctccttgttccgtgaagatggacattttgctgatattcatgaacagtgtctgatgccagtactcggtatcagtgcgtaccttaaggattatcctgtcagtgggttgatacttgatttacgatcagtatctttagaaacggcgtgtcgtctttatgttgaatggaagaaaatatgtgaggataaagcttgtattttacctgttgttcagtcttcgcaacattccgtaggcttgttaaattcaggtgcagattgtgcacatgagtattgtattaatgccagattagtgcttgcaagggtctacgcacttgtacgacgtagacaaaatatatattcagacatattccgtttaaattcgctggaaatagatttggtatcaaagcgtgcttgctataagggacgtgatctgaggcttacaccatttgaataccgaataatggaagtgttattgcggaacagggatcgcatcgtttgtcgggatgaatttttgctgaatttattccccgaggcaccagacaatgaaaaaacacgctctctagaggttatccttggccgactaagaaataaattacggcagtgtactgatatgagaaatggcgggattgaggttatcagaagcattggttaccggctttccattagttctgaaatatcagcgcagaataagatagagcaacatagaagaggccacatgtgcatcatagatcgtcgtatggctatacgggcaggctggcgttggttttgttag

SEQ ID NO: 198957 - DNA, 474 bp, Klebsiella oxytoca
atgggcaatctatattctaccatgatggctggtcttgaactaagcataaattatgatcctttaaaaggttttatccgtggcttcaaagcaatgagcaatcgtaattatggtggagaggatttggggcgtacaggttatattgaagctggtcttagttcttattttcctcttacaccgacactcagcatgaaaatggaaacttatgcaacctgggcagatcgagaagatatgatgtctcggttcggagttacgcgtcaacaatcctcgcactctcaattccatgctcatcagataggtggcggtttaaaaagtgttagccttgagatggggctgaactggcagcagagtgagaatataacgttttcaggtggtgttggtctgactgccttgacatcatcagatgtaagagatagcccaattactcagaaaaatgtcggtggagttataaatctgagcaagatgtatacattctga

SEQ ID NO: 198958 - DNA, 342 bp, Klebsiella oxytoca
atgaaacgtaaaccggtttttctgtcttcattacttattactatatctgcttttatcagccctttcgtaatcgctgccaaggcccgtgaatcttcagtaagtgtaggtattgatatgacatcagcgccgttatatgaaggttcttcctcttattcagtcttgacacttcctgccgttcaggctgtatgtgttactaacaacttggggattttcacagcgcgttttcctgatggcttgcgctgggatttgccagtgggggagcgctttggtgtcgcacttttaagtcattatgatattgggcgtaaagagaaaattcgtacacttaatggtaagaacatctga

SEQ ID NO: 198959 - DNA, 870 bp, Klebsiella oxytoca
atggataagtttatcgacgtcgccattgataaaaaggtaggcgtttctttaccatttttttattttttctatgttattgaaggtagtgttagttttgtgattaatggtagtgaaatggtcactgttaccagtaatcaaggtttgcttttgaaacctcatattagtctcgattttgattttaatgaaatgaatgaggggcaggcgaaaattagtattgctaggataacctcagatgttgtgagcaaatttaactatcttaattattttagaaatggatttaatatagagcaagttaaatattcaggacaaaaaaaaagtgatttttgtaaattcgattttagctattataccgaatcagaaaaaaatatccttgacagtctgactgtttctattgagcaagttaacagctcgttgaacaggaaacttggttcacgagatgaaggtgtacttttctatgagtatattttactgcttgaaattttgtcagttaataatatagcagtagaatcaatgctccataatgcaacatccgagactatttcagagcgtgcggccagagtggtaatgaacaattacagtcatacatggaatgtcaaatctcttgctcaagagctgaatatgagtgagtcgacatttaaaaagagaatgtataaagaggtcggttcagttaatgagttcgtcaataaactgaagatagtcgaatctctgaaacgtttacgcagaacgacagattcattaactcagatatcaaacgatctcggtttttgttccagttcatatttcacacaggtatttacaagacatataggcgtattaccttcccgtattagagattatttcaataactcttcttttaatgaagaatcttaa

SEQ ID NO: 198960 - DNA, 1503 bp, Klebsiella oxytoca
atgtgtcgctcactaatcattgtgtgggtaggggtatacgcacttttttggagcttggcaactatctttcttgatcctactgttccctacgatgccgttgaagctctcaattgggcgcaaaatgcagagtggggatcgccaaagaatccttggttgattggcctggtatggcgacccgcactgtggttctcaggtactccgctaagcgcttactggtacatcactcattttgtatgtattgctgtggggatggccggtagctggtatcttgcgaaatacctgagtggcagcgaacctcttgcttggcttgccctgcttaccctcaacctttcagggatcattaacttcgacatcataagttataacgataactacctgttggtcatgctctggccatggatgctgttgtttttttatcatgctataacccgtcatgccggatggtggctggcatttgccatcaccgcagggctggctgcgatggcaaagtactcaacgctggcttttgttggcgccgtttttattgcaacgattattgtgccgaaaatccgcgtgtgttaccgccagcccctcttttacctggcgctgattataggtgttgctattcttgctccaaatttgctgtggctatgggaacataattttgttgccttccactgggtggattcacagataacacgtcaatttaaccctggattattcattaaattattaagtatttactacccactgctattcttatggtggagattgcgcagcagccacattcagctcagctggcctacagatacacaaaaaaagacgttgttactggtcgctgttatgccattagcgccaatttgtctctggttcctgtttcatcacggcgggagattgacggaatggctacagccatttttcatcctagccccggcgctgcttgtcggatgtgtctctactcacgatgctcagccacccagaagtgccggtattgcgctgataggcattgcagcgctggtgctgctgggatacatcactatcatggccacgaacgtgggtaatgccgggcaaaaaatgagtggaattatcacgtttagcaaaaaaatggaccagctatggtatgaacattacggcacacctttaagactggtgggaggagaacatctggcggactggattctgttttacgcgccatcaagacctaaaaccattaccccttggagcaatagcacacaacctaatatctataacgttgatatcagttatgcggagattatgagttctggcgccttacttgtgggtcggtcagataaaacctgcaccgacgcttcgtttgacaaagtgttgacacagtggccgcagttaaaactggatacgattagcctgataacctttcaacaggacaagcagcataagggctattcgttatgcatcggttttgtaaaacctgaactgtatatgcaagttcatgaagatgtacaagtaaacctgcgactgaatcgcgtcagtgcttctgaagtctaa

SEQ ID NO: 198961 - DNA, 363 bp, Klebsiella oxytoca
atgaatatcgtatttctgggtattgatctggctaaaaatgtttttcagctctgcgggttaaaccaggccggcaaaccggtttatacgaaacgcactggccgaaaagaattgctccagacgctggcaaatattcctgcatgtctgattgggatcgaagcgtccaccggggcattttactggcagcgtgagtttgagaaactggggcacaaagtaaaggtcatcagtcctcagtatgtaaaaccctttgtccgcgggcaaaaaaatgacggtaatgatgcacaggccatcgcagtggctctgatgcaaccgacaatgcagttcgtgccaccaaaaagcccggaacaacaggatatccaggcttaa

SEQ ID NO: 198962 - DNA, 498 bp, Klebsiella oxytoca
atgcgcagaacaattgcagaagtctatgatctctttaacgatctcgagcgtcggatccatttttttgataaggaaattgaaacagtattcaggcagtcagaagcctgtcagcgtatagccaaagttaaaggcattggccctaaaacggctacggcagttgttgccgctatcggcaaaggaactgaatttaagaacggccgtcactttgctgcatggcttggcctggttccgcgtcagcactcaagcggcgacaggctggtactgatgaatatgacaaaaaagggcgacaagcatctgcggtcactttttattcatggtgcccgcgctgtcgtcagggttgccacgaataacaatgatggttatatgaatcagtgggttaaccagttaaaggagcagcgcggttttaataaaacgaccgtggaggtcgctaataaaaacgcgagaataatctggtcgatgctgagaaatgaaaccgagtatcagatagtgggcagttaa

SEQ ID NO: 198963 - DNA, 351 bp, Klebsiella oxytoca
gtgactattcctgctaaagttattgattatgtagtcaaatggatcgataagaacttagaccaaccgctgcggattgaccatattgcactctattcaggatattcgaaatggcatcttcaaagactttttttgaagcataaaggcgagagccttggtagatatattagaaagcgaaaactctttatggctgcacaggatttgagaaatacggatgttaagatctgtgatatttcaataaaatacggctatgaatcacaacaaactttcactcgaatttttacccgtacttttcattatcctccaggcctctatcgccatatcaataaatcagataaagatttatctggctaa

SEQ ID NO: 198964 - DNA, 558 bp, Klebsiella oxytoca
atgcaatatcatataatttctgatgataattattttctgctgggcgccaaaaaattccttgcagatttaaataaggaaattacatatagccaggcagaaatggtattaaataaatttatatcgcggcataatgacatagttattcttaacatcaaaaatgtatttctaagagaaaagatttttcttgagccaaaaataaaatgttgcagacttattattctaatggaagaaaatactatagaaaggagagtagaaaatgattgttttccatgggtagcagcagataatatttctgggtcatcacttctcgctattttggaaaaagcagaaagttcgccttttgtgaagaataatgttactgagttggaatgtttgttatttcaatatttggtggaaggttataggttttcgtggatggaaaaatggtttgggttagaacgtaaatatctctacttacaaaaacaacgcaccttaaaaagatatggaattcggattgggcaccctggtggagtgcttatttttcgggatataacaaaagtgtgccccttagtgatctaa

SEQ ID NO: 198965 - DNA, 798 bp, Klebsiella oxytoca
atgcgttttctgatcgtatcagaaaattcggtatattcgcatcatatagcctccttattacatgaagacggccatgttaccgatatccaggctcagtgcttactaccaataaccggaattggagcatatttaaaagactatccagtaagtgctgtgattctggattttagaaatatatcagtagatatggcatgtcgcttgtatgtagagtgggagtggttatgtggatgtgagacaagtattatgcctattctgcagactcgcaaacagactatttttttgaatcactcccaggcatatggtgtacatgagtcttgtggtgatgctcgtctgttaagagccagattgtatgcactagtccgccgaaagtctaaaatttattctgatgttatataccttgatcctatcagaatggatttagtccataagcaattttttataaacgattctcaactaatcttaaccccctttgaatttcgggttatggaggaattattacgtaacaggggacgcattatgagtcgcgacagacttctactctgtctttttcctgatacacctgaacaaggtaaaatacgttctttagatgttatagttggtcggttgcgaaaaaaaatacgtccttattttttagggaataatgaagggattgaggttattcgaggtattggttatcgctatacagcttactccggaaataataaagttgttagtgataagcaccagagaagacagcgtaggaaaattattgagccgcaaatttcagcaggagttggatggcgctggaccgtatcataa

SEQ ID NO: 198966 - DNA, 825 bp, Klebsiella oxytoca
atgaagcggaaacctgttgtcttgtctgtactatttttagcaatatctggtttgatgagtgtatctgcattagcaactgagaaatcagatttatcggtgagcattggtatcgatatgaatactgcaccgatatatgaaggcgcatcagcttattcagtgatccccttacctgcaatagaggtagttggggtaacggaccgatggggtatatttaccgctagttttcctgatggcttgcgttgggatttaccgacaggagatctgtttggtattgctcttctgagccattatgatatgggtcgtaaggagaatattcggacgctcaatggtaaaaataaacgactggaggggatggggaatctagatggtaccctgatggctggccttgagttaagcgtaaattatggtccttttaagggctttgttcggggttttaaggggctcagcgatcgtgaatatggtggtaaggatcttggccatacgggttatatggaagtgggcctgaattccttatttcctttaacatcaaccatcagtatggatgttgagacctttgcaacatgggcaaacagagaagatatgatgtcccggtttggggttacgcagaaacaggccattcattcacaatttaaagaacataacattgggggaggtctgaagagtgtcactttgcagtggggactgaactggcaattcgatgagaatatctccttctctgggggagctgggttgataagctatgccgcatctgaaatacgtaatagtcctattactgagaaaaatgtagatggaaatgtctttttaagaacgatgtacatgttctag

SEQ ID NO: 198967 - DNA, 555 bp, Klebsiella oxytoca
atgaaatttaacaaacttgctctttctgctgttatcgcttccgcgtgcttcgcttcttctgctatggcagctgatggcaccatcaattttgaaggcgagctggttgcaaccacctgtgacatcaccgttgacggtcagccttctccggcgctggtgaccctgccgactgtcagcgttgccaccctggttgctgcaggtcagacaaccggtaccaccggtttcaccatcggtctggagaactgccagggcgtcacggcgaccaacaccgcggctgcattctttgaaaacggctctaccgttgattttaacagctataacctgatcaacaccgctgcggcggctaatgctgcaaccaacgtccagctgcagctgcttgatcagcaaactggtaccaaaattaaagtgggtaactctgatcaaaccgtcaacaccacgcgtttcgatatctccagtggctcgaccgtgctgccgtactctgtggagtattacgcgaccggtgccaccacgccgggtctggtagaaagcgccgtgaacttcagcatcgactaccagtaa

SEQ ID NO: 198968 - DNA, 705 bp, Klebsiella oxytoca
atgaagatcccacttttttcccgactgcttctcctcctgatggtcagcctcgcgctgccggcacatagcgcaatcgtcattaccggtacgcgggttatttacccggcagccgagaaagaagtatcggtcaaaatgaacaataacggttcgggtccggtattgatccaggcctgggttgactccggtgacccgaagtccactcccgaaaccgcaaaggctccgtttgtcctgaccccgccgattaaccgcgtcaacgccggccggggtcagaccctgcgcctgcgctataccggcgaggccctgccgcaggaaaaagagtccatattctatctgaacgtgctggaagtcccgcccaaggtggcgaatcccgataaacagaaccgtctgcagatggcatttcgctcgcggctgaaggtctttttccgccctgccgggctgtccaggaatgccgccaccgaggcgccatcaaaagtgatctggacccgttctggtaaccaggtgaccgcccgtaacccgacgccgttccacattaccatcgcttatctcacggaagacgataagggcgacaaaccgatctctgagggcggcatgatggccccgggcggcacgcagaccttcatcctgacgaaatccgtcgcgacattttacccggtggtgattaacgactacggcgctctgcggccgctggatatttccaggaaataa

SEQ ID NO: 198969 - DNA, 2520 bp, Klebsiella oxytoca
atgaaagcctttgcctcctttattcgccggccgattacctgtgcgattgccctgttctgcgccccactgtatgccggcgagacagtggagtttgagaccgtgtttatgagccggggcagccagcaaaaactcgatctcagccgatatgagcagaaccaggccgagcccggggtttaccgggcagaagtgtatgtcaacggcgcctctcgcggcgtgaaagatattaccgtcacgctccgcccgcctgaacggcgcagcgaaatctgcctcgctccccgcaccctgctcgacatcgacctcgatatcgacaggctgagtcctgaggcgcaggcgctgctggcgaacagcaacgagcacgactgcctggggattcaggcggtgataccgcaggcgaaagttcagttagacaccggcgagcagcggctcgatctggagatcccggcgctgtatctggtgcgccacccccggggctatgtcaacccggcgatgtgggacaaagggatcaccgccgggctgctgagctacagcgccagctactaccgcaacgaaagccgctccggcagttcggacagcgcctataccggcctagccggcggggtcaatatcggcggctggttcttccgccacaacggtagctggagctggcgggacgagaccggcagccactaccagacgctcaatacctatgtccagcgggatatcccgcagattcaggggcgcctgacgctcggcgataccagcaccaccggggagctgtttgacaccctggcctttcgcggcgtgcagctggcgaacgaagagcagatgctgccggactcacaacgcggctacgcgccgctgatccgcgggacggcaaccagtaacgcccgggtgcaaattcgccagcagggacggttgttgtatgaaaccaccgtgcccccaggcccgtttgagattaacgatctgtaccccaccggctacggcggagacctggaggtggaagtgcaggagtccgatggcagcgtgcataaacagacggtgccgtttgcctccaccagtaacctgctgcgtccggggacgaaccactacagcgccacgctggggaaactgcgccaggggtgggtcagcagcgagccctggctgggggagttcaccttccgccgcgggctgagcaacctgtttaccggctacgccgggctgcagggcaatgaggattaccaggccgggcagctgggtgccgcggtgggcacgccggtgggggccttttccctcgacgtgactcatgcccggaccgcgctgaaaaagccggtggatgggcacggccgcagtatgagcggccagagctatcagctgaaatacagcaagtttatcgcacagtcggggagcaatatcagcgtcgcggcctaccgcttttcgaccgacggctacctggattacatgacggcgatgcagctgcgggacagccagcaacagaacgggcaggttaacacaattatgcggcccaaaagccggctggggatcaccgcgagccagagcctgccgcagggccaggggagtttctggctgagcgcctatcagcagaactactggaaccgggacgacagcgatcgtcagtaccagctggggtattcgaaccagatggggcgggtcagctacagcctgagcgccagccggagccgcaacggcagcggcgattttgaaaaccgctatatgctgaacctgacgatcccgctgggcggcggcagtccgttccgccaggtgagcgtgaacctgaaccatgaccccggcggcgtcgtgcgggagcaggcgacgcttagcggctcggcgctggaggataaatcgctcagctacagcctgagcggggcgaatgcgaataaaggcggcaataccagcgttaacggcagcacctcgctgcgtacccgctataccaccctgcaggcctttggcggcagcgggaagcattatcacaactactcgctggggatgagcggcgcggcggtgctgcacagcggcggcctgacgctgagcccgtataccggcgaaacccaggcgctggttgaagcgaaaggcgcggagggtgcgacggtgagcggctattccggcatcagagtggacggccggggctacgcgctggtgccgtacctgaatgcctaccagctcaatgaaatcagcatcgatccgaaggggatcccggaggaaacggagctggacgagaccagccagaaggtgtcgccgtaccgcggcgcggtggtgaagctatcgtttggcacgacgcaggggcggccggtgctgatctccctcgccggagggccggaggtgccgttcggggcgaacgtcctggatgcgggcaataacgtggtgggcgtggtggggcagaataagcgcatatttgcccgcgtggaggccgatgaggggcagctgtttatccgctggggcgaagcggcagacgagcgctgccgtcttgcttaccggttacctccggcagtaaaaggcagtgagacgacgtcggtcactgcgcagtgccgggtgataacggactga

SEQ ID NO: 198970 - DNA, 1317 bp, Klebsiella oxytoca
atgaagaaactcacgaaatattgttcttatatcgccggcgtgtcgcgggcgttatcaggaaagcaacgggcaggtatgacgggcaagcggcgggatgatttcagagtaagacccggaatcatgttttctctcgcgtcgttgctgttgttgtcgctgctgccgggcaggacgtttgcgggagtaaactgtactgcgaattttacagggcgtacgacctatgtcgattataatgttccgattattaccgagggtatacagatttcggtgttaaaaaataaacccataggcgatgtggtctggcagcagactattcttaatccggacaaaagcccgatagggtttagccaatgcgcctcatctgaggacaacacccagaggattcttcatacttacgttattgacattgaaggagcaatgcctgcaattgtggggcaatggaaaggacttaatgtttatgataccggagttcctggaataggtcttgttatccgaggaggaagatatggagatttaaaatatccatatatttctcaaggttatgatggtagttctggtccgccgccgcaaggaacaacaaatacttcagtagcatttactgtaggtaatgaaagtcttaacatggagattcttttagtgaaaactggagatgtcccttcaggagtatggaatcttcctataaggctcccggcattcactctccatgtagatttcatggaggatgaatcaggccctgagaagtccagagattacagcagtcgtttaatgatagacggctcgattaatattgtagctggtacttgccagacacatgatgttaatgtttcaatgggaaggtattccgtttcagcggatatggaaaatactccgtgggtggattttacgattgaactcaataattgcccgccaatgtctggattttattccaggagtcagattgggagtaattcaagttcgcctaaccgctgggagggaccaggcaattttactgtaacagacaagacacctaatacaattgacgtactatttattcctgtttatggatttaatgaaatgcctaatggagagtggtgtggaaatattgctccaactgctgatgcagcgagcggcgtgtgtctggaaattcaggataaactgaatgttggtgtactggaaaaagggtcctataatttaccggtggacagcggtctgaatttactaaacagcgtcgctaactattctattcctttgaaagctcgttacgtcaggacagctgacagtgccaccatgaccgcaggcagagcggattctgcggtggaatttacgataaactattactaa

SEQ ID NO: 198971 - DNA, 795 bp, Klebsiella oxytoca
atgagtaaggtatttttgataaatgagctggttgctttttatccagaaaagaatttgctggtaaacataggtaatgtcgaaaataagcagatcctgggaggaccaagctcacgttgtctggaaatgctacttgaagttgcaggctcaatcgtaagtcatcagtcactctatgattcggcctgggaaaagagcgttattgagactacacccaatacgctttatcaaactattttgttggtcagaaaagccctgaaggccgtttcagagaagaacgatgattttatcatcacagttccgcgtaaagggtttgtgtttaatgaaaaaatgttggttaaagtggagtatgacgttactgattctatcagtgccatttcctcaattgaaagtactgcaccactctctcttaaaaaaaagcttggcttgcaaggttttttctcctttgtaaatataaggtctggcttgatgttcactgtaataacagctgcaggagtggtctgtcttcttattgcaggttataaatattttttgtttaaacagagcgattttagccgtgactatactgtgtatcaacaaatcaatgattgtactttatatctgcggcaacctgtcgatatttataaaaaagaaatagatatctatctggaaaaacgcaaggagataatggcagattgtgaactgtacccatatagatatattagtattgtttcgaagccagtctttttttatgttatagcatgcaataaaacgacaggcaaggacagaaattgcacgtcatcctatataagggctgagtaa

SEQ ID NO: 198972 - DNA, 465 bp, Klebsiella oxytoca
atgagacgcttgattttctttgctgcgttttttttgatggtgtcacttgttataatgataattacaattgaatcttatgacaacctaaatgtaaaatgtagaggtgagttcgaaagccatgttagttctaataagcttatagcaaatgttggtgtaagttttactggtggtaaaggtgttgtaattatcgttgggaattttcatggagataatgatgagttaaggaatatcaaggttacaacagtttttaattatagcttgtatggtaaattaatgtaccttactgtgaatcagcagcattcatctatttcagatattgacattagtgataagttacagcatctgttacctatggttcttagtagtcgggatatagaatatgtttatgagttccaaccgcaaagcggcggcgattatttaataaaacaacatggtatccctattttttactgcaaaaaaacgtag

SEQ ID NO: 198973 - DNA, 300 bp, Klebsiella oxytoca
atgtctgcacaatcggcgatagggaatgtgctctgccgcccatccagcttaatccccgtgctatcctatccggaaacaataagcgagcttttcagcgaaaccttcgacttcgcgcctccaatatctatagcttcagcgccactttgcacattcaccttgctcctggcggaaatcgagcgtagcacccacaccgttaacgtcaatggtgctgacatcgttgctcgctgtaagagtcacggcaatgttgatctatgccttgaaattacctgccaacccctctctcaacaggcaacagaataa

SEQ ID NO: 198974 - DNA, 354 bp, Klebsiella oxytoca
atgaagctcaggaaacgcctgtatatggaggcttactcgttcacctcgaaagaggtggccaccaccctcacttgggcagtagcccggggtgtgaaggtccgggttgtggcagatgctaagtcacacggtagcaaatattccgcactgacattcctggttaatcacaaggtcgcggtacgcctgaatgaccattatgccatcatacacaacaaggtcattattattgactgccgccatgtcaaaactggcagctttaatgactttgcagcagcgaataaagcaatgccgaaaatgtcctcgtcatccgcgaccagagggcgctggccagtgagtactcgaacgcatctggtctga

SEQ ID NO: 198975 - DNA, 285 bp, Klebsiella oxytoca
atgttcgcgcagctgaagctgatcgttttcaaaccggtcggtatcgataacctcttcccaggtggcaacggcggccatttcggcccgaaacacccgtccgtcagacttactgaagacctgcagggtttcttccggatcagcggttatgctggcaatacgggtgcccatattggccagcagggacaccgttttcttgccggcggccacaatgaggcacttcagatcctgcctagcgaggaacaacccataccccagggaacgtatctgcgtggccagttagtgtag

SEQ ID NO: 198976 - DNA, 348 bp, Klebsiella oxytoca
gtgaaagcggtcattaaatttccggatgaccagaatgtctttgacgcggtcttcaattttctcccccagatcctcactgaggcgcatcgccatctgggcatagtagagacgcccctgcgtggcggcttcttcttactccagctccagcgctggtatcaggaccaccacaatacgttcgttgtgaaggtagtcgcacagctccacatcgccggctccttcggtgaacacgtgtctgtagttatcattaaagagtgtcagcatacggatgaacagctggataagatagctgcgagctccgaccagaaaggagcggtcactgccgctttcctgccattacagaacacctga

SEQ ID NO: 198977 - DNA, 531 bp, Klebsiella oxytoca
atgattaagacgactgagatacggacatacctccggtggaatgacagtcagtctgaatcatctctggcattcgtggccctttattcactgctgatttccattactgcctcgtatctcagtcatctgccgctttactatctatatccttactcgctgcatatttattgcttttaccttaaccgcccgatgtggcggttctttttcggaggagcccatgccattaaagcgacgaaaaaaacgccatgccatcctgcacagcattcatatccctgccacccgattccagccgttagggtggctcgttcttctttctgttctgctcttcctggcacaactgggaatcgaatttctgctgcatacctgaatcataatttactgcctgacctttcacgcctccgttcaccggtttcttacataaatacgcccttcgcatattccccatcctgtttattcatctggccgttcccggcatggagtctgttatgcaaagcccttctgcacaaattgccgcccagaataaccgcagtctga

SEQ ID NO: 198978 - DNA, 441 bp, Klebsiella oxytoca
atgttgctttctcgcgatgaacacggcgcacacatgcacgaaatatttactatgctgctggcggtttttgaccgcgcggcattaatgctgatttgtctctttttcctcattcgcctgcgcctgtttcgtgaacttctgcataaatccgcgcacacccctaaagaattgctggccgttaccgcgatcttctctctctttgccctctttagcacctggtcaggcgtaccggtcgagggatcgctggtcaacgtgcgtattatcgcggtcatgtccggcgggatcctgttcggcccgtgggttggggcaattgtcggcgcgatcgccggcgtacatcgctacctgattgatattgatggcgtcaccgccgttccctgctttattaccagcattgtcgccggtctgctctctggttttattggtcgtaaagtgccgaaagcctag

SEQ ID NO: 198979 - DNA, 144 bp, Klebsiella oxytoca
atgcattcgcataaaaacaggggcttaaagaagaaaacgagaagggagccccgcgccgccgacggcgcggagcagggcgattacagcgacttcgccaggcgctcgacggcggtcatcagaccctctgtcgacaccgtcgagtag

SEQ ID NO: 198980 - DNA, 963 bp, Klebsiella oxytoca; identical to SEQ ID NO: 144443

SEQ ID NO: 198981 - DNA, 198 bp, Klebsiella oxytoca; identical to SEQ ID NO: 144442

SEQ ID NO: 198982 - DNA, 717 bp, Klebsiella oxytoca; identical to SEQ ID NO: 144441

SEQ ID NO: 198983 - DNA, 330 bp, Klebsiella oxytoca
gtgagttggatgggggcggagaaatccgcgccggttaccttgtacgccggttacgccaaccctgttcagctcaccaccagtgaaattggcgtttccggtggtgggattaaatcccagtacaaggaggctgccattatggctactacccctaccaaaaatccgcaatatatctggattatcgccgctgttcgccgcgaaatgccgacaattaagcccaaaatttaccatatcgccgcgccgtctgagcgtgaagcccgcagttatctagttcgtgatcacgtctgttttttcgccggacgcatccgtctgacggaggtgcatcatgcgtaa

SEQ ID NO: 198984 - DNA, 219 bp, Klebsiella oxytoca; identical to SEQ ID NO: 144439

SEQ ID NO: 198985 - DNA, 495 bp, Klebsiella oxytoca; identical to SEQ ID NO: 144434

SEQ ID NO: 198986 - DNA, 252 bp, Klebsiella oxytoca
atgagccttgccgaacagttaattcgctggcggcgcgaactgcaccagtaccccgagctctcgctgcaggaggtcgacaccaccgcacgtattcgcgactggctgcagagcggcggcatcagcctgctgccttatgaactgaaaaccggcgcggttgccgaagtgggcagcggcgataaggtgatagcctgcgtgccgatatcgatgcgctgcctatcgaagaggcggccagcgtgccgtttcgctcgttga

SEQ ID NO: 198987 - DNA, 2766 bp, Klebsiella oxytoca
atggatcttagtattcgcgttgcgttcagtgctattgataagctcacccgcccggtcagcgccgccagcaaagcgattggcggcctttctgactccctcaaaaaaacacagtcttccattaaagacctggaaaaaagtgcagcgtctttcgacaagttgcgctcgcaagctaacgacaccgctctgaagctccggaacactcagcgcgcctttgacggtctcaaccagaagcagcgcgaaggcgggcagctcaccgaggctcaggcggcacgtcttgaaacgctgcgcaacaagctctcacgcctgacggatacctacaacaagcagactacccaactacgctctgccgggcaggcggtgcgccagcacggcgtcaacctgacctctggctgtggggctattcaaagcgccatccggagaaccgagcaatataaccagacgcttgagcgcgaacggcgacagcttgctgcagtaacccgcgcgcaggcggggtatgagcgagccaaagaaactgccggtaagctgcgcggcgctggcatgggtatgacgctgggtgcgacagcggcgggttacgctggcggttcattcctggcgcctgccgttgggtttgatgaagaaatgtcgcgcgtgcaggcgctgacccggctcaacaaaggcgattctcaactggcgggcctgcgtgagcaggctaaaaagctcggcgctgaaactgcttttaccacccgcgacgcggccagcggacaagcatttctcgcgatggctggctttaccccgcaggctattcaggccgccttgcccggcgtgctgaatatggcgttggccggcggcatggatctgggtgaaagcgccgatatcagttctaacatcctgtcgcagttccgactcgacccgaaagaaatggatcgcgtcagcgacgtgttaaccgcggcatttacccgtactaacaccgatttgacgaatatcggtgaggcgatgaaatacgccggcaccgggatggctggtctgggtgtcgacgtggagcgcacgacggccatgatcggcgtgatggctaacgtagggctgcgcggaagtattgcgggtacgggtctgcaaacgaccttctcgcgccttgcagctcccacgaccaaagcgcaggccgcattaaaacagctcggtgttaccgtagctgacgccaccggcaaaatgcggcctgcggaaacggttctctcggatatttataaatccatcaggaaatacggcgatacggaccgcctttcattcttcaaagacattgctggcgaggaggcggctaaatctttccaggctctggtgacgtctgctggcagtggtgagctgcaaaaattactggccgacctgcgcgggtcgcagggcgaggcgcagaaggccgcaaaagtcatggctgacaatctcagcggcgatctgaagaacctcgacagcgcctgggagggattccgcatccagatcgaggaaactaccgacgggccattacgtaggttaactcaggggctcagtgatttgattactgccgcaagcggctgggtaaaagaaaacccccgcctgacgcaaacactcatcctcgttattggtgggctgactgttttcgctggcgtggtgggtatcgccagccttgcagccagttttattctgggcccgctggcaaagctccgcctggccatcagcatgctcggcatttcgtcgatcacggcaaccaacagcatttcaacgcttagcgttactttctccgggttgcgggtcatcctcgcctcgatgttgggtattcccggattgattgtggctgcgttcgttgctgccgggctgctcatctggcgttactggcaaccaataaaagcctttttcgccgggttgttcagcggaattagtcagggcttatcaccgctgattcagtctttttcttttctggcccctgtgtttgatgccataagctcgggggtgtcaaaagtctggggttggtttggccggttatttacccctatcgatttttcacgcgatgcgctcgacaagtgcgccagcgccggtaagacgttcggggaggtgcttggggcggcacttaatctgctgtttacacctctgcgcttgctgactgaaggtgtcagcctgctactcgaaaagctgggcttaatcccgtcaggtatcgacgcggcgagagctaaagccgataaccttacgcccaaaaaaccgacgtcgtgggaatgggatccccagcaaaagaaaatgattcaaaaggaatggaaatgggcgccggttatgtgggagtgggatccgaaacaaaaaaagatggttcaaaaagaatggaaaccatcttcggctgctggcccagcgaaacccgatacccctctcggggagaataccggcacgctgcggcgcctaaacagcatcgctgataacacgaaggcgacagccaacaatacgaagaaaatcggccccggcgatattgtctttaaaaacctgccgcgtgcgctggcgctgcgtggtgcctatcaggaggcgcgggttattccgcagcctgtgcctcgcgtgtctgcggctgcggccggcggcgttctgtcggtaccgacggcgacacagggggcaacatctgcgccggtcgctgcctcgtcgggtgctgcgccgttcttccagctggtctttaacgacgtcggcaaacgctcggatcaggagcttgaaaaaatggttcgcaacgctgtgcgtgatgcgatggccagcacccgcaaagctaaccgtggttcataccgcgatcgggaataa

SEQ ID NO: 198988 - DNA, 1686 bp, Klebsiella oxytoca
atggacagaagatcgctgttgaagattgcaactgtcggtgctgttgcgttgggctctaactccattgctagcgcgcgtgataagacaagtgacatcaaagcatcaggaaggaatgtaagcatatcaagtattattaccgcaggcatgagtgatgatgatgcgatctcacttgctattaaaaaggtaacggcatcatctggcggcgtagttataaatgaccttgaaagagctcttgaaataaagaacaggcaagtttttgaaattaacaggtcctcattacaaggaatttcatccagcgcaggagtagataaaattggcataattggccattttgttttaactggtggtggtggttttgatttcataggttgccagtacattcacgttgatgttttgatcaatggaggggatggtaacagcattactgatacagccatcagaatggagtctggttgtgttggtgcttcatttaaaataataggcaacctgtaccagggtactctttttggtacgtttggtaaatataacagtaaaacatcaaacggagtacagagtgttgatgattcaaagatatctgcattctcttgcggtagggcattctatatatcgggcacaaccgggtttgggacgatatccacggtatgggaagaatatccaaaaggctcatctgttataaccaagtcgagcgatgtcaccataggtgtttatgagaacttcgttcctgatcagaatagcggatgtcttgttattgaagattgtggaagtgtcacgttcggaagccttgctactggagcatgggggcagcctcaagtgaaggtatcaagaacgcagaccatggctatcggcaatcacttatccgtacttggcaacaaagataaaaataatgatgacgtatttgcactggatatagatgcggcaattgtatctataggtaattcaagactcgaaaagctgggcagcggttttagaattggtggcggtggaactctaaatattgcgaatgtaacagcaaactttgtcaaccaacttgcatatttggggtatgcttttgatgacaagagaaagaagcaatcagccttttttaatgcggctagtgttactgtgtataggcctaattctagcaactgccttaaagataaagaccttatttttattagcgactctgttgatgttggatgcctggtaattgaaaacatcaaggtcataggtatgaacttcaaaaggaaagattctgcatcgagaatcataaacagccaatcatcttcaggaaatctaagcattgctatagggttatccgttcagggcattcctgataataaaaactttatttatataaaaaacattgcttcattaaaaagattcatctcctccggatactctggagaaatagattttaataatggaactaccacaggatatggagaggtattttcaatcgctgatgataaaccttcatataataaaaaatcatcgctaccttttgacagaaaagcaaaactttacttcatcttttctgttgatgaaggcgggaattttgaggttctcgtgaacaacagccttgtctattgcagatatgatgctggcaaatcctcttgtgtcgtagatttgcaaaagggagattcctacatggttaggatgagcaagtgtcaggttatcaacgaacggatcgtgtatcagatagcgtaa

SEQ ID NO: 198989 - DNA, 1284 bp, Klebsiella oxytoca
atgcaacaaataaacgaatataagaaccccgggagattttttatttccccttattttgctgcaatggttgcctactttatttttctagtggctctattctttcctgagaaatactatcgacacctcatcagagaacagaattacatatcattcgatcctgcatcattcctctttgtaacaacatgcgtgtttttctttttcattgggacgctgtttgtttctcagatgtccagaaggataataactaaaaattctcccgacgttcgaaaggtgctaaggatttcggtaacaaaattcattttgcttccggtaattatttcaataattttcagctttatgtcgataaagcttctgttagcgaataaccctaaccttattatgtaccttcttcttggtgatggcgcaaacctgaagagggaactggtgcttgcaaacacaatggcccaggccgctcaattttcaatatgtgtagctttatgggctacagtccaatacaatcactataagcatgagctaagactttttaagcggttttttatattgctttttataggcgttctgtcggccatatgtatggctaacgccaccattaaaatggctcgatttgaaatgatgccactcctgcttggattcatggtaataattttaaaccagaaatacaaaaaggtaggcaataagacaattgtgttttatatgcttatctcattttttgcattgatagccgtttttggtgtatttagttttctgaggggatttgactcttctgatgatgttgtgcgatcaatcgttgggtacaccataacttcatacaaccacatggcagcgttgctaaacgggaagttaaggtatctatatcctggcgacgggtattatcttgcggtattcttgcagtacataccattagttggtgatatgttcactagtagtgttttgggatgggtaaaccctgagatggtccgttctaaagagttcattgatactgctgcggcctccctcaatgagtcttacatctggattacagtattcggatatgttttcgtaacagcttcctacctgactcctttctttatgctcatatacggctgcgtggcgcaactatcatggtcgtcatttaaacgcggtaatccattggggattgtattctatccgtggatgtttttctgcatcatgttctggcttggaagtaacattcttgcacagcaacagaccattagtgtttttgcggcttacatcttcctgcagatgtactcagctttgtttataaagagaatcagagaatattaa

SEQ ID NO: 198990 - DNA, 1452 bp, Klebsiella oxytoca
atgaccctgggcagtggtataggaatttatgtatcaagagacagtgttggtaataacggcaccgtcaactatggcctgaaagatatcacattatccaatttctttattggccggctggttgaaggcatttcgtttgcatctaatgaatcgaatctgaaggtaacatcctgcaccttctctggtatttttcagggcatggatcagcacacctggtctggacaggtagaaacaactggctgtgttgcgggagatgtaatcggtggttggtggcttcagcgaaacaatacacaaaacaccgcctacatacctccatatcccgctactgatgtgtatttgttggggtgggccgactcttgcccttcagagacactaactgcaggtcagattaatggtacctggggagcgctgcaaaataatgcagatacattctttgatacctattttttcaaatctgcgaactcagcaactacagccagcggaggccggttaaccaataacagcaataacacaggaacaatcccgcagtggaagggtgttgctggcagagcgaggaccgttcttagccggtacggccgtccaatcaaccgaatggatatcgataacctgaagctgatcaggcagcacaggactcccatttacctgtctaatagccttggagaaagcgtaataagtcatgcatattttgaaggcattggactggtggataataccggtagcgcagtaagtggcaaccttttcgggatagacgttgttgacccactaaatacatcagaaagcggtgtcgggtacatggttacgcgaggggggataggccttaaaaactttactgcaagtagcaaaaaccaacacgccccattaagtgataatgctgacaggaagaatgcttcctatagaggcacattgtatgttccgtcaggtaccgtatccaccactcaggcggagatagacagggcatctgtatgggatgggactactacggatatcagatatctacggtatgctgataaggcgtttacccagcctctgcaattcactcttggaggtccaacttttaggtatgctgagggaaacttcacgccaactttaacagttaacggatcgctaatcacggggctagctgtatctcgcgggcattataagagaaacggcaacactataatgggcggagtccagttttcatcttcggcagccctggccttatcagctggacaggtggttattggtgggctgccattcaccataccatctggtgcgatcgcataccatcacggtcaggtagatgtgtatagccacgccgccgcgggagtgaatgtcagaccgttctttaatgatggggcaacgacaataaagttagtcactgactcaaaaggcactgacttcaccgcatcaaacgcgccaggaagcgttcaactattactgtatgtttccttcacaatgattatctccgggtaa

SEQ ID NO: 198991 - DNA, 318 bp, Klebsiella oxytoca
atggcggcctccccccggctcgcgctacgcttagccgggctacaggtatacagcagtctgctggcccgtagcccgggcaaggcgctttgcgccgcccccggggagatcgccatagtccgcactagatatggtttcccggaggcgatgctgcgcatctgtctgcgctaccgctcgcagacggcgatggcctgtagcccgggcaaggcgctttgcgccgcccccggggagatcgccacaggccgcattggatatgatttcccggaggcgatgctgcgcatctgtccgggctaccgctcgcagacggcgatggacccgtag

SEQ ID NO: 198992 - DNA, 264 bp, Klebsiella oxytoca
atgcatttatcaggtgaatttaccttcgcgcccatggatggcagcgacccggtcagttacagcaatgccgtagcagttatcactgaatcgccgtccattttcgtgaacggtctttataaatcggttgtggcgttttattcggacgaagccaaatcgaccgtcattttctcaacagatttattttctgaggatggcacggaggagacggcgttagacgctgccaaagcgcaatatgcgcggaacatggccgtaatcagcgaataa

SEQ ID NO: 198993 - DNA, 681 bp, Klebsiella oxytoca
atgaaaaaaacacttctggctgccattctggcaatgagcgcgacttctgctattgccgctaacccctccactgtattaaaagtaaaaggtactttgactaatgctgcatgtaccccaactttgagtaatggtggtgtggttgattatggcgttattaacttgggtatgctctctgatactcaagttaatcagctggggcagaaagatatcgatttaactattaattgtacctcaccaaccaaagtatcatggaatatggttgatgaacgcagcagttctaacgcaaacctgaccgttgaaaatgcgggcgctgatggtgattctcttcagagtccctatcagacttacggcgtcggtaaggttggtgaggtaaatattggttcttattctctatttgtaaaacctaacagtgtaactgcagatggtaataatgttgatgcgatcgtttccgattattatgatttacttggtaaatggactaaaagtatttctggcatgacggtaggtggttcctatcgtgatatgaccgttgcgaataccgggtctgtagagccgatggcattcaaaaccgccactttcccaatggcaacctctctggcaattcaaaacaccagcacgctggctattactgacgatacccctctggatggccagcttaccatcagcctgcgttatctgtaa

SEQ ID NO: 198994 - DNA, 300 bp, Klebsiella oxytoca; identical to SEQ ID NO: 75111

SEQ ID NO: 198995 - DNA, 2091 bp, Klebsiella oxytoca
atggcttatggccaagcgcatggacaaagtcctgaagaaatcgaggcaaactgggggcggtggcgcgaacaggccgcgaaccgtgctagcgaggcatggtataacccgatctaccagcagatgatggggccggaaggaaaaatagaggtcaccaacacgccgcaagaggcgcagctcttttcgtcgattatctggcaggagagtggcggcaatcagtttggtaaagatggtgcaccgctggtatcaccgaaaggtgctgttggcgccgcgcaggtgatggaaagtaccggtccggaggctgctagcctcgctggtctttcgtgggatcgcgacaaatggctgaatgacccgcgatataatgtgcagcttggtaaggcatatttcggcgcacaactgaaaaaatacgacaacaacccggttctggcggttgcggcgtataacgccgggcctggagctgtcgatggatggattaagcagtttggtgatccgcgagatggcacggtttcgaatgcgcagttcgccgcggcgatcccctacgaggaaacgcgcaactacgtggcgaaagttaccggtagcgccggcgcgataccaggcaatgccactattgagaacctggtaaatcagccattctggaatgcgatgagcccgcagaaaaaatcggagatgctgagcaagcagtctggcctctacgatatgcagaccgccgccggacgcgtctctttgcagacacgcatgcaggatgatctggctaagctggaagcggggcaggaagtcaacccgatcacggaacatgaatgggctgcggttatgccactgcaggccagtccttcagagcgcattcagttgcagcagtccttcgagcagtaccaacaggcaatgatgcttcagccggcctacaagacgattgtgcagggttctgctcagcagggtattgctgcggtacaggccatgattccgcaggaatcagactctgatttcaaattcaagcaggggctgtacgcgacagcgcaggccaagcttaatgccacgcttaaggcacgggagtccgacccgggaacctggctacagactcactcaccggtggcaaaaaatgccttcgaccagtacagcaacggtcaggcatctggcgaatggttggtgtcccgtcttcagtctgagaaagaccgcctcgggatccgtagcaaaaaggtactgcctgattcaatggtcaacagcctgatcgcccgcattgacaacaaccaggaatcgagcgtcgctgccattcagcagatggcacagtccttcgggaaatactctggtcaggttatgcagcaggtgcagaaaagcgcctacccggcgttgcaggtcatcatggcgaccaataacccgcgcgctgccaacgccctctggcaaaaccgcagcgttaaaacctctgatctgcgtggcaactttgagaaaaccgacgccgacagcgccgactcatcctggaatgaccaggccaaagactttgctgggacgatggtagtccagcctggcggggccgctgtgtggaacaacttcaacgagcagggtaagcgcctgacttacacctatatgcagcgtggcatgtcaccgagcgatgccgcaaaacaggcttatcaggacgttctcggcgagcagtatcagaccagcggcacatggcgtatgccgaactcagccgggcaggatattcgcgacgttaacgacggcgctaatgagtacctgaaaaacctgtcagcggatcagatcatgccgctgattggtgatgcccgtctgccggatgaggttaaccgcgagcagagtatttcgcgcattcgtgaaaatgcgcagtgggtgacgaatagcaacgaaacagggctgacactgatgatgaacggcctgctgatcaacaacgcgcaagggcagccgatcaccgtgccgtttgctgatctggcgaaacttggcgctggcaatcgcaccacctggaacagcctgaccaaattcgtgcagacgccggttaagtacacgccgggccagtcgaagaattacaccgtggaaagtcagcgcgaaaacctgatcaacattatccagaacggccagcagacgggacgataa

SEQ ID NO: 198996 - DNA, 195 bp, Klebsiella oxytoca
atgtgcttgtgctgggcgttcaaggataaagaaggcaaatctctgatccaactgttctgtaagccctgcccgaaaaacagtaagccacaccgctcaacctgcaaaacgcacccggtagagtggcaacggtttgtcgcttacgccgggttagatttcaagtctatgcgcgaagtatataaacggctgccgaagtag

SEQ ID NO: 198997 - DNA, 519 bp, Klebsiella oxytoca
atggaattaacgatatctttttccactattatcatggcctgtttgagctttatgggtgtttatattttgatgccaatagtgcttataggtagagactatgtggtaatgctgataagcgagaaatttatcgtcactgaagctttttggcaagatattgctgatctttcacgagataaggttaattacaatataatgtatggcagtaaaaactttcgctgggaagaatctgaaggtgaagtaaaatatttttggggtgaaaatgaaattacagaaaatgattataatcatcatcaaaaaaataaaagtatgcttttaaatcgtatgaatacattaaattatagagttcaatcccgtatgaatatttgcgtgtgggttgagcgacattttaagttgaaagaaactattgatgaacaagtcagagaagcaagcgaacatgcctatgaaagtgcattatcggcccgtaagcagcgggaagaacttaataaatccccagccaatgccgggagaaataaaaattaa

SEQ ID NO: 198998 - DNA, 258 bp, Klebsiella oxytoca
gtgggaaccacttacggccagctagagaaaaagctcaacctctgtctgtacaacggcgacgaaaaagccgagtacgatagcttcccgggtaatttcttcctgaacgcgacgaacaaagcccgtcctactgttatcgaacgcgatcgcaccgccctagtaaaggccaacggccgccaatatgtcggttgctacgttaacaccgtggtggctatctgggctcaggataacaacttcggtaagcgcataacgcatcgctaa

SEQ ID NO: 198999 - DNA, 141 bp, Klebsiella oxytoca
atgaaatttaaattaaacaacatctgtttggtctttccttccctgttcaaagccaaaaccgttaatggcgaaggcgatccgcgcttctcggctgtcttattgatggagccgaaaagccacagttcgaagagattcgcatag

SEQ ID NO: 199000 - DNA, 408 bp, Klebsiella oxytoca
gtgggcattgatatgcatgctgaagctcaggcgactagttcgctgaccgatgctctgtgctgtcaggtcgtcaaactcgctccggtttgcatattaaactgctcgcacgcggtacaaatggcgctggctttacagaatcggcatagcttctcgccgggtctgaagttctccagcagtaccgaaagaggtttccacactaacgatatgcgagaaatcgacgcgcagctcgacaatcagctcgttgtcttagactgcatcaacgcatcactatacgtatttatacatctcgacgtctgcaaatattgtatcttcggaacccatcaggagagcgttaaggatttgttcggccttctcgtgagcgtgggtaccttcttcagcaaaagcgaaacttttatccggttgcgttga

SEQ ID NO: 199001 - DNA, 237 bp, Klebsiella oxytoca
atggataactcaataaagcttattttgactaagtttgtatactcaataactgttcatggtttcatgattttttggtcgggtatagcgcttcttttttttggctgcatctttcaggagtttagcggtgcggcatcaaatgtatttatagaattagccaaaatattagtaacaatagctatcatgatggaaggggggaaagccatttttaacaaaattacctggggtcgcttttcttaa

SEQ ID NO: 199002 - DNA, 219 bp, Klebsiella oxytoca
atgtcatggtttaaacgtaagaaaaaacagaaagcgccgaagtactcgtgccgcgagagagctttttctgtacccgccgggaaagcggctatccgttggctgtatcgaccggactttcttgggggagtcgatcctgacgggatctggtttcctcatcacactaagccgtacgtgtactattactgggtccgttttttccttgaggacgcaatgtgctga

SEQ ID NO: 199003 - DNA, 192 bp, Klebsiella oxytoca
atggctcaacaatacggtggttttttacaaagtctggcaacggttcgggatgcaaaaacggggcgtctttcaagctgggatcaaagcggtaagaatcaggattattggctaattggtcccggggaaagcgtaacgctagcagatattcaaggggctggctgtatcacccatatctggatgacgcaattttga

SEQ ID NO: 199004 - DNA, 1284 bp, Klebsiella oxytoca
atgacagataataatgacacatatattataattgaaatgattattaccgtagatgctaaagaagaaattgcatcaaatgcgaaatcctttaactccttacttcagtcacaccctaaaatagcaatacaaaaagaaactttaacgtggaaagattataagtttaactataaattgcagcacggaaatatagatgataaaaataactttttcgatattgaattaaaaatccaaaaaaatgacactcaaaaacaatttgatgaattcacgcttttagttcgcgaaataaaaaaaatagttggccgcttcacaaccactccacctcaaataatatgggacgacatatctaaacattatgcctctcttgcttaccctttaatccataatatagaaaatgttttgaggaaacttataacaaaatttatgcttacgaatataggcattagttggattaaaaaaaccttaccggatgatttcaaaacctcacgtggagaaaatagatcagcgagtgcaaaaacaagcaatcaagtgttatatgacactgatttcatacaactttctgattttttatttgctgcatatcgagatattgatgttactgaactaataaaaatattagaacaaaccaatagtgatgatttgtcatctgaaaaactagaaatcattaaaaaattcattccaaaatcaaactgggataaatacttaaaggaccatgtagattgcgaaggtagttttttacagaagagatggtctgatttatatgagttgagatgtcaaattgctcataacaatacttttacaaaagatgactttgatagagtaagaaaggtcatagccgaaatacatccacctttaatttcggcaatatcaaaattagatatggttaaaataactgaaaaagaaaaattagaaatagttaatgaacttgacaaacaagaagccgttaaagagctagacaaacaagaaagtattaaccatgacaaaaatttagttagagattttattggatcgagtaactcgttagcgaatttattaatagatatgtcaaattactattttagccctcctgacagaacagctcttatggatcatgctataaatttaaaagaaaacaatataatcgatgagaaactatttagcgaatttcaagtaatttacgatgtgagaagaaaaccgaatgaaatctcatcccttgataatttcgaacttgacgaccttttgaaactttccgataacttaataatgcaactggaaaatataaaagattccaatggcattattgtttga

SEQ ID NO: 199005 - DNA, 576 bp, Klebsiella oxytoca
atgaatctggaaaaaggcggccgtggtgccatagagcgtatggttgaagcttatggtttcaagacaagacaagccttgtgtgaccatttgggagtttctaaaagcaccctagcaacgcgctatatgcgtgactcattccctgcagaatgggttatacaatgtgctttggagactaaagtttcccttaactggcttgtctcaggcgtacacgccgaagaacctacaaaagtatattctcaaaatgaaaacctaatcattgtagatatcttcaagataacaaaaagtgaactaacgaaagtcgataaactaactgtcgacaaaaaatttgtggctgaaggtgagaaaatatcgttcgctattgaatcacatgattcattgattcttctgaatcaagagtggtcggttctagtcgatggtatatggctaattaatcttgatggtgaaatgactctgcgtaaaataataaagttacctaacaagcgtgtacgagttgttaataatgattcggagtttgaatgctatgctgatgaattaaatatttcagccaaagctgttgctacatttattagaggttaa

SEQ ID NO: 199006 - DNA, 237 bp, Klebsiella oxytoca
atgcgaaatagtgaaacccgcaccaccaaaaccggaccagatgatgctggtttattccagctgtttaacgagactcgcctggatgaacgtaaaaactgcgcttttgccatttcgatccgtatggaggcactggcgatccacatccttcagaaggaaatgacaggaatagaggctgcggagctgctgcgccgtgaagttgcccgttatgaagttgaatcacgtggagactggcactaa

SEQ ID NO: 199007 - DNA, 819 bp, Klebsiella oxytoca
atgcgtgttaattacgatgtcgttatcaaaagcggcgatgatgaagttgatatggaatatggtctagatactcttgctggaaccgccgaggttacttgtttgttagcagaagcaatacttaggaaggtaataatcaagagacgtagccatgtaaatccggctagagcggtactaaagaggaattttatagggtcatatgggcaaaattttgacttggttattaacgaggctgaattgatatcagaacttcgtaaaatttcaaaaccagttttcaatgaagtgatgagtttttttatttctcagtctttatatttagaaagtcgtgagctctctgatgaagctgaagaagtagtaaaaggactttcagatattgaggatgaattaatttgccgtataagggcgccactaaaaagaatgcatgaaattaatcttaagaaaaactataatatcgagctgaattttaagcagcgagcacatgacaaaaaaaaagtgattgaattagatacttctaccgcaactaacttattcaaatcacgggtttctaaaagaacagaagtaattagggcatacattacgcgatttaatgcacgtacaggtaatggtaggcttgttcttgaaggtgagaatgatactgtcgcgtttggcttttacagtccattacgagtgattctccctgctcaaaaaagaatgatttcagcgaatttacatgtaaataacccacccgcagcagctggctatacttatcttaatttaactgtaagtagagtaaggatcaatagtggtgagaccattaaatatttagttcatacggtacagtaa

SEQ ID NO: 199008 - DNA, 747 bp, Klebsiella oxytoca
atgttgaagataatttgtttaacattaataataattgcttggggcctttactctcttaagttcggtattgggtatttaagtactcagaatgctgatgtttggggacagtttggggactttatgggaggggttcttaaccccatacttagctttatatccatatgcctgctaattcgatctgtgacgttacaagttcagtctaacgctacactaactcaggaaattaaaaggcaagaattgcttgaggattataaaaaattcgagatgagatttttttgtcttatagaatctcaggaatcgaactatagtaaatttcggattcttatagatgatcgtgcggataatgatgatcaacatgaacatggggcaactaacaatacggttataactgagtatagagctaataacgcagttacttacattgatgataatttgtgtcttttagttaaagcaggggtggatgacgaaagaattatttcgtggttagaatgtttggatgttgatgaccaaatcttctcattggttagaaggttttatcttttggtaaaacttatagatgataaaattgatgctgataagcaagaggaacagtatgagctgttaataaacctaactgatgagcgtctattaactatcgttgtgatcatttgttcttattttgattggggtaatgtgacttatataaaaaatagtggaatattaaagcaagctaagatggatgactatatatcaaattatctgaaataa

SEQ ID NO: 199009 - DNA, 228 bp, Klebsiella oxytoca
atgaccccttccaacacatacctgacagtcagcttgacccacccagaaaaagtaacctcagagaacctcgctgaactttaccgtgactggatgaacaactacctttccgtctccgcgttcgcagaggattacggcatcacagtgccacaggcggagatgaccatcgcaaaaggtcgcatggttcacgaagcagccgccgagtggttgaaagagttcaacaaagcctaa

SEQ ID NO: 199010 - DNA, 177 bp, Klebsiella oxytoca
atgcctgaagatgtagtgaatgactgtctggtcgaactggacagagagattaccccggagatcatcgccaagattgtacagatgctgccgtccgacataacccacctcgctgaagagtgggggtggaacgacactgaggttggggataaggtttacacgttcatcaagtcgcactaa

SEQ ID NO: 199011 - DNA, 210 bp, Klebsiella oxytoca
atgtacaagcatttaaatatcagcatcacacttcaaggcgtggacactgatgagatttctttggatgacgttattcgctctgaggatgtagcggggcgcattggttcactaattggcgaaggatatcgcgaaggctcgtttgacttctctatctctgacgaaccactgtcagtggcctggaattgcaccacgacggagacacctgaatga

SEQ ID NO: 199012 - DNA, 369 bp, Klebsiella oxytoca
atgagtctggaaattaaacccctgctggagccaacgaaggctgtgatgggcgcctgtaacgatttgcggttcgtgtttccgtataccggcaatctgacggcggagaagaagacggagatggcccgtaaactctgtggctggtggaatagtgacgccgggtgggaagcgctgaaaaagaacggccgctttcgaacggacattcgccttgatatggctaatagcctgtctttcttcgatcgcttctgtggccggtacaaatctgttgaggcgaagattatggtcatgacgaccggcgaagagatggtgagctataccggcgacaactgcggcggaagcaatcacctgcataactttgtgattatcaggtaa

SEQ ID NO: 199013 - DNA, 330 bp, Klebsiella oxytoca
atgaacaacactgaacgcctttttgctgctttctacgctacccagcgcaacacgtttaaagaggaacgaaatagcctagtctctatcgtcactctgctggacattgttgcaaacggatctgcgatacgagtattcaaagaaagcaccgtgtcgttcgatgatggaatttctcgtcgcgttgtcgttagtgtgcgccgcagtaaactgaagtcgggttggactgctgtgcagaaaattttccctatttcgcagcttgagacagccatcttgtatgcaaacaaagtggctcagaaagagatttcaagagagtcccttgctgctatcgcataa

SEQ ID NO: 199014 - DNA, 534 bp, Klebsiella oxytoca
atggacactaaagacttcacatacggcatcccgttaaagaaagagcgcgacctaaagaagacgatggattactttaaattcatccactctaaacatatacctgtaagggttacagctgctgatgggcagtatttttgtatgcatgtcaactctttcgataacagaggcaacagaatttttctcggtacattaccgttttatgagaaagaaaatcgcgtaatcatccccgttcactacatcatatcagccgagcagattctcgctgaggatgtcgataaaggctataaggggcaattaacgattaagcgtattgacttggaagatgctggcttcacgccatcaggtcgcgacttcttccaagtcataagatatgcgtaccagaaagaaaagggtataagggtctatctctcggacaatcgcatcattgagggcgtgtctacaggcatggatgaacaatcggtaggtataaggttgccagagggcaacatgattcaggtattttacgattgggtcgaccgcatcgtccctatttaa

SEQ ID NO: 199015 - DNA, 495 bp, Klebsiella oxytoca
atgacccagctccccaaggaagaaatcaagaaaattcttcagagatggacaggtaacaactttccaaagtgcactgataaaactatcgagttttatatcagcaagagaatctacaccagcaaaaagagatgtctacacatttatatcaaaagagaaacatgcgatgatctggggtttaatctcgtcatttttccgtttaaaataaagataataggaaaaataattgaagagatagacggaatcgaattgggaaaggttgaactgaactcaaactttactgttttcaaaaaaatggtgaaagatgaagacggcaagactcttgagcgaacaggctattcagtgcaagtcagtagccaagatggtcttgttaggctgttgaaagtgatagacgaagaggtgtattctggcaatctaaaagaagtagaacaactgaaattaaccagaaaagaaaacctgcaagacttatatagcaggaccataatggcaagcaactaa

SEQ ID NO: 199016 - DNA, 642 bp, Klebsiella oxytoca
atgttcaaaaaacacatcgcaattgtctgtgctgcgtatttcatgaccgcatttcatgtttccgctgatgactcatcattggatggggaaagatatcgattagagactacgcccgattctgccattcaaagtgatgatttcgaaggggtatcccgtcgggttgattttgttgagtctttgaataaagagccaatattagataattttaatgaggttgagagagttatttttcagattggaactgcttatcgaccaggggttgatctaaagaagaatgattttgaatacccgcaaaaaattggagaatctttattctataggaaaaaaggtcagtttttttgcaataacgatgcttccagaggggaggggtgccctgttagagtaaagatcggcacagaaaaaccgtttaccattaaaacaagacacccagccgatatatctaataatcatggtcttattatttccccaaaagatgcgaaaatcatcgcggatagaattactgatctagtcgataatgatcagattccgagcaaagataagactatgaccgtcatcttgccaagctatagcgtcggtgcgcagaaatttatttttgacgtcagtatgttttattgtctgccatatacaagacaatgtaagtaa

SEQ ID NO: 199017 - DNA, 552 bp, Klebsiella oxytoca
atgattacttcagaatttaaaaaactaccattcttcactccagcaaaaacaaatcaccaagtggccaagttttggaaaagtgattctatccttccagaagacgaaggaaaactttatgcaaaaagcttaatagcgttcatgaaagataactcacagacagtgggggcaaacattctaaaaggtattatcagagatattgtagaaagtggtgacttacactcacaaaaagctcaatcatttttttctcagcttgagactgcaatagtcaactctcaatcagaagacgagcatattaaaaataatgaagttaatatcccaaaacctaagcgcagatatggctttactttgccggaagcagctgatgagatcgatgtttcttctgggaagttgatagattacatggttaacaacgagtggcttgacgctgaagccatacaacctacagaggaagcactgaaaagaggaatgcttaggaagcgtcgcgagttaccattcgttataaccaataaaggactggctttgctacgttcaaagaagattctatttagttaa

SEQ ID NO: 199018 - DNA, 360 bp, Klebsiella oxytoca
atgaaagagcaaatgaaccatcaatcgtctaaagtcgacgtagagcgacaagaccaagctactcaggcgaagaaatcggtgaactgtcatctcaagctttcaccagaggctgatggtaagcttttaaaaattcaacgtctgttacgcacagaaaacataaaagtctcaaagacggggattatcaatcttctacttgaaaatcttaatgtcgaatatttcggcaaggatttatctgttatttttggtgacaaatttcacaatgatatcgttcaacttttcctgaattcagaaatgaatgaagatgatttaaaaatattgaaaatgatgaaaaacgaaaacaaagtaaaatctgaaagttaa

SEQ ID NO: 199019 - DNA, 4578 bp, Klebsiella oxytoca
atgtccgatattgtagattttaaattgacgctgaatgacaaggagttttcagcgtcaattaaaaacgcgggaaaattattagagacattcggtaaaacggcctctaataactccaaaaaaatgtcctctcttgaacggtctgtcgtcgccacaggccgttcattttcagttctaagcgtctctctcggcaaaggcgcgaacaagatggaggattttgcggccggcactgagctggctggccaaagtcttcgcgtcatccgtgagaacatcgcagctatcaaccgaagcctgagtgtgttctctggtcgagtagaccaggtgagtacaaagttaggctctctcaccaattctctgaagaaagcacaatccgagttaatggactttgctgacttcgctgatcacgcaggtcgctcagcaaaagggttctcttcagatgctgctggtatgggtaacaccaccacatcgcttaatcgtcgcttatcgaataccaccaaaattcttgatcggtggaaaggcacgacagacaaagccgcagatggcctcaaaaacgtcagagaacggatggatgatgttatccgagggcaatcccgtctaaacggaagaatcctcggcggcggcggtgtaggcggtggaaatgccggtggctccgggcgcagcagtggctctgggcgcagcagtggctctggcggcggtcatgacagaggcatgtttagtggccttcgtggaaacattttcatgctgggcgaagttggggatgccgctcgtctggttacagatgttctcttctcttggcaaaagccgatcattgaagccgctgcagaaatgcagaagatggagatccttcttcaaggtctgaacaagaacgcagccaacccgaaagcgtcagccgctaatgaaatgcaattcatcatcgatacagccaggtctgcgccgttcgcgatgagagaattgacggactcgttcgtcaaattcaaatctgcagggcttgacccgctcgatgggtcatggaagacgcttatcgattccgtcgcaagattcggtggaaacagtgagctgctgaaccgagctgccgttgccattcagcaaatgtccggtaagggcgttatctcgatggaagagcttcgtcagcaattaggtgaggctgtgccaacggcaatgcaggcaatggccgatgctgctggtgtgacaatgtcacagctgaccaagcagatctcgacaggcacagtgtctgcgaaagagggcttgcgtctgctgtttatcggtcttgatgcccagaaccgcggcgctgcgaaaagccttatgcaagcctataccggcgcattggctcagatgcagacatctttcactctgttcgctaaaaaggtgggtgatgccggttatctgacatcaatcactaatgctctaaaagaagcgtcgtcattctttaacagcgcgagcggaagccagctcgcaatggggctggggagtggtctgagttcggtagtcgatagccttatttcaatggctaaatgggcaaccgtaaaccaaacactgctgattgagattggtaaagcgattgccgcatttgtcggcttcaagctgcttcgatcctcaattttgggcgtcgtcacggccggtagtcagatggggtcggttctgggtagcgctgtgcgagcgacacaggcaccgtttgatctgttatctacagcggtgactcgttttggtcgtgcttctcgactcggtttagggactgccccgtctcttctgtttgccattagaggcggaattacggcggtcaagacggcgttctctggtctgacggcgatcatcgttgcaaacccgattggcgcagctctgaccgccgttgcggttgccgtctccggcattatctatgtcatgtcgctactgaaggacaagacagcggaaaccgtcgaagagatccgcaaaatcccacaggcaatgaacgccgccagtcgtgccaaaattgtcgcggagatcaaagacagagagcaaaaacttcaagggaaagaagacactctaaaaagcatcgagtcgggcaaaacgtcgcctaccgctttaggggtcgatgtatcgtcgctccgcaaagagattgagtcggataaggctacactctcccgatacaaagaaactgtcggcatgggggatgtcgcgcagaaaagacagttggcgactgatgttgtcaataatcgtctgcaaaacatagaaaacaccctcaataaaaacatggcggtgtactcgtcaggtgatatggcgaagaacagccagcaacgcatcaccatcgagtcaaacaacaagctgtctcgggaagagaaaaacgctcaaattagggagattaacgaaaaggacaggaatgctcagacggcgatctatcagcaggccgctggcgaaatgcagactgtcgtatcgaatctcgggaaggaagttactaacctcgtagaagggctgaaaaatccaaaactgaccgagtcagaacgcagtttgatgcaggcgcagctgtcaggccaatcagaggcgtggaaaatcgcaaaagagcggttcgagcagatggatagcctggctaagagttcgtctgatagtcgtaaagggattccggggcttgacggaacaacgacacttggcgactcaggggcgaagacaagtagtaagttagaaagtggctatctgtccgaacagaaaggtaagggaagtcggcagcgcgtcaatgccgatggctcgctcatgttcgacgtcgagaataacccggtagtcggcgacaaccagatgaaggcgaacattaaaattcgcaaacttctgggtgaaggcatcaagctggaacaggcttcagcgaaagaccaggctattatttcgaagtggcttgccgatgcaaaagagaaggattctgaacgcgctgccgccgccgccgagcgagcaagcaagaaaactgccgctgctgcagaaaaggaggcgcgtgcgcagaaaaagacagccgatggttatgacaaggctctggaaaaatctgagcagctgatcgcgcagatgggcagtggctcaaagaccgtcgtgtcgttcagacagactttggataaaaccaaagagtcgctggtggagctttccaaagccagcccttctgagctgatttcgcaggagagtatcgacaaggccaaggagaatctggctaagctgagtagtctgtcagaagactacatcgcgatgatgaaccgtcgtggcgctaaacagatggcttctacatgggcgcctgattctgacgctattatcagagcaggttcaccaaataatcgtgaagatgatgttatcgactttagggagcgatacaaaacctccttagacgggttaatcactctgcgcgacaacgcaatgaaggagttggaaaaagacccgacgcagggtgccaacatcgactacttcaataagcgtattcagaaactcgttgcctctggaaacagagcgctgattgaggaaaccggaacagccactcaaaagctggccgttggatatgaggatgtcgcaggtcagatcgaaacagcgtggagtaatgctttctccggtatgacggacacgattaccgacttcatcatggacggcaaggctagtttcagtgattttgcaaggtcgatcgtcaaagacatagccagcattattgttaaatcgcagattaccgcgccaatcatgaacatgatggggatgggggctaatggcgctggtgggacgggcaatgtagctggcgcaatactgaatcagggcgtgagtctggttaagtctggtggcaatagcaacaatgcgaccgttaacaacggtgacaagtccattggtcagtccgcgaaggagaccagtgctggtattagccaaatgagtacggccactgagaatgctaacagcggattatctgggatggttagtagcgcctggaattctacaaagtcacttcttggtctcggtactgctacgggtaatcagacaaaggcaatcggcgccaacatcctgacgatgaataatctatcctcggtggcttctgggttgacggcggtctttgcatcgatgggggctagttcgacgtcttcgaaggggagatggttgaacttcggcatgtcaatggcttctgcggcgacgtctgtttgggctggaagcatagcgagtggagctggtgggtctggtgggtctggaacaacgcaggccaatggtcagaacattccacccattcctaaatttgagaagggtgggatcatggggccaaatggtgtaattccactgaagacttactccaaaggcgggatcgctacttcgccgcagctggctctatttggtgaagggaaagacaatgaagcctatgtccctctgcctgatggtcgttcgattccagtaacgatgacggggaatattggcggcggcggaacaattgctccggttgccatcaacatcagtgttaattctgacggctccagctcaacgtctggctcggatgcggacggcaaaggttggaacgatgcagcccaacgcattaaaaacatcgttctcgaaacgattacgcaggaaaagcgccctggtggttctctgaacaaaaacaccaacggcaacaggtaa

SEQ ID NO: 199020 - DNA, 1068 bp, Klebsiella oxytoca
atggacagaaatttcccttacgctattttcaatacaaaattcgatccagctcgggatagaaatgaaatcagcaagagactgcttagtcataattttagaatttcaaaccgtaaaagcagcaataatttttatgatttattaaatgtagagacaaggttaatattaaataaaaaaaggaaagtgcatttatctaaaaatcttgtatgtccaccagaacatagatctggattcgaaagattgattagtaaaatgaagagtggccttgacgttaaccattatttaagcaaagggatatacaacactaaaaaaaatgatgggatgttattagattttggccttcatcactttcatctaggcgaaggggtgaccttggacaaatctggtaatagttttgctgaaaggaccggacctattcttgtcgcaatggtgaaacctgatgacgtatattgtctaggtattttcagtcatgatgaaaatttatgggtcgacacaaatctaataaagcttattcacactgagtggcctggctgtttgagtcatagtaccagcagaatcagtgacatgaaaccagatccagacagtattgaccgaaagaagtttagaaagctcggtcttaattcacctgttaaagttgatgacggggtttattacaattcacttggtggtggttttaatgctgccggtggtagtattttagctagttttaacatggtgaataacaatcattataccctgctgctagaacattatgttccgtcagaggtagttaatatcatcctagacagatcatttgcttctgacaaaggtgctgtgaaattgaagttattaaatacaccaacttggcataacaacatcatcctgcacgaaaataccggtgatttatacgttgttggtttttataaaacaatagatgataaaggtcacataaccaaatgctctattaaaacaatcaatgcaaggtttttatctaaacatgctgtaaataatgaaaactttgtcttgagcaaaccagcgatcgcagtaatttcagcaacgaattgctatagaaacaacaacttttgtttttag

SEQ ID NO: 199021 - DNA, 219 bp, Klebsiella oxytoca
atgaaagagctacaaccgcaccaaaaacgagttattaaagagcatagtgagctgaagctaagggtcgacgcgctcaatacgttcatcaccagcaacccaacctttgccgaactttgtgaaggagaacaagggcttcttaaagcccagtttaaagccatgaaaatttacctagttgcgctggatttccgcatccagttgtttcagcgaggcgacctgtga

SEQ ID NO: 199022 - DNA, 336 bp, Klebsiella oxytoca
gtggaaagtcattcatatacagagtggggtgaaatctttgccaagcgtatagcacgctgcaaagatggagatgatcgcctgttagaactagctaatatttggcgtgacattcagcggttaacgactaatggtaagccgttgaatgaaagtcaaaagaaccgcatacttcgggagcttaaaaaggctcttgaggaactgggctatgacgtttcacaccttactcttgaagactataagggtacagaagattatcaggagttattgaagagtggttcaattagcaatgatgagcttcgcgaaatgatgagaatggtagcaaagggaccaaaaccatga

SEQ ID NO: 199023 - DNA, 516 bp, Klebsiella oxytoca
atgagtgagaatccagcagattacattgctatttcgatttcaatcgccgctttgattgtttcaggatactcagcaattcagtatcgcaaagccaactcaatcgctaaaaaagcactgggcaagactgatagcgccattaacatacaacagtctgctttaaaattgcaggaagcagcattggaaaaccagatcaccaattctatcggcatggcaagcaaggagatccgtgaggcagtactggccttatcgaatgttacgactgaatcatcaaactatgatatctttcaaaaaaatttcaggtcagcgcaggaagcatggttaaatgcacacgatcaggcctgcatgagctatcgcgaaggaaaactgaacaaagaaacgttcaaaaaaacctacctagttcctatcaggaacatttatgaagacaaagatttccagcatttctttagtccagctgatacctcaaactatccatcaatcattcacgtatatcgggaatgggtaacatcgcaacgataa

SEQ ID NO: 199024 - DNA, 144 bp, Klebsiella oxytoca
atgtcattgaatttaaaaccaaagaaaactcgtaaagaacctctgacactagaagaggctcttcggttgaaagcggctcgtatgaaagaaactcatgactttttccagagaaaaggtaaagagaagcttctgtctgaagcctaa

SEQ ID NO: 199025 - DNA, 492 bp, Klebsiella oxytoca
atgttcagcaagttgcaggccttaatgcctgacggtcggcatcgcatgttgtataccgttggaaccccacctgaagtatatgaagtacacttcaacgaaattgttgattatgatgactctcttttagagatcccggacggcattctcactggagtccggccgacactcctgaatcaaatgggtggatgttacgaaatcgccttcgacctcgtcagcaacatcaaaaaaggcacctcgttcgaaccaccgaagtcttacgacccgaacaagcttggtacaataattgaccgtgcgatcatctaccactacaatagacacaggccatattgttatacgttcttggcgtactcgccagctctgtcacggctttacatgcgaacgctaatgaagttaaggcatgaatttagcgacagaatcgacaagatccacactcatttagaaccaggaagaagagggtatgtcattgaatttaaaaccaaagaaaactcgtaa

SEQ ID NO: 199026 - DNA, 153 bp, Klebsiella oxytoca
atgttatacggacgagtaactgagaaaatgaacaagaacatcaattacgacgcaattcgcgcacagaaaaacgatatgatccagcgcttcctgcaggctaagaagaaagctgagcagagcgggcaggttgtgactaagccaattgctgtctga

SEQ ID NO: 199027 - DNA, 492 bp, Klebsiella oxytoca
atgaagcattttcacgaaatcttgcacgatgaattgcaaggttttgaggtttttaagtatacggatgtttgcttcactttttcaggcgatgaaaccaggcagattacattcaggttagttttctgtgccgaagaccaatctgaaaatagcaccttaaatcaactttttggtgcagaacttgctacactatccataagcgtagtgagtttttacaacattgaggccgaaagcaatgaagcttgtgattcaatgtttgagaaaccaccgggtgcgccaaatttgaacgcttcggagatgcagtacctttacagaacactaattgacattattcttcgaatatccgaaactgaacgtatccaagttttgacatttgaagcatactcagcagaactaaaccgagtctataaccgacttgttaggaagtatgcacaggacaagaacctgatagtacacattgagggggcttgctatgttatacggacgagtaactga

SEQ ID NO: 199028 - DNA, 273 bp, Klebsiella oxytoca
atggaaaattaccagagaaaacggcttcagcccctcgctctggcggtttacgttctggtgctggctcctttcgttctggttccagtaagccagtctctgagtcccgaacccagcattacaactcactcgccagcaccattgcagacgatccatccccgtcataccacagcagccacggatatcaccactcagccggtggctctggagggtatgactctggatgctccgattcgtcctcttcatcaggggcttgtgactaagtcgccggcttga

SEQ ID NO: 199029 - DNA, 156 bp, Klebsiella oxytoca
atggttcgcgtcagtgtggcgctggcgctactggttctgtctgtgctggtggacttcaccagccggattctgtcagtggccgcggacggtgttttggtcataacaggcatcactctgttgctaccagttctaatgaaaggtgccaagacaaagtaa

SEQ ID NO: 199030 - DNA, 645 bp, Klebsiella oxytoca
atgaagtcagttggatatatttacgtcattgaagatgttcaaagagggctagtaaagattgggaagagcgtcgatccagtcgcccggatatccaatattgtcaacatcagcggaattaccaagataaaacaattcatatcacaccgtatcgctggctatagccaggtagagcatcgaatgcatgtcatctttacagaccatcgggtacgaggtgaatggtttcgctgtgacttcgaggaggctaaatcagccctgatttctatcctccccgcagagataaccgaagaggaggttgtcgagacgagaaagcgagacatggagcgttccgcatcggccttagagactatgcgtgaaaagttttcaggctcatcaaccgatatacggcgaactccaatggactggacgctcgaatttttgtcgtcagcccatcaattcgttttagctcagcaaaagctttatggcgatgtgagagcgctgggccggcttggggtcgtttacgagggctatctcgagttatttgcggccctagaggactgcatctcaatcgcgcaagagataaacgaggaagaggctatagcaagtctcacgaaatacgaaagagcctgctttatagataaagcgcgcaaagctgctgagtatatctaa

SEQ ID NO: 199031 - DNA, 435 bp, Klebsiella oxytoca
atgtgcattcgctgtgaagaacgtaaagccaaaaaagaagaagtcctgagccgtgccaacgaaatcgctgatattgccaccttagctactggagaaatcaacaacattcccgatgcgctgcggatgacagctcgtcttgaggcattgggtagcgaagggctgcttgaacctgcgaacttgttcctcctgatcgcccactttgccagccagaacaaagagctggaggctcacaacaagcgtctgcatgagactctgaattatatgacgatgagcgaaaaatctgcgccgtcggacggtaataaaatgtcgaatgaagaggcgttacatgtcgtcgaaaccatcgtaaataccttcgaactggctcaggcacgagcaatggacggggctaatgcccagatccgcgaactgaagaatcgctttagcattaacaagtaa

SEQ ID NO: 199032 - DNA, 540 bp, Klebsiella oxytoca
atgattaatggaaatgtaattcgtcaggcaaatgacggcggcaatacctggatagattgctcagaagaagccttcaaacgagcgaaagaaaacggtacgccggtgcgagaagtccatttgaatgacgaatccttccgtgcggcatttgatgtctggcaggataagacggattgggttcagaaagaccggcgttttgatgtgttgaagccttgggggtggcatcgcgccgatgtgctgaaggcatttattgagcatctggaagaaagtaacgctcaggtcatccagtcacgcgaccactacaagcgcatggccgaggaatcgctgaaatgcgcagcaggttgccaggtggaagtggtttctgcgccaggtggagagcgagtgattaaagagcctatggcgaaactaccgcctcacatttatcgtgagctggtttctgaactgacgcagaccgcaaagaagcactgcggaaccggctcaatgagagaggcactgagttacgtgctttctcgctacgtagaaccggatcactcgaagaaatga

SEQ ID NO: 199033 - DNA, 639 bp, Klebsiella oxytoca
atgaatattatcgacaaggcgcacatgtttgctgccggcgcccatgctggcgtaggtcaaaagcggaagtataccggcgaggactacattcaccacccggttgccgttgcggagattgtgcggaatcacggtggcactgatgaaatggttgcggcggcgatgctgcatgacaccattgaagatactcaggtgacgttcggccacatcttcagtctgtttggggaccgcgtcgccgagatggtcgatgcgatcagcaataaagcactgcctgaagacggaaatcgcgagacgcgcttcttcattaacgtgaaagccctgcgtgagcgtctggacatgcagagccgcgtcattaagttggctgacctgattcataacactcagtctatcaccaggcacgaccaggaatttgcagcgcagtaccttgctgaaaaggcttttatgctgcgtgtgctgttcaccgacgctgagattggtgtgtcgggcgaagagatagagtccagaaccggcgaccaccctcttttgattgaagcggagaagatggttgccacggcgctttctcagcttcccgacgagctattcctcaaatcagatcgaattaatgccgaactgatggagaagtgggaaaagacggaagcctga

SEQ ID NO: 199034 - DNA, 1665 bp, Klebsiella oxytoca
atgtcgaccgccatttcaatcatcaacaacacagctggcgccgtggatttccgcaaggaaatgaacgtcattcatgacatcgtggcggagtgcgaaagcgagatcgccttgatgaatcaggtgcatgatttcgtttattccggctcgcgcgtgtcgatgatcaaccgcctgcaggaattgagccgcagaccgaacgatgagaatctccgcagcgtgccgaagttgagcgcagttgatttggatttcgtaaagcaaaacatctgggcggaatactggcgcaaggttactgatatgaccggtgctcttctcatcatgccagctgagcgccgcgaccagtggcgtgcccagttcacgctaggcgtccagaagaccgttaaaaaagattttggcggatttgagcgccgcgttgacgagttcgttggcgtgccagagttcacggccgaaacagttatcccgacgatgacctcgctactgaatgaccgtcataagtatctggctgagcgcgtatatggcttgttcaaggcactgagtcctacgcacaaaaccaacaaaacatacggcttcagtgaaaagttgatcatcgcgaactgcattaccgatttctggaaccggagcgtctcggttaattaccacaagtcggacatcatcgacgacctgcgcgtactactgcacttctttgcgcacaaagagtttatcaccatcaatccctgcgccgaggcactgtcagccgcatacagaacgcataactgtgaaaccggtgaatggatgaacatcgacggtaacttactgcgcgtgaagattttcaaaaacggtaacgcccattttgagatccaccccgacgtcgcctggaagcttaacgaggtactggcacacagtatgcctgcagctatcccggcaccatgtcgaaaggcaccaacaacaaaggcgccaaaagagttcggttacatccagaagaccgtatctgaaagaaccagaggtgttattcgcgatcgccgccatagtaaagacaatacgtggtacttcccggactcgtcactgcaaaaggctcaaatagaagaccttgagcgcacgctgagatttatcggtggcgtgaaggagcgaggcagttggctgttcccgtatgagccaaccgcaacattcgacagcatcgtgtccatgggcctcattccagaggttaagtcacaccagttctacccaacaccggcatccattgctcagtacgtcgcgcagatcctgaaatgcacgccaactgaccgagtgctggaaccatccgcgggtcgtggtgatttgctggcattcctcaatgcgacgccggagaacgtgacctgcgtggaaatatcgccactgttttgtgacatcctgtctgcaaaggggtacgacgttcataacaaagactttatcgactggtcgaagcagctgccttatgactacgacaagatcgcaatcaacccaccgtattcagaaggtcgagcaaaagagcacacgctcacggcactaaatcatctcagcgaagatgggatgatggcggcagtcctgccagccgggtacaagccggaagaatggataggcaatcagttcgtatgtgctaaatcaggccgagagttctcaggtgagtttgaggacaccggcatcacagtcgcagtattcgttttcaaaagagcatag

SEQ ID NO: 199035 - DNA, 180 bp, Klebsiella oxytoca
atgattgagttaacgctgaaggagtacaacgccatccacacagactatcggggcgtatggtcaacggagcgaaccgactggcccgattgggaaagcgtgagagagaaattcatgggcaaacgaaccatgatgaagcacggtggtctgttgattgaagatcttcactttcgtattgtttag

SEQ ID NO: 199036 - DNA, 612 bp, Klebsiella oxytoca
atgaaaattaaaaacattggcatcgttgcaatactttttctggcttcaggttgtaatgatgtagccgttaaaccatatgaaatggtgctcaacaaaacaccatctcaggtggatatggcaggttatacgatggttgatcaggacggggaggcaacggacaaaccaatcaaagccaaggatcgtttttctcagtatctatacgcaccatcagaatacgtaggcaaagccctcaaggaagagaaagacgcagatttagtcatctttggcacattagacgggaaaattgcgttctccatcgtcaatgtgagtgtgaatgagatgaagacggtgcaggatgtgctgaagagtaaatatggcccagctcaggcgactcgcgctggcgtgagagatcaagccgctttcgagtcaagtccaggcttctgcaaagcgtacaatccagaagcagggttagaacagaaccactgccctatggactattacgaaatttacggcaatgtagatgaggcatatatgctggttaagactaagagcatctacgctaacggccctgagaagttgacagtggtaggaataaccagagacgcaaaaaactacgaggacagcgttaagtaa

SEQ ID NO: 199037 - DNA, 1887 bp, Klebsiella oxytoca
atgcagagacgtcatctatttaaactattgatttctgcaataggaatgttaagtcttaataagaccaacgccgcgtcacaagaaaaagatattacaccaaatactgacatagatgaaattgttaagaataaaggatacgttgatcctgaagactttggggctgttagagctaataaaaacatcgatagcactagagcgtttcaggatgctatcgactatgcaataaaaaatggatttggtgaagttaagttcagtggtgtttattatattggtaagccgttacataaaataaaacttcctgcggatgatggttcgatatcatcactctttgttaaagaaggcgatataattttctctgcagaagagacagtaacgatgaatgcttgcttattaattaccggagatatatctctggtagcaactaatattgagcatgatatgataattggtccatggaatataaatgaatcaccaattaatacagagcagctagttggtattgcaatttcatcaggagaagactacagcagaacatctcggtaccatttctcaaacttcactatgagtaactattttataggccgtatatgtctatgcatatcggaagcaacttatgagtcattgaagtttattgggtgtggtatttctggattgaaacttggaatggaacgttgtcatgaaggtgtaatgacctactcaggttgtatgtctggcgatattatcggaggatggtggacgaacaggaattcaacttatcaagattctaattttttgccaccttatcctgctcatgatgttaatttagttggttgggtcgacttttgttatactgaggaaatccaatacgcacagatagatggtatgttctcaacaagacttgttaaacttgatgctttttttgataaatatttctttaaatcagctaatagcaaaaaaagctttaacggaggtcgattaagtaatagcgagagtacacatggtgctatcatgccaacttattatggcatagctggtagagctcgcctctatatttcgaggtatggaaggcctatttcgggtgttgttattaacagactcaaaactttaggttgccaccgtacccctgtctctatttttgcacctaaaatacttgggtgctacattaatgatgcttatattgaacgtagtgggttgtacgataatagaaaaaccattctgaaaaaaaatgcatttggtatagactgcgcggacctctatagagaaagcggttatggtattggttataccgttgctgaaggcttagatgttaaatccattattctatccagcggcaatcagatcacagaaactcacgataagtcaagctttacggttacaaaaggtatttctattaatagcttgaatcttactggtgcaagtgcttatccatacatgaatataacatcatttgatggtgaaaacattcatgaaaaatacggtatgtatgatgactttttcttaagtactcctattaaattcgcaaaaaattctttgaaatttgattatttaaatggtgtgtttaagcctgatgtaaatgttcatgctgaatcaattgatgctttttatattaagtgtggaaatgtcgttaacatctcaattactcttcatcatgtacacaaaaatagtgtcaaggacagtattgaaattagtaatctcccttacccattacctgaggattgttgctttatattaagcactgttattattccaggtatgtgtaagaatgttaatatttctgtttgccgcacagcagagggtgtctctcttatcaaagatagtgccggtacctttttttctaatgttgacttgattgaagccataacggatttttctatttccttagcttatgttattgtaccaagtgagtga

SEQ ID NO: 199038 - DNA, 2163 bp, Klebsiella oxytoca
atgtcatcagctacgagtaaaacttcatctaaagatgtggaaggaattgacttaggtcgccttattggcgaattcattgaccatcgtaaacttattatctcagttacttctctttttacattaattgctcttgtatatgttatatttgctacgccgatataccaagcagatgctttagttcaggttgaacaaaaacaggcaaatgcaatactcagcaatctcagccagatgctgccagacagccaaccacagtctgcgccagaaatttcactgattcaatcacgaatgattttaggtaaaacagttgatgatctaaacttacaagcgcgagtaaaacaaaaatactttccactattaggtcgcggatattctcgtcttattggaaataaacctgctagtttatctatatcacgtttatacatacctgaaagtggaaacgatgttccagagataaaactgacggttttagataaacgaaaatttgttatttcaatcgatgattcaactataactggtgaagttggagaattgcttgatgaaaagggtatttctctaaaaattgatgatattgatgctcaacccggaactgagtttacaatcggttacttaagtcgattaaaagctattacggatttgcaggagaatttgattgtagctgatcaagggaaagatactggaatgcttactctttcacttaccggcgataatccagcattaattgagcgtattattaatagtattactgaaaattatttagcacagaatatttcacggcaagcagcacaagatgctaaaagtcttgaattcttaagtaaacagttacctcaagttcgtagtgatttggaccaggcagaggataaattaaatcaatacaggagacaaagtgattctgttgatttatcgctagaagcaaagtctgttctggatcaaatagttaatgttgacaatcaactaaatgaattaaccttccgagagtcagaaatatcgcagctttatacaaaggaacatcctacatataaggctctgatggaaaaaagaaaaacacttcaggatgagagaggaaagcttaataaacgtgtatcatccatgcctgaaacacagcaagaaatactacgtttaagccgagatgtagagtctggtcgcgcagtatatatgcaattgttaaatcgacagcaagaattaaatattgctaaatccagcgccataggtaatgtgcgaatcattgatagtgcagttacacaaccaaaaccagttaagcctaagaaaatcctcatcatactcattggtattatattcggcgcaatggtttctgccggccttgttttattaaggatctttctgcgcagaggcattgaaacaccagagcaacttgaagaattaggaataaatgtttacgcaagtatccctgtcgctgaaagttttacgaaaaatattactcaaactaaaggttggcgtaagaaaacaacagaagaaatacaaggctttctagcagtagataatcctgctgatctagcaatagaagctatccgtggattacgtactagccttcattttgcaatgatggaagcaagaaataatatcctaatgatctctggggcaagcccaaatgcggggaaaacttttgtgagttcgaacctggctgctgtaattgcacagacaggtaaaaaagttttatttattgacactgatatgagaaaaggatatacgcacaaattattcggtgaaagtaacgctaatggactatctgatatactctcaggtaaaatcggagttgaaaaagctataaaaacaatttcctcagctggttttgactatatatctagaggaatggtgcctccgaatccggctgagcttttaatgcacagacggtttggtgagttgttgagctgggctagtgtaaattatgatatcgtagtattagatacgcctcctattttagctgtaacagatgccgcggttattggtaattatgttggtacaacattattggttgcaagatttgagcttaatactgcgaaagagattgaagttagtgtgaaacgttttgagcaaacaggagttgttgtaaaaggttgtattttgaatggagtagtaaaaaaagcaagtagttactatggttatggttataaccattatggttattcatatactgataaaaattaa

SEQ ID NO: 199039 - DNA, 129 bp, Klebsiella oxytoca
atgatctctgttgatattctgctcgccaaccgccggagatcccccggcaacgatgatttcaagaagatgcgtgatgaggtaagggcgcgcaacttattgcttcaatgttcaatgttcaatgttcaatga

SEQ ID NO: 199040 - DNA, 492 bp, Klebsiella oxytoca
gtggaatcacgaaatatcactatcgacccgcagacaacctttgataaaggaaaggcggagacgatgactgttccgttatataatacgttaacgcgtagtactcgcattaaaaaaattcagacaacggcaatgatcctgttatttctggcggcggtgattaattacctcgacagaagttcattgtccgtcgcgaacttaacgattcgcgaggatctggggctcagcgccaccgaaatcggggcgctgctgtccgttttctcgctggcctacggcatcgcccagctcccctgcgggccgctgctggaccgtaaaggtccgcgcatcatgctggggctggggatgtttttctggtcgctgtttcaggcggtctcggggatggtgcacagctttacccagttcgtgctggtgcgtatcggcatggggatcggcgaagcgccgatgagcaggcctaccttaacgccggaagcgtcaacgttcgccgcgacccgctga

SEQ ID NO: 199041 - DNA, 477 bp, Klebsiella oxytoca
atgcttagtggtaaagaattgggccgagcgatcgagcaggccatagacaagaagctttcaataggttctgccaagagtaaggcggaaatcgcacgtcatttcaaaataaaacccccatcaatccatgactggatcaataaaggctccatatcgaaagagaagctaccagagctttggaactacttttctgatgttgtgggccccgagcactggggactaaaaggatacccgctaactgatacatgtgagcccgcaacagatcccatagttaaaaatggttctattgacgaactctataataaggcttcgagagagaaaaaggctatcattgattttgtcctcttagagcaaggacagcgtatacctggctgggtagatagcgacgctaaagcatatttagactcactagagatgaagataaggagatgggcagagcaggaggaagatggaaaaaaacaaacgaaagccagagcttaa

SEQ ID NO: 199042 - DNA, 1155 bp, Klebsiella oxytoca
atggaaaacttcaaagtacgtcttaaaaatcacattgaacatgttaaaaatgttagagaacactgcacaacggaagagacaaccaagcaggctttgatacttcctttcttggacatcctaggctttaacgcatatgatccgcaaaaagtcaaagctgaatatggtgcggacttccctggtgtgaaagtgggtgagcgtgtagattatgctctattctgccaaggtgttcccgttatgtttattgaggccaaaggttgtaaagaaaaaatggacaaccattgccctcaattatctaggtattttaattctactcctgaggtgacaatatcagcaattactaatggcattgaatggcgtttttttacggatctcaatgagaaaaacataatggattcaacgccatttttacgaatcatgatggatgacattaaagattctgatgctgagcaattatttagattccggcatgacaaattcaaaccagaggccttaagaacacttgcagaagagagtgtatatatttctgcatttgttaaagttgtgagtacaagccttcgggaagtagatcatgaatttgttagatatgttgcaggacgagcaaacattggtcgtcaattaaatcaaagatttatagaaacaataactccattggtgaggcaggccgtagagaggtcagtaagtgaaatggttgtttctggtctttcatcaagaacatctattcctgaattagaatcccctgctgatgtaactgaaaataatgtaattgatgagcgcgcagatattgtcgatgcagagaatcccaacatagtaacaacctataatgaaagaattttatttgaaaaaatctgttctattataggtcctgcatacgaacttcaagccaaagacacagagtcatattactctattcttttccaaggaaaaacaaaccgctggctggttcgctattatgacaagaagaaccgctcaaacatacagttaccaattgatatcaatgaaataacaggtaatgaaattaaaagagccggacttgaacatgataacaatcgtattttcattgaacatcccgaggatgtattaaggatttcaggtttaatccttgattctttacaatatgtacagaatgatgagaatttcagaaagcgtcgtccataa

SEQ ID NO: 199043 - DNA, 897 bp, Klebsiella oxytoca
atgaccttatcggattcaatcagtgccatttcttcgccgggatcggcggatggtcgcttgccctgcgtcgtgcaggatggcccgacagccgccctgcatggacagcatcatgcccctgccaacctttcagcgcggcaggcaaagggcttgggtttgctgacgagcggcacctatggccctccgcacactggcttgtcggccagcgccgccctgtcgtggtctttggcgagcaatctggcagcgctgacgcgaacgactggatcgaccttgtacaagctgacgtggaagccctgggctatgccttcggggcggttgcgtttccgtctgcgagcgtcggcgcaccgcaccagagagaccgcgtttattgggtggccgacgccgattgccagcaatgggagaggtgcggggaatttcaaccgacagggggggggtaaaccttcagacagcagcgttattagcgggctggcccacaccgacggcaacggacggaaagggcggttatcagggcggacggatccgcaacgggaagctatcgacggacaggctggacgtggctgcgcagcttgcgggctggccgacgccgaccacgagcaacgaccgctcgccatgtccgcaagaggctatgcggacgtatcgcgacaatggaacaaagattcagaagcggctacaggatgtagcggcgctatgcggcccggcccgcttaacggcttctggcgagatgctgactggctgtactgccgggatggaaagtggaggccagttagacccggatcattcccgctggataatggggttcccgccagagtgggaagactgcgcacctacggaaacgctatcaacattgaagcggcggcagtgttcataaagtcctacatggtagcggtggatcatgtctga

SEQ ID NO: 199044 - DNA, 2628 bp, Klebsiella oxytoca
atgtctgattccgccgctttagcatggagctggaacgccaaacggcaggccatcaaccccaatagcgttgcagattctgcgattgagtatctcaccccgaaaggcgagcggaaggcgctcgcctatgcggatttggtcgataccatttatcgcacccccatgcgcccgcgcgaaggtgccgcccgggaagcattcgaccgcaaaggccgcgcccaatacctgcgccgccgggttcagactctaccggcgtttatccgcaagcggttctctcagcgactggagtcgctggagagccgggacccaaaagaggctgtacgctggttgtttagcacgtttgagcgtcatgtgttgcgtcgcgttgatgcggtaaacgcccaatacctgccacaaagcaacctcccggctatccttttcccgctgcgcgatgattttcacttactgccgtgggctgacaaaaaacgcctgaaacgactggcttataaactcgcaaacctgatgaaaagcgagtttatgcgcgagtttgattttcagtacgagaaaaccgccgatgtagagttttccacgatctatgcgtatggcgcgatcgccagtaaggcgatgacactcaatatcgcgatccctggctggggtcggtactgcgaagaggagctggaagccgaagaggcgctgcgtgccgttgcgcgccttcagtcggaaaagtggtggttaggtaaaatccgccgaatccatgactgttggcgagaacatctcatgatagccgcgggctacgtcagtaaagttgcgtcgccatattgttctgatccgtgcttcaaggaatggatagcccagaaaaaagcgaacttcgaataccttcaggctatggagctggaagatcaggccaccggtgagcgcagctctttactggacaaggtcatgggtagcacgtccaaccccaaaaacgcccgcgccgagctgatggtgcgcatgcgcgggtttgaggacatggcaaccgaaatgggtttggtcggcatgttctatacgctaaccgcgccgtctcgttatcactccacgcatgtaaaatcgggcaagcgcaacgacaaatatcgcgacgcaggcccgcgccagacgcagaaatacctttgcaaagtctgggcgcgagtccgcgctaaatggggccgcgagggtattcgtactttcggctttcgtgtcgccgagccgcaccacgacgcgaccccacactggcacctgttgttattcctacgcccggaagaggtggaatatgcaacggctattttccgcaaacatgcactgaaagaggacggcaacgagccgggggcgcaggagcaccgctttaccgttacgccgattgatgaaaaatttggatcggcaacgggctatatcgcgaaatacatttcgaaaaatatcgacggctacggcatggacggcgagttagacgatgaatcaggccagtccgttaaagagatggcaaagcgcgtgcgcgcatgggcgtcgcgctggaatatccgccagtttcagcagatcggcggcgcccccgtgaccacctggcgcgagctgcgccggttaggtaaccgcgagctggttctacatcctgagatcgaagaggctcgcgcagctgctgacgcggcggactggccggggtacaccaacgcccagggcggcccgttggtgcctcgtgactgcctgcgcgttcgtctcagctacgaatacaccgaggagggcaatgattatggtgacacggtcgccaaaataaccggcgtctattgccctctcaccatccgtgaatccgtcatttttacccgtaccaccgaatacaaaattgtgccgaagcgcaagccgtcgccggtcgagaatttgaccttagaaggccgcgcagcggcccctcggagttctgtcaataactgtacggggcgcgccgaatcggacgaaaaaccaccgtcagaaacggcggcgtcagctgataaaaccgcgcccgacgacagttcagtgacagaacttccgctgaatatcgatgttttgaggcgatattcacgccagcaaaggcaggagatcaccagcaggctaagaaaatccgcccgggaaaactcagatcaagccttcacgcgtaccgcgcgcggcctgcgcacgtcgattgatgacgaaaccgcgctaacgtgggggccaaaagtcaccgctgcgaaagatatgagcctgacgccagaagaggccgagaagcgctggcgcgagcagctgcggattgaggcagaacagcgtgcagataactatgcggcggcggttgcggagtatcagaagaaaaaagctgaagccgcattgcttcgtcagaacggcgcagcatcaattaaccagaatcagaattcaccacaaccagacattagagcgggcgctcagtcaatgcctgataaagtgatcgcgggtctggatagacgtaatatcattctcaccgatggagaggttagagcgttgctaagtggatgcattctggcgtatggcgaaatggaattcgctatcagagaaggggatttggtggtagagcatcggctttataagcatgccaaccacaccccagcatcggcgactaagcaaagtgagttacttagtcgctggcaaaaggctatcaggaagaaactatga

SEQ ID NO: 199045 - DNA, 510 bp, Klebsiella oxytoca
atgaccacgttcagtgtagaaattcacgaagatatcgtcaccagactcaaaaggagcgcccagccggagataacactggatctgccatcagtcccggagcctggcgataagctgtgggtgaaaagcatgcgcggtacttatattgtcgaaaccgaaaagtgcatgattctggagtcgtgccgtgtttcacgcctgcggccgactgtgcggctggtattgttatttggtattgcaactaatcatgggcacgacgcttcaggcgaacaggaggccctccgcgaaaggcgccagcatgcaccattgccagagatcattcgcagcattagatcggaacaaatccaaaaggagttgtcgcagagtcgtgctcgaatggcccgcaaattagcgctgctgaataagaaaggcaccttcacccctgagcgtgctggccatacatcgagtaccgttacaaatgactgtgctgcaggtggagtggaagatcctgattctgcagggagcgataaagaatga

SEQ ID NO: 199046 - DNA, 966 bp, Klebsiella oxytoca
atgaccgatggtggtgtgattgcaatagttcagaagcttgctaagcctctctttagtattgttaaggtgacgggaccatttctgttatctcaatccaaagctggggttgaaaattactctaattatcaactcaataagtctcgtcttgaagcaatctctcttttccttgctgaggaggcaaaaaacatttcagcggatagggctaaactaagagaaaaaataattaactcaaatggactcgaaagaactcgagcccaaaatgactatgatttactgactaaggaacttaataaattctccaccattagtaaaataaaaaacttcatcggtgaagatgatgtatttgataatgaaaaagaaataagtgatggatggattgataaatttaatcaacttgcctcctctttaaatgaagattggcgttcgcagttgctagccaaagcattttctgaagaattaaagaagcctggctctattactatggttgtcctaaacagcattgcatcatttgatgaagcaagttttcgtaggtttggtcaaattatcaacgccagcattagattgtatgaggttaactgcttcccctcaggtcatgctgatacagcttttaatatagatgggaaagaaataaagctaagtcaaatgctttatgaaatcagccatttgaatttaattagctcgactgattcaggatatataaattgcgctaacagcctaactcacttacgatatggaaaaagaattctcacaatagaatacccacataaccccatcccatatccggcacagattttatgctatttcttcacaacactaggcaatcaaattgcttcgttttatgaaagagatttgataccacagggacataaaaattttgaatcccttatcgaaagcgcaaaaagaaaagggtatggttatagtgaaacggagctcaccgaggctgattacagtactctaggcaactaa

SEQ ID NO: 199047 - DNA, 597 bp, Klebsiella oxytoca
atgagtaactctctcctgccgccttcctccggggactggcttcgctacaccgaggcgggcacgaccaggctgtcaacgatcacggttgcacttcgcacactgtggacgccgacagcctgtccggctgatttgctgccgtatctggcctgggcgttgtcggttgacaggtgggataagagctggccgacggagcgaaagattgccgctattcagcgttcgtactggctgcacaggcgcaaaggcacacgcgcagcggtgcggcgcgttattgaggatatggggttttcagcgacgttcgcggagtggttcgacgtcggcgacgagccgggaaccttccggcttgaggttgacattaacgaggtcggactgactgcaaaaacactggctgagctgaaccggttgataagcgacgccaaaccagtcagcaggcatccggcgcagctcaatatagccgcgaaggtgcacggagacatctgggtcggctcaacattgagctgcggcgacattatcagcatttatcccgccgggtatgaggcggaagaaaacattacttataacggcgtgattttccacgacggcaattttaactacgggtaa

SEQ ID NO: 199048 - DNA, 318 bp, Klebsiella oxytoca
atggtgaacttaccgatcagagggtggaaccagtatttactaccgtattttcgctttgcctcgcgaatgacgttcagtgctgcctccctgaatttgacttcatggacaataactccggccttttgccgaagcatcattacgccactgttctgtgctaatgcttctgccttgctggtggatatccctatttctgttgccagcatgattaaaggagccatcccttcagggatggcctctctgttttgcatggctgctaatgcaagctccagcgattttacgcgtttcaccaactcatcatgttgcgataggcttacatga

SEQ ID NO: 199049 - DNA, 1770 bp, Klebsiella oxytoca
atgacagcagagatgcaaatgcaggaagttatgtctgatgcgctttacagctgcctatatcgctgggtgaatggccatcaggttgaacgggaagatgccgaactggcgatgaaacaacatcaggactccactacccggtatggtcagttgacaaaggaactttaccgactagtggatagcaaccaaactacttacgagtggttatgcgataagggactattggcaacggataccagaaaacagcgcgaatatcgcatggcactggtagccaatatcatcggccccgacaacctgaaggttctattgtgcgacgccccccggattaaccgggtgtttcccgcttctacaatattgccggataccttgtccacatcgcctgaagaatggttgagaatggcagttaccgacctctctcgtatgggagcaagccagcgcggagaagtgctcatggcacgttacaacgacgcgttggcgatacatgccgattccgatatcgttcactgttataacggcgtggtatgggggcctgtgtctgataaagagctacaacgaacaatggcgcagatctttattgatgcgaaaactgcctattcgcagaacggtattaagtcagcggtcgaaaccatgaagttaagcctacctgttatggggattacagcccgtaatctcattgggttcagtaatggggtatttgatacccgttccgctcaatttcgtgagcacaacaaggatgactggcttctgattgcaagcgaattaccattcagtgctcaggtggaaggtgaaaggctggatacccatgccccaaacctctggaaatggttgagtcgttctgtcggtaacaacaaccggaaagcggatcgcgtattagcggcgctgtttatggtgctggctaatcgttacgactggcaactttttcttgaggttactggtcctgggggtagtggtaagagcgttttcgcggaaatatgcacaatgctggcgggaaaagtcaacacggtttcagctggtatgaaggcgcttgaggattcgcgggatcgtgcgctggtggttggttactcgctgattatcctgccagatatgacgcgttatgccggtgatggcgcgggcatcaaggcgataaccggcggggacaaggtatctatcgatccgaaacataaggcaccgtactccactcgcatctctgcggtagtactggcagtcaacaataatgctatgtcatttagcgatcgcagcggaggtatttcccggcgccgggtgattttcaatttttccgaagttgtgccggaaaatgaacgtgatccgatgctggtcaaaaaaatagaagccgagttggcgatcgtaattcgttatctactgttcaagtttgctgatcaagatgaagcaaagcggttactgtatgaacaacagaaatctgaggaagctttggttattaaacgtgaaggggattcactggtggacttttgcggctacctgataacatcagttgtctgtgacggcatgtttattgggaacgctgaaattatgccgtctaacccacgtcgttacctgtaccacgcttaccttacctatatgcgggccaatgggcttagcaagccgatatcgcttaccaggttcggtacagatatgccgggagcaatggcggaatatgacaagacgtaccagaggcacaggacaaaacaaggattgcggtcaaacgttatgttgaacgaagactcgaaagaatggatgccctcatgtgactcgactcaaaataaagtttataggtga

SEQ ID NO: 199050 - DNA, 783 bp, Klebsiella oxytoca
gtggggctatacgagaagtggtgtgactcaaccaaagaacaggaacagcgcaagtattactggatctatgtcgaaaaggatggtggccgcgacgatatccgcgatgaccttgctgagattatccgttcccattacgaccgactcgaacgtatcgtcgaggacgtaagtcggctcggatacaaggtagccgcaaaaatcctcagcgaagctatgcctcagacgtccagaagtcgctcaggcgatcttggcgagattcttgcgacagagttggttgaggaagagatcggcctgcgtgttcctgtacgccgtctccgctataaggacggccgcaacatggctatgcgcggcgacgactttattggtgccggatatgacggtaatggcgagaagctctggcttcttaaaggcgaagctaaaagtaacagggtgctgggtaaagctacggtcacgagcgctcgcaaggtactcaaccgcgataatggtcgttgcacgcctgattctctgttatttgttgccaataggctgttggagagtcaagaccctgatgacaacgagctaggccgcagtctccgtgacgaagtaggcctgaagttgcttcccgccgaccgtattgatcacatgctctttactatgtcgggcaacgggccccacgcgtcactaaaaaaggatctcgatgccacgagcaccaatcgagaccattacgtcgtgaatatccatatcgaagatcaccaggatttcatcgcagccatgtatcaagaggcggaagaccttggagacgattga

SEQ ID NO: 199051 - DNA, 3507 bp, Klebsiella oxytoca
ttggagacgattgacgaactgacctcattccttgcggccgcaaccgccgatggcatccttagccgtctcctctatcgtggtacggcttggtcgttgatgcgcagggaaggcgtactaccaccgaatgcgccgcagttcggcgcgacaatcgaaaccgatcttgctgaacatggcttcgccctgctgcggggcgcgatggccctgcgtgctcaggctggggcttcgaatctgacgagtaaggcattcgaacgcgcagccaatgctttcgaggctcttattcgcaatggtgatccagaggctccaggccgcgggttccaccgcactatcgccgccgcggcctatcacttggctggcttttctgccgtcgcttattcgcttttcaacgagatgtcacaggatctcaatgcatcaccgggtgagatggctattcgacatctaatcctgcgcgatctaggccaattacgcacttttgttcgcgggtggttggacgacgagactcacgacgatgaacagattgccgaagtgctacggggagaaaacggggacattgatgaggtgttagcgaccatcctcaatactacaatctgcagagccttggcccattttgacttcgcactcgagacaggtgaatctgagccgattgagaaagcacgggcactgctcgccgtagcggttagtctggcagataattcggagaatgttcctttgtggtggatctcgaacctctgtcgccacctgattgatgacctttggcagcattcgctacatcagaatctgccgaccgagccgccagagggggcagaggacaaatacccagacctgcgtcaactgtttatctcgtcgctctatgcgcgcaagacttccgaggtggagctatggccgtctcaattggaagcggcccagcgttccacggacctcaccgacgatttggtcgtcgctttgccgaccagcgcaggcaagacgcgggtggccgagattgccgtgctgatgactttgtcttcagaacggcgggtgttgatcgtcacgccattgcgtgctttgtccgcccagaccgagcgatccttcagaaagaccttcgcgcccctcggttttagtgtttcctcgctttacggtgccagcggcctttcaactggcgatgaagatgccctgcgttcccgcgaaatcgtcatcgcaacaccagagaagctcgacttcgccctgcgaagtgacccatccctgatcgatgatgtcggtctgatcgtcctcgatgaagggcacatgatcggcccgagcgagcgcgaaatccgctacgaaacgttagtgcaacgtctgcttcgacgcgcggatgcgggcgaacgtcggattgtttgtctctccgctattctgccaagtggcgacgaactcgatgatctcaccgcatggatacgctccgacgaaccgggtgaacctgtgcgttccgactggcgccccacacggcagaggtttggcgcgctaatatggaggggcgaggatgcgctgctccggcttgacctcgatgacaatggtccgttcctcgaccaattcgtcgtacgaaaaccggcgcggggtcgggagaggaagccctatccgcgcaagaattcgcatctcgccttgttcgtggcgtgggaattcgctggacagggcaagcgaaccctgatcttttccacccaagcaaattgggtcgagagctacggcaaacaggtagtggacctatgtaggcgtggctatctggactcgctgttgggggataatgcgttgatcgcacgcgctttggaggtcggtaaggaatggttgggcgaagaccatcccgccgttgcctgcttgagggtcggtgttgcaatccaccacgggcggctgccgagcccgttcctgcgtgaggtggaagttttactatcagagggggtgctgaaggtcatcgtcgcgtcgccgacactgtcgcagggactcaatctcaacgccgctgtcttgttagtaccaacattatatcgtgcatctgagaagattaaaggcgaggaattcgcgaatgtggccgggcgcgctggtcgcgccttcgtggacgtcgagggcctcatcgtccatgtaatgttcgacaagataaattggcgaaaggaagaatggagagagctggtcgtctctgcgaaggcccgcacactgaagagcggactcatccagattgtcgccgagatccttgttcggctgtctcgcgaaggtgtcctaggtcgagatgatgcttgggaatacctcgccaacgcccgtgaggcttggcgatctcccgtagaagaaaccgctgtcgctgaacgcctagctgctgggggcgaatacgaagctggtgacgacgatgaaggcgctgatagcgatgatgataaggaagaaaccattgacgaggagccgctctcgcagatcgtcgaacgtctcgatgcaaccgtgttcggtctgctcgaggcgcttgatgctgatcgcaacgaccttccaaaactcttggatgacgcactcagaggctcactttgggcccgtcagatcgcccgcgaggatgaggacgtaatcccactgcataagaaggtgtttgaagcgcgtgccgctctcatctggaagaccaccacggctcaggcgcgacgggggcattttgccatgggcgttggacttgaggctggtctcaccattgacgccatggctgacgagttagctgatctcctcgatcgtgccgacgctgctgcgttgaacggtgacgtcaacgaacttgtcgaaaccctcggtggccttggtgaacgtctgctgttcatgagaccctttgttcccgacaatgcgaacgcgctgccgacgaattggaaggccatcctacgtagttgggtgtctggcgaagatgttgttaacatcggaccgcagaacatgcgggtcgttgaagaggctttcacctatcgtttggtttgggcattagaagctgtccgtgtccgacgaatgtctctcggctggtcgccggaaacggtggttggtggcgcggcagcagttgttgaaacaggcgtcccgcaattcatgatggcgatgttgatccgtgcaggccttccatcacggcgcgcggctatggcagcgatcaagtgtgccaatcctgtatttgtaactccttttgagatgcgagcttggcttgaatccgacgagattacggcctataccgtcgcaggcgactggccaacacctgacacggcctcgctatgggcacatttccgaaccgaagccctcagagcaggcattcaaaaatggtctgttgaacattataagcgtctgcttgataccgagactgcccctattgctggtctttatcggatcgtcactgacgagggggacggacggacttggctggcgacgccagactattcgcggattgccgcattcaaaaagtcggcggttgaccccaagcccagcctgttctcgggccgcgtgcccggcaacaccaggctggtggacgtattgcgaattggccgcggaaagctccgctggccacctgctgatgcataa

SEQ ID NO: 199052 - DNA, 1320 bp, Klebsiella oxytoca
gtggctagtgatctttacgggcagattgcccgtattctgcagacgatgactcatagagagcttagtgaggcaccgcagcagatcgccggattggtggtcgcaaatggtgagggcctttcaaagcgagagcgtatcgacttggcgctggcaaaccttacacaggcggaattggcgcgtttcgcacttaaattcgccgcgcatcgtggagatgtcgcactcgatgagttgggccgtagggtacttgaggccggtgaccagcctttgtcccacatcacacgacgagacatcgctcgggcgttcggagatgatctcgctggtgaacgtggcacggtagaggtggtcgaacgatatttccccctttcctcgccttttgaaaacctttttggaagcaatggccgaagtttacgagatcaagtcgctcagcacatggatgtcaatcccggcgactggtcggtggaacacctatttagtaagatcggcgcattcacttgctccattgctaggtttggagcattgctcgaagaagctgttcaccctctctcccggtcgggagacgaacagttgcagactgtcactgcccttaacgagatccttgcgcgcgacggatatgagctagcggaggaatgtgaactctctggtcatccaatctttgggtttcgccctatcgtgcgtggggttgaagggcgacctaagaacctgatctttgcctcgcggggaccgaagccggagattggtttcgccgacgccatcaacaacgacatcgtcattctatccaatgaagaaagttgtttggtctatgaccggccaattggctcaaacggccttctctggtccgagcttgtcgcttggtggaacgatatctccccagagggcaatgctgcaaaccttggagcacgacttcaagagtctctggcctcagatgctgagcgaaagctctttgccacttattttaaggcctatagaaacgtccttggcgagacgctgcccgcgctccttccacaggtctaccttcattatgaccctgctgtcatgaaaaccctgcgccatcgcttacctcttccgcgtcaacgcatggactttttgctactgctcccagggtgtcagcgtatcgtgatagaggtggatggaaagcaccatttcacggaaaacgatcatccgtcattaaaggtgtatgcagacatggtgtcggctgatcgcgagttacgtctcgctggatatgaaatctatcgatttggggcgaacgagttggtcggggacggtgctgcgccgaggatctccgactttttcgaaaagctctttcgattgcatcgtctcgtataa

SEQ ID NO: 199053 - DNA, 186 bp, Klebsiella oxytoca
atgataaaagactacctgattgtggcgtacctgacggcaattgtcgcttggccattcacactggtgttaattggtctttctgctggagctgcactctatatgaggcgcagagtgctgtgcgttgccctcgtcgttctgttcatgctggtggtcatcgctgcgtggcagtttgaacgctacatgtaa

SEQ ID NO: 199054 - DNA, 1020 bp, Klebsiella oxytoca
atgactgtaactacacatcagaaacctcttaatacttttttacgccgggttagcgctcttgacgctcgtctggctgaaggcctttcaaagttgcttcctgattggtgggatgactcgcttaataattcagccagtatcagccagcaggtcattttaggattagcaaagtttgcaaatctggatttaacgacagttattaatcctacagctcaattgaggttcaatgagtcagtgcggagatataagcacgccgcaaacaagtctgttgaagagttacaagcggcaacggcagttgtagatggtatggcaaaaattgcagcttcagttgcaaaaaaaccttatcagggcctcccttctgctcgtgatatccgagagtcaattctgtctcaaggaaagccttgggtagactttctgtcgctactggaattttcttggtccgcaggtattcctgtgttgtatatgactgatattccagctagaaaaaagatggatgcggttgctataaaggtttctgagcgtccagttatagctcttacgaaaaaacataaacatgcaagtggagttttgtttggcttggctcatgagcttgggcatatcgcctgcggtcatcttgaaaataactcgttattaatcgatgaaaaaattaatgaagacgatgttgataacccccaagaaatagaggccaatgcttacgcgatagagctacttaatggtaggcctgatgcggcatttcacagtaaaggatggatcacagcagaggtgctggcctcagaagctctgcgcataggacgtcacaataaggtcgatccggggcatgtagctttgaattacgccaaaactatgagccgcacgcatagtggaaattttttccctgtatgtgggaaagcactgaacttactttaccctcgtttggattggatggagcaagctgctggaacttttcttgagtatgttgatgaagagaaggtttcggaagacaagtttgaaatgctctgcagaatgaacaacatcgaggtgtaa

SEQ ID NO: 199055 - DNA, 639 bp, Klebsiella oxytoca
gtggctgtattacttgataacgatgtagtactgaaattggcccaacttgatctacttgctgatggttgcaaattacttacaagtaagtatggccaactttatgttttagatacacttgtgtatcagttgagaggaaaatcttcccttcgtcgatatggcgctgctgcattagagcgagtccagcaatgcttatcacagggaacatttttgatgtttgaagagctgatcacagacccgcgcttgattcatttacagaacaatttcgagaatcttgacgaaggtgagatgcgcttacttcaaggtttattgaatcatcaggatttgcttctatcaggcgataaacgttttttgaaggctattgctgaaactgggtttatagaagatgctgctctaaataatcgatttgtctgtttagagcaggtggtttgctttcttataaatgaattatccttggaacatgtcaatgcgaaagcatcgctcgcttttaagggagaatgcagggttgatagcgctttaagaacatgcattggtaatggacgtacacatgaacatgttgttgagggcgtacttcaacagcttagagaactgccagcaacattgctatcaatagagttgcattggcgtttatctccgtcttag

SEQ ID NO: 199056 - DNA, 1107 bp, Klebsiella oxytoca
atggaacatcaggtgattaactttgatgactatcgcggggataagctcaaattggccaggatggctgttgggctttcatgcgaagaacttgccgataaaataggcaaaacaaaacagttcgtgagtaaaatggaaaagggttttaaacccacagagcaggttttagaactaatagcgaacgctttaaaaataaaacctgactttctgtactctgagcgtaaatatgcacttgaaagtgatgtttgccatttcagaagtaaaaagtcacgaactcaaactctcacaaatagtgttttggctagggcagagatacttaatatcattatatctgcaatagaggaagagatagagtttcctgatgtcagtatccctgagtttccaggggctgaactgaaaacctttaacgatattgagcgtgtagctgaggaatgccgccgagtgtggaaccttggacttggccctatctcatcaatggctaaattggctgagagtgctggtgtgattgttgcttatgtaacgggtgttgatgataaagttgatgcatttacagtccataacaacagaccggttattatacggaacaatgcgaaaaaaagtgtttgtagattccgttctgatataggtcatgaattagggcatttagtaatgcatgaagggataataactggtgataagactactgaatcacaggctgatcgtttctccagtgcgttactcgcgcctcggttatcatttataaaagagttccctcgcatcagaggtaagcaatttgattggaatgcattagttgctttcaaacttagatggaagatcagtttgaaaatgtgcatctttcgagcaacatctcttggcctgttaactcaagagcaggcaagaactgggtatattcatcttaattcaaagggatataccaaagttgagcctggggatgagcttttgaaatctgaagaacctaatatgttctcttctgctatcgatatgctcgatgatgcaacatggcttaacattcttgctaagacaggactaagccaggagttaataagagatttgttttcaattaatcggccattgattattccgagaggtactcttcagttagttcgataa

SEQ ID NO: 199057 - DNA, 651 bp, Klebsiella oxytoca
atgagtaacaatcagctagcaccttgttgggagtttcagccttaccttgctgaagctgatgttcagcacttactgtctgagattgccagcgtattagatcagctctactatcaccagcatgtattggatagtaactggtcaaaaggggtgagggcgtatgattgggtgcgaaatcatctgatccagaacgaatcatcaatcccggggctggaaatgctatccaagggattgaattatgtattggctttaaataaagtcccgctgcagttttccaaggattgcatcgacaatcctaaaaagcgtcatcgtcttttgcgcaacaaagtggagcacgaacagctttcattgtttggagatgtcgaagctgagcacgatattacgtggcgcattctggctgagccatttataaccgaagaggaaggcgacgagttagagcaatcattgcctaggtgggaagtcgcactagtcggttttaatagttatggagctcagattagtatggttactcatcaatctaatgtaacagtaccacttattcctgtcgattcaacttcccttcctggtgaggctgaaattgatgatgctcttcttcgtcgccgtaaaaaagaaaacgatcaggatgtgagtagtaatggaacatcaggtgattaa

SEQ ID NO: 199058 - DNA, 375 bp, Klebsiella oxytoca
ttggctgaaataacccgccagcaggtcgaatcacacgatccgactaaggtcagcagtaaggggctggctcaaaagtgggtagacatatgcaacgtcacccgagaacgcttccataaagatacctcggacattccgatctccaataaagcctatcatctccgcgttctcaaccgcatggctgtaaacgccgaaagcatgaagaacttcggaatgacggccgatattctggagcaggccgctaaagaggttagcggaatatacaccagccggctgaacgtggagacagcaggcaaaagcagcagtaacgctcaagcacgggctgcagggattaatccacaagaaaccgctgacgccttcaaaaagatgatgagttga

SEQ ID NO: 199059 - DNA, 285 bp, Klebsiella oxytoca
atgctggccgaacatctcgggctgctaatacaaagcgacccagagtacggaacagagacatggcgggaaatggcacttctcaacggtatgatgggcttgcatactgaccgcatcatgaggtttgagttgcagaaagcgaaagctgatctcacgcgcgccagactggagctgttaaggcttaaaaagcgtctgcccgccagatgcgtgatttgctggctggtggtcgtgagaattctggatagttctggacgtatggggaatatggcaacgttaatggctgagtga

SEQ ID NO: 199060 - DNA, 255 bp, Klebsiella oxytoca
atgataatggattacctgttgatgtcgtacattgcgcttgcttcttgctggcctgtgacgctgatcctgctatcggttgccgttgtcgtgttactgcatgctgagcggcgggtgctgaatgtgtccatcgttgtcttggttggttttctggtttttgctgcctggcagttcggggcgacaatgcgtagccccttttcattgctggtgggtggcgcagttaactttgtacatcctgtcgggaaagaaagtcgctaa

SEQ ID NO: 199061 - DNA, 387 bp, Klebsiella oxytoca
atgttcataagagttgtcaccctgtgtttcgtcacactggtactaaccgcctgcgtgacaggagagaagtttgctaaaatcagccaaggaatgagtcgtgcagatgtgattgacagactaggatcacctgatggtgtgcagacagaaggtacagttgaactgttgacctatgcaaaccggtttatgtccgactggtcatgggataaagccgactataaagtgttacttaataatggctttgtcgtccaatatggtgccaccaatatttatcacgatacaggaacgggggaaagaatgatggcagcaggacaaatcatgcaacagaataaacctgtacaaaccaactgctatcaaattggctcatctatacattgttcgagttattaa

SEQ ID NO: 199062 - DNA, 144 bp, Klebsiella oxytoca
atgaaattttcaacacctgattttatgcattgcagccgcaggacgctgttctggtttgcggcactggttaatgttgccaggtgggttgcagtagtcgctgtgacctggggcgtatgcatgatgatcgaatgggtgacggcatga

SEQ ID NO: 199063 - DNA, 597 bp, Klebsiella oxytoca
atgaacatctcaacagtaaacgagctcattcagtcgctggagagtgcgggcgagctgtcgatcaaagagcgtaagtacctggacgttatgcgctgggcgattcgtgttgctggcgagcgtgatgcggcgctgaatgcagagcgcgtatgggaaagggccatgatggaagtttgcggcgaggatggcccggcgtcggtagccagcgaaattcgagcgctgcaggttctccgggatacggcaatgcaggcgctcaagtctcaggttgagcagctggctgcggagaatgcggcgctgaagaatgtttttggccccggcgattcagtgcttaattttctcactattgcattacgccacacaacatatgaccagattgatcttgatgacgtcacgctggctttcaaaatgtcgctgcctgaaacccccgccaccgatcgcatcgtagccgggattaaggcagatggcctgcctgccaacatcgccgaaatcatcgatagcggagacctggaaactatctgctatgaatctgagcgctcgtacgctgaagatttccgcctggcactctataacttccggcagctgcgcgagggggccaaatga

SEQ ID NO: 199064 - DNA, 204 bp, Klebsiella oxytoca
atgagcatgagcaacagaaaatccagagcgctcctgtccagaggtgggaaacactggtacctgcggaaatgggtgagggtaagcaatcgccgctcagtcggcctggtgcattccggtaggcacgtaatgggtcgtaaggataaaaactccgctgctcagaaccgctggaaaaaccacacacaccgcacggagcgtgcagcatga

SEQ ID NO: 199065 - DNA, 348 bp, Klebsiella oxytoca
atgactgatatcaccgaactggcgcagaggttaaaacttgaggtccatcgcgcggtaagcaatttcaaccctcagatgaatattaaaaccagagacctaaaggagctggtagaggcgctggagaaggcgcagaagctagctactcagcagggaaatatcgcctgcgcacttttcgatgaagttaccgctcagcgcaagcgcatcgccgagctggagtcccacaccgtcaccgtgaaacttccgcgtccgggatttatcaccgtagcgggtgagcgctcaggcgtatatccgaaagatgaagttgaggcggcgctaacctcgcagggcatcaagtgggaggctgagtga

SEQ ID NO: 199066 - DNA, 453 bp, Klebsiella oxytoca
atggctcgaccgaaaaaaatcgttgagacgccggggcaggaaaaagcggctccggaagaaaaaacgctcgttacagaggggcagttaattactgctgaacaaaacggcgcacaagataagggcagcgttcagatggttgcagacaagttggtggtcaccatcgatgaaccgcagccaagcaaagaggcgctattgctggcagcccgcaacgctattcttgcgactctcaacgagcagggggcggcaattattgcccgcttcgaagagttcgccttcactgacagcctcgatcacccgctgaccaataacctcgacttcctcaatctggtacgcaaggccactgaggtaagcaccggcggcacagcggagcaggtgacaaacgaggaaggcaaaaagcaacccgtacgcagtgcgccggtattaaccgaacacggctggcacgttccgggctaa

SEQ ID NO: 199067 - DNA, 357 bp, Klebsiella oxytoca
atgagtgacaaagatatcgagcagcaaattaaggccaaaggcttaaccgccccgcgtattactccgcagcacattgagaccactattctcgaagagcattattttacagcttatgatggtattcgtgctgccaacatgggtgtaggtgcagcttggacagcgcataaatcgactgatttgctgaccttctgcgttctggtgttaaagaacggtttcactgtcaccggcgaaagtgcttgcgccagcccggaaaacttcaaccctgaaatcgggcgcaagattgcacgcgataatgcggtgaataaaatctggatgctggaggggtatttgctcaaacagaaattaagcgaacagtaa

SEQ ID NO: 199068 - DNA, 408 bp, Klebsiella oxytoca; identical to SEQ ID NO: 182227

SEQ ID NO: 199069 - DNA, 1950 bp, Klebsiella oxytoca
atgcaaaagaatcttccagaagaatcactacttgagaaactaacaaaagaagaacttcttaagctggttaaagagatgcatgaagataaaaaaatgcatgctattttctctacggacgcagatttgtatgctaatgatgcaactctaatgtggcagggtcggaacagattcttggctgaaacagtaacacctgtcacgataaaaagcgatgcgaaaaagagctatcctgaaaaggtcgggggaaatcatcgcatcattgatggtgataatttagctgttatgcgctcattaattaatgaattccgtggcggtccgaacactggattcgatgtggtatatatggacccgccatataacacaggaagtgatgcatttatttataatgacaattatagattttcaaaggctgaagtagataaattaaaagatgctattggaagagttgaaaagggtgtttcacttgatgatccatcccgacatactaagtggataaatcatattgctcctcgtctttgggcagcaagaaaattactaaagcatactggtgtactcataatatctatcgatgaacatgaattaccaagactgtggatgcttctagaagaaatgtatggtgaaaaaaaccgtattgccacacttatttgggaaagatcgaggaaaaatgatgcaaattatatttctgaaggtcatgagtatctattagtttgggcccgtgacaaatctgctctcgattcaaaaatgaaagaacttgctaaaaataagaaatgggagagatacaaaggaaaatggagaaagcccaaagaaggtgcagaagatatactgacagcatactctgatgctaaaaaaatatttttggatgacattcctaaaatccaaaaatatatgaatgatttttttaaaaatctgccagaagaccatcctgcaaagaaaattcgttatcgaaaagtagacaaaaatggcgtctataatgacgacggtaatctaaactggccaggcggtggtggtcctcgatatgatgtagtacacccaattacacataaaccatgtaaagtcccagcatctggctggaggattgctaatcctgaggtaatgcaggctttaattgatgccgataagattgctttcaaaagcgatcataatggtattccaagaatgaaaacctatttacatgaaatggaatcagaagtcgcaacttcagtgattagaagaatgggtcaaagagcggtagaaaccgtaacaaatattcttggaaaaaactcattcgataatcccaaagatcatgaaatgttggcagaactcttcaaccttgttacctggagagatcccaatgcaattattttcgatccttatgcaggaagtggaactactggtcatgctgttttgactatgaactctgaggataatggtcagagaaaatttattttagtagaaaatggtgatccttctaataaaaaaatcaaccgcgatcactatgtgaataatataacggctgaacgaattagaagagtcctttccggtaattgggctgacaaatctcagcatcccaaaatcaatgaaggattcaatttctatgaagctaaaaagactgtcagcaaaacagtcatcatggaatctaatagagaaaatttggctgatattattttacaggttgttgaagatgattctaaccgtttagattgtcgcatggatggctataaatatctaattggaaagacaaaacttggctttggaatcgcgttggtgtgggaagcaggtaaagccaatggacatcagcccttaacaagagaaatccgttcagtaattatggatgaggctaagaaagcgaatgtaaacagacctgtttatatttatgctgtagccaatgtatctccgttgaatgatcagctttatcgcttccagcagattcctgattcaattctggcgagattaaatttactggaagaagagtaa

SEQ ID NO: 199070 - DNA, 465 bp, Klebsiella oxytoca
atgaagttaagagaaaagaaaaaatcgtgccggattgaaaaaagtctatatccaagtaccatttttcactttaccaaagagattggttcattgaaaagtatacttaacagtggctactttcgagcttcttatgcgaaggaatcgattataggacctgattcaaaacgtgaatttggcataccaatggtttcattttgtgatattagattatcacatttgtatgaacatattatcaagtatggtcgttttggtattggattaaaaaaagaatgggcaattaacaatggattaaaccctgtaagttatctgaataaaaattgctctatgttcacggcctttaatgaacgccttagggaaatgaatagagagttacgcagtttgaaagaaaacgatgaagtttattccttagagaaggcaaatgatcttgaccctccatctccgaacagcttttgtatcttaagttaa

SEQ ID NO: 199071 - DNA, 1371 bp, Klebsiella oxytoca
atgccgattccgacagcgattcggattctgacagtgactccgattccgacagcgattctgattcggacagcgactccgactctgacagcgatgccgattccgacagcgatgctgactctgacagcgactccgactctgacagtgattcggactccgacagcgactcggattccgacagcgactccgactctgacagtgattcggactccgatagcgactcggattctgacagcgatgctgactctgacagcgactcggattctgacagcgactcggactcggattcagacagcgattcggactcggacagcgactcggactctgactctgacagtgattcggactccgacagtgactcggattctgacagcgactcggactccgacagtgactccgattctgacagcgactctgactctgacagcgactccgattccgacagcgactcggattctgacagtgactcggattccgacagcgactccgactctgacagcgactcggattctgacagcgactccgattcagacagcgattcggatagtgacagcgactctgactccgacagtgattcggattcagacagcgattcggactctgacagcgactcggattccgacagcgactcggactccgacagcgatgccgattccgacagtgattcggattctgacagcgattcggattctgacagcgattccgattctgacagcgactcggactcggatagtgactcggactcggatagtgactcggattcggatagcgactccgattctgacagtgactcggattccgacagcgactcggattccgacagtgattcggattctgacagtgactcggattctgacagcgattctgattcggacagcgactcggactctgacagcgattcggactcggacagcgattcggactcggacagcgattcggattcggacagcgactcggactccgacagtgattcggatagtgacagtgattcggattcagacagcgactccgactcggacagcgactcggattccgacagcgattccgactctgacagtgattcggattcggacagcgattcggactctgacagcgatgccgattccgacagtgattcggattctgacagcgactcggactccgacagcgattccgactctgacagcgattcggattccgacagcgattcggactccgacagcgattcggactcagacagcgactccgactctgacagtgactcggattcagacagcgactccgacagcgattctgactcggactccgacagtgactcggattcggacagcgatgccgactctgatagcgactcggatatcccgcaggccaatgcggataccaataccgcgctga

SEQ ID NO: 199072 - DNA, 204 bp, Klebsiella oxytoca
atgagccttagccttgatgtggtcaacggtcttggcggcaatagctcgcccggagcgaaggcaattctgacacaggtgattgtcacgcttaaggatacgggctcgtatgacatcccatttgctaccatagccccgctcatgcctgctcttaccctgctgatgctgctgccagccttcattgcggtgcttctcacagtagcctga

SEQ ID NO: 199073 - DNA, 786 bp, Klebsiella oxytoca
atgaatatttttgaattggttattcctggtacccacttaaattttaaagacaaaatgttggctttgaaatttaaaaatctattagagcagttagaaagtgcgttctatgatgctaatgtagcattaaatttatttgattctcaaagagcaaaagaattttatcatgatgactctactcccgaacgatggcatataaattcaaagaaaaagcaagagctaaaacaaaagatttgcaaagaacgcggtttatcactttatgattatgacgttgagctagatgctgaagtagaaattattttaaagaaagagaaatgggaaagtggtgagcatcctcttagccatctgcatagagtcatttttttgcatgctaaatcatttatttatgcattggatgcaattgaaaaatttttaaaagtgatttctgaagagcaagactctcctcataaaataaaactgttacacgctcagatagatagtgattttccaaacttaagaggcgtaagaaattcggcccatcatccagaggatagggctcgcggtctaggagcgggaaaacctccgcaacctctaaaattacaaacggtagatagtgattttttctccgctccacaagaagcgttaatgctaggttctttatgtgaaacaaaatttggatgtacgatggcagatggccattacggtgaagtagacatttcaaaggaatcgatggtgaaactgcaattcatcattcaagaggcgtttaatgcttttgaatggattgggccaaaacaacatcttccaaaatga

SEQ ID NO: 199074 - DNA, 228 bp, Klebsiella oxytoca
atggataacgacaacttagatatcaggttgaaagcaatcgaatatgcggtaggcagaatttcggtcgccatctgcgatggtagatcgcctgctgaatttactcaggagatcaaatcgcttgtgagcctgctctcttctggctccttggatcctgataatgaggcgattgttagacaaacggtcatgattctggaccctctcggtggcgatccctgggaaccgcgctag

SEQ ID NO: 199075 - DNA, 264 bp, Klebsiella oxytoca
atggttacgttggttaaaaaaaagggcaatacatctactggtatacatatgctgcaaaaacacgggaatcactataaattcagatgcgatatggataccttaaagcgtctaacatccgttgaggtcaaacctgagttctcgcacatttttaattcacgtgctgacggagttttccattcagaaacgtttgattccatagaagaaggcacagagaaacttatcgaatttataaaaaaagtaactggcgtcacatgcactgcctaa

SEQ ID NO: 199076 - DNA, 246 bp, Klebsiella oxytoca
atgagcaatacagcaaaacttcaactcggattctctccgctgagtaaaacaatcaccctggcgaaaatgcgagacctggatggagggaggctgcgtgttggcaatgatcgtggtcgtgacgttacaaacgaggctgctcagctcgtttggcaactggttatggctgaaggcggcgagattgcatggaaccttgatgacggcagcaggatggtgttgagcgcgaaaaaacaggagcgtgcggcatga

SEQ ID NO: 199077 - DNA, 1056 bp, Klebsiella oxytoca
atgagcaaaacgcatgtagtcagcttttctggcggcagaacatcagcctaccttgttcatctgatggagcagcgccgcatggccggtgaggatgttcgctacgtattcatggataccggcgctgagcacccagggacatacaaatttattcgagaggttgtgagcaactggggcatcgacctgatatgcctgcgtgtagatgttaaccctgagcttggaaaaggtaacggctataaaattatcagcattgatgatattggccctgatctgcagccatggatagacatcaccaaaaaatacggaaccccatattttggcggcgcgttctgcaccagaacgatgaaaatcgaagtctgcaatcacttctgcaaagacaatttcgacaatcaccagtcatggcttggtatgcgccttgatgaaccagcccgcatatggggagaaaatctttttcacctgatgcgcagaatgaatttcgatacttacaccatgggtagcctgtatcgggaactggcagccattgatacctatgagcaaatggtagagatgctggagcctagatttctgttggacaccgcaactgcaggaaggatagctcagcgagtaatcgacatcaggaaatcaaagcagagctttatggcggaaattaccgagttcgagaaagaggatgtattgaactggtggaagcagcagccgtttgacctggagattcctgagcatctcggtaactgcgttttctgcattaaaaagggtctgaacaaagtggctcttgctatgcgcgatgagccggaaatgctggcccagttccgcgcagtaatttcctctcccgatgtccggatagtcgatcgccgacaacaggaaaacaaaatcatgtaccgagagggacagtcactggatggcgtagaggcaatgtacgctggttacgaacgtgatgatatcgcaagaacagtgcgcagcagcggcgggtatgagtcaggctcctgcacagaaagttgtgaggcttttattgttgataacggacagcttgacctatttgcagaacaggagcgtgccgcatga

SEQ ID NO: 199078 - DNA, 399 bp, Klebsiella oxytoca; identical to SEQ ID NO: 187199

SEQ ID NO: 199079 - DNA, 1968 bp, Klebsiella oxytoca
atgacagaatttgaaataaatagtccgctgcttcatctcgctttgcttgaaacgctaaagcgagacgatataaaagatgaaatagatttgtttctaccctttattgcagtaactgcatcagaaattggcaagtcagttataaatgagagtgatatacaggataagctccagcagagttttgggtttaagcctccattggccgcggtgaaggtcttgatgacacgagctaaaaaaagaggacttctaatccgcgaaaattatgcttttattcctgttcacgataaaataactgaatggaaaaatggcttcgagcataaaaaagaagatgtggaaacatcccttgcaagtctcaaacaagaatttatccgttttacggagaccaacttttcgaaaaaactctctggcagtgaagctgaaaaactaattaccgagtttattgaagtgaatgtcagcagcgtgattagccacagagcttatcaaagaatggaacttgctgatcgcattaaaaacactaaccatgttatcgcatcttttataagtcacattcatcgcaatcagcctggagtgcttgagcatttcagtcggtgtgtcaaaggaatgttactagctaattatctattttatgcggataaagctacagacaagaaatcctataaaggaattaccgtttaccttgactctcctatagtcataggaatgctaggatacagcggacgccaagccaaagaagcatatacagactttttgaaccttttgaaatcactaggaattgaaattgttatttttgaccgcacgcttagtgaaatcgagggtctgctttacgcctggaaaaatgacatttcacggaaacgttatgaacgttttaatacgaaaacgttagaatggttgagggcgcaaggttatgacgcagaacgtattgatactgatcttaagcttttagaaagtaacatctctaaacttggtatcgatattaagctcggttttagtcctaaggcaatgtatcaatgtgatgaagcaaaactgcaaagtgctattggtagagcttttcggcgagataaaaatctagagcacgatactgtttgcatttcccgtgtacacaatatgcgggaaggtaaaataattaataacctcagtcagtcttttagtgtttttgtcacccccaatactggcctagtcaaggaggctaatgattttttccgacatgaaactaaccgccaggctattcctgtggtcgtttcagaacaatggatgacagccatgttctggctaaaaaaaccggacatttatgctcggctgcctcaagagcagcttctttcaacagcctacagcttattgtataccgatgatcgcttctgggaagctttcatcggtcgtcttgagaaacttgaaaaacgcggagatattactcaggatgaatttcttcaaatccgctgggatagtgatcttctccgacttgtccatgatgtttctgttgatgtaggagaagatttttccgaggaagatgttttcgacgttgttaatactatcaagagaaaacatgaggaaaaacatcaaagtgatatggcagaacttgaagaccgcagtcgctctgaaattgagactgtacgtcaagaagcatctacgcaacttcaggccattagtcaggaaaaacaagttgcggaggtaagaattgaatctctagagcgcaaaatacgtaaggtgagtgcgtttctggctggatcaatagcctggtttttcagtggattgcttgttttcgctctttgtctggcagctgtgaaaggtattcctgatgaaatgcagccagctttgttcaaaagcgaactatttaaaggtaatctagtcgggcttaccatagtcattaccttaatattcggattgataagcagcgttacagggatagatttagctgtttgccataagtacataaaagcaagaatggaaaaatggtttttgtccttatttaattaa

SEQ ID NO: 199080 - DNA, 1401 bp, Klebsiella oxytoca
atgtctaactctaatcgcatcaaactcacaaccagtgttatcgacaaagccaaagctgacgccaacaaagtacaaaccttctactgggacagtgaggtgccaggtctaggtttacgaattactgcaacaggagataaggcattcatattccaaagcagggtccatggtaagtcattgcgaataactatcggcagtgtaaaagtgtggcgtctggatggccccgcagatagctcagagaataatgcccgtaaggaagctcgtcgcttacaagctctgtgcgatacaggtatagatccacgagaagccaaagaggaacgtcgcaaagcggcagaagaaaagttcatgcaggctgaacgagaaactactacgcttcaggttgcatggtcggcttacatagaacacctgaaaactactcgcagcccaaaaacgggcaaactacgttcacctcgctatatcaccgaccatttcaatctctctacccctggtggaaaatcaaagacccgaggtaagggtaaaacagttgcaggccccctagcctctttaatgcccttgcgtctcaaagaactaaatgcggctaaactcgccgagtggctacaacatgaaagtaatgaacgtcctagtgttgcagcccatgcttatcggttgctgcgtgcttttttatcttggcttgaacaaagcccatggtctgggttggcggacaagaacgtatgcctgtcccatgaagtaaaagagcacttagctcgtgctgaaactaaagatgattgcttgcaacgagaacagctagccaactggttcgctgcagtgcagcaactaagcaaccggacaatttccaactacctacaaatcctactgctgactggcgctcgccgagaagaactggcgaacctaaaatggaatgacattgattttaaatggcacagtatgactatcagggacaaaattgagggagaaagggttataccgctgacgccatatgtttcaatgttggctcacagtttaccacgtcaaaagttgaacgatggcataacagataacccctacgttttcgccagtgcccgcagcactgatgggcgtatcaaagaacctcgccttgcacataatcgggcattggaaaatgcaggcttaccacacatcagcctgcatggattaagaagatctttcgggactctttccgaatggattgaagtacctgtagggattgttgctcaaatcatgggccacaaacccagcgcgttagctgaaaagcactaccgtcgcagaccaatagatttattgcgcaaatggcatactaagattgaagagtgggtgcttgaacaggccgggatactttttgtcacacctgaaaaagaaaaaacacatatccgtttggttgaaaactcacaagcgagaattgaaaaatga

SEQ ID NO: 199081 - DNA, 693 bp, Klebsiella oxytoca
atgaaagttcgatttatcgatattatgatgatctttgatatagagccttgtgattgtaacgattggcctgcaccaggaatgaccttaaaggaagatggtatatgggtaacgcctccttcagaaataaacaaagagataagagattcgttaacaaaagaggagcttcatattttaattaatcatccaacaggagattacacaaaaccggccattactatcccatgcgaaagagatgatttagttgattttcttgttgatattgaatttttcggatttggattaatcacgaagatagaaaaagaatctgaagatatcgagagactcgaaattaacgaaagcggcaatagaaaaagagcaaaagaaatgtatgtggagcattataaaaaggaaatggaaaagcttcgggaatcgactgtaattgaattaaaaaaacagataaatgactatttcccctctgcgagtaaaaatggagaagataaaaaaaccagcatggatcaacgtcacgaaatacttattcttaaagccattagagatttaggatatgaaccattggagatctaccaagaaaacggcaagcagggaatcaaaaaggatgtatggaacaaactatccaatgagttcagccgcaaggaaatttttgaatatcgatggaaaaaaatgagaggcaaagggaaaatcaaaaataaacaataa

SEQ ID NO: 199082 - DNA, 543 bp, Klebsiella oxytoca
atggaagcagcctgctgggctcacgcccgccgcaagatccacgacgtacaggtccgcactccgtcagtcctgacggaggaagccctgaaacgtatcggcgagctgtataccgttgaggcggaaataaggggaatgcagacagaacagcgccttgctgaacgtcagcaaaaagctaaaccacagctgaaagccctggaaagctgtctgcgtgaaaagatgaaaacgccctcaaggcactcagagctggagaaggcgttcgcgtacgccctgtaccagtggccggcactgacgtactatgcagagggtggctgggctgaagcatataacaacatctctgaaaatgccctgcggacggtcagtctgggtcgcaagaacttcctgttcttcggctccgaccacggtgagcacggagcgctgttgtacagcctgatcggtacgtgcaaattgaacggcgtggatccagagaggtacctccgtcatgtcctcaacgtcatagctgactggccagtcaatctgtccacgagctgttaccatggcgagtaa

SEQ ID NO: 199083 - DNA, 711 bp, Klebsiella oxytoca
atgataagtgacaaagagaagtataggttgctgcgattgtataaagctgtgttgaacagaaatcatgaggcacgtcttgagtggcgaaagcaatttgatgagggtgacaggggaaacctgctcgaccagatgctggtgggaagacacgagcatctgatattaccaccagaaccagaatatgagccttatcctgatatcagtggcctgcggtgtggtgccagaacccgctcaggcacggcctgcaaaattacagctatctattccaacgggcgctgtaaatttcacggaggcttgagtaccggcgcgaaaactaaaggcggcagagcgcggcaatatgagggttattgtgcatggctggagaaacaacgggccagcaaagctggcaggaagcgaacgcgcaaatatgtcagcgatgtggcaagaattggctctctcatcttgtcgaagatcggtgctagtgaaaaggacagaaagttacaggcagtagacggtataggcttacgtatgtcaggtggtgcgctggtggcagagttgccgaacagccatagcatcacggtacgactgacgaccaccagcccgcagtatggtggcgcccgatggtggtatgtttgtccgacttgcgggaagaggaaagcttctctgtattttctcgacgaatcgctgtgctgccgtcagtgtgccgggcttcattatgctagtcaaagtaaataa

SEQ ID NO: 199084 - DNA, 441 bp, Klebsiella oxytoca
atgcttggtaaaaaaaccgacacgtgccgcgacctgctcttttgcctttttggcaagacggcgcatgtcgtcccatcgcttacaaacacccagaccgggattagctttcggccagtttgcctcgtcgaaagggtcgtccccctcatcgagggtataaatcagcgcaaaatagctgtcatccttaatggaaagtgggtcagggttatcaaagttcttcagaaccttgatcgcataatcacgttgctcgtagcagataccttctttattaaaacccgcagtagtgattgcaaaaataagggactgcaggcgcgcgcctgtcgctgtttccagaacttcccagacgtcacgggttttatgtgcgtgcagctcatcaacgatcccgcagtgaatattcaggccgtcgaggttattcgcatcactggctacaggttcgaattttga

SEQ ID NO: 199085 - DNA, 516 bp, Klebsiella oxytoca
gtggaagtcgcggccggcccagatataggcgttggggttggagtcgaggacgttggtgacgccgacgtaggccttcttcaggttaacctcgtcgctccagtggtcgaacatcacgttaagatcccagatagccccctgcgcgcttttgaaggccttgctgatctggaattcgccaccgttgctttcgttgcccaggcggccgatcgccgaggcgccgttataggagccgtcgacgccgacatatttctggtcgccggtctggaagtgggcgccatagcgggcgtagccgctgaacttgaggccgaacggaatggccatatccggcgaggcggtggtggtctgcgggttggtgatcacgtcgacctttttgtcggccgcggcgtcgattttcgcctggcggtcggccagcgctttatcaacggctttggcgacgatggcgtcgatctgttcctgagtaaattcttgcgccattacagaggtaagcggaaaaaacgcggcgataaccggcatggttaa

SEQ ID NO: 199086 - DNA, 570 bp, Klebsiella oxytoca
atggcgagagagagcacatgtaaaatcttgcaaaatatatggtatggcaatgcaactggccccagactgcttttgaataacaaacctgagtatataatgaggaattcgctcacgcaggcattgagtatgactctcaaagatgctgatgttagagcggaacaaaatacagatgaatctaaacctgttgatattaaaatttcttggttacatagtaaagccaccgcacttatagaaataaaatggctcggttcatccgtcaaagtctcgccaaaagatccttctaaaccctatactacttacagtgattccagggcacatgatggagcacatcagctaataaattatatagacaatgaatatacaagcagtcctgatagaattccacaagcatatttagttatttttgatgctcgcagaaataatcttaaaggtcctgatgatactatagcaaaggaagatgcttttcacttcgaaaacgaagatatagtctacgatgaaaaatttgattctttagattatttcaataaacctttgaggttttatttgagaccaaggtattctagtttataa

SEQ ID NO: 199087 - DNA, 780 bp, Klebsiella oxytoca
atggaaaagcagtcaattgtaaaatatttaaaaataataattgctctaattggagtcatttcatttcttgttttggttatcttaccgattgcatttgatattagagatccttatcagaagatcttgatatcgcttggcacttcgatattcgttgcactgaccgtatcgttagttgtaaacaaactgactgcatcaaaaaccaattatgaagtccgtgaattaattaatgaaaaattcccgaaattattgatgattgaggataatggtctagaaaatgtcgtttataataacaatatggaattgcttgatatagatatagtggaaccatcaaaattatttatcataatgaatgatggacgaaatttctttactaataactcaaggcaactttcagaacgattcaaaaaggaaaataaagaaactttcatcgtcctaatggaccctgattcagaggcagaaaaattcctatgcaagaaaaatggaaaggatgaaagtggctattacggcaagaaaatcgaagaatccagaaaagaatatattgaatttcataaaaactcaccttcttcaaataaactagaaatattttattgccctaacggggtatctctatctattgttgctactgataatatagcaataattggtctgtatagaaattctgctggaaaagcattggtccctcctcattttatatttaaaaacattaataatgattgcgaatacttgcgaataatgcaagacgttaataacttaattgctaattctaaaatagcagaataa

SEQ ID NO: 199088 - DNA, 429 bp, Klebsiella oxytoca
atgataaaaaaaaccgaaaaaggacaagtaaataataagaaaaatcatctcagtcaaagtatcaatcaaaaatcatcttcgcatagaatacattgcgtcagtgtaagatttaataataaagaaatgaaattcattgatattaaacggggctcgacgaataaaagcgtatggcttcgtaaattagctttgaataaaatcatccctttaataccagagattaatatcgaagcttggaaagttttaactgacatatcacaaaagctaaatagaattgcgatccatatcgatggtaagagcagagatagccagcttactcatacagagcttttcgctgtgaagcgacaacttgaagagcttcgtcacaacttgttaagaacagatttttggagtgtccctcgtgaagggtatgcggaagatcaagaggggtaa

SEQ ID NO: 199089 - DNA, 1182 bp, Klebsiella oxytoca
gtgaagggtatgcggaagatcaagaggggtaagagcttcgctggtgttgttcgttatgtattgcaatcgggagcacaccacaaaagtgatccaatcgtcattggcgggaacatgttaggtgattcagcctgtgaactgatcgcagaattcgatagcaccaagcatcttcgccaggatgtcgcaaaaccagtttggcacaactcgctacgattgcctgacggagaaacattatcgaatgaccaatgggtaactatagctgacgactacatgaagaggatagggttcagtgatactcatctccgctgctatgtgcttcatgacgacgttggccagcatatacacatcattgccagcaggatcgacatggccggtgggaaactctacttgggtaggaacgaaaatcttataagcacacggatcatcagtgaactcgaaatcgctcacggtctgacagtgaccaagacagcaccttccattacaccaaagcaacagaagcgaagaaaagtttcccgtaatgaacagatgctttcagaacggactggccttccctcccctaaagaagctctccagcagatacttgataaaagtttggcagatacacctgatcttttaacttttatcaagaggctggaagaagcagaagtcggctggacggcgaatgtcgcttctaccgggaaaatgaacgggttctctttttcctaccgcgatatagctttcaaagcttcgcaattgggcaagagctacagttgggcaaatcttagtaacaggctcaactacaacccagaccatctagaagctctgcgaaccggcataccaccagaagccccccctgctcctgctcctgctcctgctcctgctcctgctcctgctcctgctcctgctcctgctcctgcaacagttttaagaaccactaagagaaaggaaagtatcagtgaaaaacttgctgaactcgaactgcaactcagagaagacaaacgaaacgagattgtagaaaagattctccaaaagaatgaggttaaccagcaaaagcatctcaggcttatcggctggcttccatttcttagaaggcttgcagagcttctccgaagctatggtaagagcattcttcacaagcccctccctggattctcaaatctctatgtaacccgacctttacataaagaaaggaaaattcatttataa

SEQ ID NO: 199090 - DNA, 765 bp, Klebsiella oxytoca
atgattagctcaggttttagcagagactttccatggtacgataaagagaaatctataagatttagtaatgctttatgcttgctcaatgctgatcaattttctttatcacgaatggcttcaattttcatattttacaaaccgactaaaagtttcttctttagcgatatacaaagtaaaagaagctttgaggtggggtataaaaatatatttgcacgatatgggtattatgatgatgagggtaaaccactacttattcgatcacaccaaccacggcatctattaaatacaatagctcactatggtgaaatgtctgaacttgatatagctaaatggtctggtcgtattaatgctaatcagaacagagtttataaccatgtgtcagaagaagatatgttagataaaatcaaagctattaaattgatcaagagtaattattgtaagagagagtcaattccctcaattgaatcgccagttgacttcgataacctttatcaaggggcaattcacttaacagaatttggttactgtgtgcataactatttggttcaaccttgtaataaaattaatcagtttttggaatgtgacaatgaggcactggacatggaatcaattgatagaatgaagcttgaatctatccgagaaaaagtaacaaaactgaagagtataacgcagaccgcttttgaaaatggtgattatggtgcagacaaatggctgcaacaccatgaaaaaaatttggaaagaattaataagcttttgaataattaa

SEQ ID NO: 199091 - DNA, 876 bp, Klebsiella oxytoca
atggcagatacctttgggattaggatcgattacaaagtaggcagaaataggcctgagaaagtctttgaggcgatggcaatgtacatcaatgcctacgaagacctcatacaactactgtctcaaactataggttgtaaagaggaattcagttttgtacttgatacagtcgaaaaaggttccataatcacttatttaaaaaaacgacaagggcaagttgttgatttagttaccacaacaattctaaaagaagttagagagacaagtaaaattttaaaagggatttcaaccattgaaagtgaaaaacagatcgatgaaattgctgaaaaagtggacgaaaggttagcgaaagcatttcctgatactttttctatagcacaacctgaaatcgaaagaaaaactttagcgaaaatactaaaacgcttcgccgatgctaacttaaatatgagacaggatgagtctgtcgacttaattttgaataaaaagaaagatatggcggtaaagctaaatactcatttcaaattttctgcaaacttagacgatttatatgttgagggtaaaattcataagaatggtattaccgatagattgtttatagtaaagcctgtcaatgatggaaattcacggtgggattgtaaaagtttgaatatgaatcaaaggtttgatgctgtcatgatggataaaacctggttagaacgttatcaaacagggttaattcctgcaattggtccaagtgatatcatgcttgccaagatgaatttaattgttaaaactaaaaaagatagtaaattaaataaagtgttacatgccgaaatattcgaagtcatcgacattataaagaacaatgaggaaatgaaaaatgaatcgtttcatttctaa

SEQ ID NO: 199092 - DNA, 279 bp, Klebsiella oxytoca
atgaagggtatgcagaagatcaaaaggggtaagaacttctcaggtgtggtccagtatgcattgaagctaggttcacatcatacaagtgatccaatcgtcattggcgggaacatgttaggtgattcagcctttgaactgatcgctgaatttgatggcactaaacagcttcggccagatgttcagaaggccgtatggcacaactcgcttcgattaccggatggtgaatcactaacggctgtgatcttgaccctccatctccgaacagcttttgtatcttaa

SEQ ID NO: 199093 - DNA, 423 bp, Klebsiella oxytoca
atgaacaatggagattataatttactttattataccaataatctaaaaacaaaaagaacatctcgcgatcctaatttaaggaataattgcatcagtgttagatttaatgatgaagaattaaaaattcttaattttaaaagaggagaaagaagcaaagcagagtggcttcgtttaatcgcactagaaaaaatcccaccaactgttccatccattaacaatgaaacttggaaagtattatctgaaatatctcagaagctaaaaagaattacgatccatatcgatggtaagagcaaagatagccagcttacccatactgaactatttgctgttagaagattaattaaagagcttcgccatcacctgataaatgctgatatatggagcaaccccgatgaagggtatgcagaagatcaaaaggggtaa

SEQ ID NO: 199094 - DNA, 417 bp, Klebsiella oxytoca
atggttgggtcttcgatagtgataaaagagcatttaatagaatcaaaaaaatatgtgattaaccccaaacatagatgtaatgcagctaaagctgattgcacccaatggacggttactgaaaacgaagagcttgtttgctttggtaactccatagttaacaattacttatgcccatcccaatgctattggtgggtagttgataaagaaactagtcagcgattagggaaaactgatattgacgatgcctatattgctaaattcgtcgttgataataatgcaacatggcatggatatccagtcacagggaaaagagagttggatatcccggatagttctattttgagtatttggggaaacagtggtgttcttaaaaagaaatacataaggaatatagcaaaaaggatggggtatgtctga

SEQ ID NO: 199095 - DNA, 1197 bp, Klebsiella oxytoca
atgtctgatatcgcacttaatttagaaattgaaggtgactatattgactcatttatttatatgggtgttttatttttagttgatttcgatttcaatattcattcatatcaatggaatgaaatttgtgattttatttggagacggaatggatttaatgataaaaataatgctgcatcggttatatcctatttaacaaaaggtagatacagtagtcaacgaaagcatgatttgattgatacacttattaatcaagatgagttaaattcacttagctctgataaacatcatataggatattatccctcagatatatatatatattctaagaaaatatattacactcatgagaaaggtgtttatttttcagcattaaaacatgaaacaggaggagttagtggtaataaccctgtcaaaatttttgatacaagatgtttttcaatatcacctaatactttagatcgcctcgcattagctgcaggtcgggaaggagtgctaacatgcgaagctggctactttactaatttccggaaaaataaagacttcaagcaaatttcaaatagtgactccattgatatcgagtggattgataactatttaatgataaataatactgggaaaaatgtaatagttaataaattcaaagagcagcctaaagacgaagactttattttgaataaggaattattgctgaatattcttaaggaaaataacaaaacaaatcccgaaattatggaagcattcaaaagtgagtctggaatcccagataaaataaaaaaagaaatcaaaagaattgtagtatctctaagtccggaggaaattaagactgataaaaattatgtttactcatggacatctggagattttaatttctttttagatgacaatctagcagtagatatttataaagacaatacactcttggaaactaagaaattcattaacattcttgataaacaaatcgatagggtcagaacctccggttgtggaacatatttagaaagtgataataaattgctctctttgaatgatgataaattaaccatggttgatgatgatattgtcaattggcgagtatttccaagagcaaaaaaacattgtaatcatttgcatataattaaagatgatctgattaatataaaagtttttgatatgagcccagatgaaccttttaaatcatatcttaaaaagcataattag

SEQ ID NO: 199096 - DNA, 387 bp, Klebsiella oxytoca
atgaataaatttattgttacatccttttttattgcaatattttcaatttctggctgttctacatccggcaaccaaaaaatcaaaaatgaaacggcacagagtctacaatcaaaaataattaaaaacaaaacaactaaggcagagctacttgttcaacttggtgagcctgacaccagaacgactcttgacgatggcaacgagcaatggagatatttcatgtataacaatcagttcaatgcctcgacttttatccctgttgtcggtttgctaactggcggttcccagactcagtctaaaactctcgaaatcgacttcaatggagaaaccgtaagcaagtggacattctctactgataataacaatacaaaatctggcattctccagtaa

SEQ ID NO: 199097 - DNA, 894 bp, Klebsiella oxytoca
atgggattcagtgatactcatctccgttgctatgtgcttcatgacgacgaaggccagcatatacacattatcgccagcagaatcgacatagtcagtgggaagctctacttaggtaggaacgaaaatcttataagcacacggatcatcagtgaacttgaaatcactcataacctgacagtgaccatgacagcaccaaagcaaccgaagcgaagaaaggtttcccgcaatgaacagatgctttcagaacggactggccttccctcccccaaggaagctctacaacagattcttgataaaagtttggcagatacacctgaccttttaacttttatcaagaggctggaagaagcggaagtatcttggaaggccaatattgcctctaccggtaaaatgaacggcttctcattctcttaccgcgatatagctttcaaagcttcgcagttaggcaagggttactcttgggcaaatcttcaaaagcaacttagctacaaccctgaccacttagaagcgatacgaaccaacacaccaacaaaagccccccctgctgctgctgctgctgctcctgctcctgctcctgctcctgctcctgctcctgctcctgcaaaagatgttgcaacaacggatattccaagggaaagcataagtgaaaaaattgtcgaactggaactacggctcagagaagacaaacggaatgaaatcgtagaaaagattcttcaaaaaaattccgtcaaaaagcaaaagcatctcaggctcatcggctggattccatttatcagaaggttcatagagcttctgcgaagctatggtaagagcattcttcataagacccctacaaacttctcagaagtctattcaacacatcatctaaaacctgcaagaaaaattcgtttatag

SEQ ID NO: 199098 - DNA, 1446 bp, Klebsiella oxytoca
atggctggaaagtcccttggtacattaacaattgacctgatagcaaaagttggcggatttgttcaggggatggataaagctgaaaggtcatcccaaaaatggcgtgaacaggtaaaaaaagacgctagagaagttggtgcgtcaatagctgctattggcgtagcagcagcaaccgctgctgttggtattggagttgctggactttctattgtaaaaaatacggcccagcaggttaccgaagcagaccgttgggctaagtcgttaaaaatttctacgcaggatttattatcctggcaatacgcagctgaacaagccggtttaactggcgacaatatagctgatatattcaaagacattaatgataaagtcggtgatgcagttcttaacaaatcaggtgaggctgctcaagcgttggatacgctcgggctttcagctgagaagctggctcaacaatcccctgataagcagttgctagctatcagttctgcattgcaaaaaataccatctcaggcaggaaaaacaaacattcttgaaagtcttggaaatgacctgtcaaaaatgttgccgttgttcgacaacaacaacgagaagctaaaacagttccttcagttatcaaaagattttggcgtagctccaccgcaggaagatattgataacttggttaaagttaatcagtttttccaggatattgaaacaagcgcccgcggtttaaaaatagaaattgcgtctgggcttgcaaaagtagacttatcccctctgcaagacggacttgatagtattcatgatgtgttcactgaccccgctatcctgcagggcctatcagacctagttggggaggcgatcagtttagccggtgtggttggtcgcattgctggtggacttggcgccattgcttcctatacgcgaacgcggatcggagcggtatccggtaactacgattcagctgacgaaaatgatatagcacaacgaatagaattccttaataaaataggtaattcaagcaaagaacagagggatgaattagattttttaaataaacgccttaagtttcttcaggctatgaaatcaagtttaactgctgaggatgtagcgaaaggagctaaaggattatcatctcttctttctgatatggggattgagcagccaaacagcaacgattataatttagggaaagggcagtcgaatcaaaaggtaacaccaaaaagtaattctgctgacaacgcttttaaggggcgacttcttgatttacaaaagcaagccgctctcatagaaacaacgggtaaaaaaacagctgaagtcaccgagcttgaaaaggttaattttgatataaccagcggcaacctgaaaaaatatcagaaggacagaaggaacaacttagaattgcggcaaaagtccttgatgccaaaagggaagagttacggattaatcaggagaatgctaaggtag

SEQ ID NO: 199099 - DNA, 123 bp, Klebsiella oxytoca
atgatatacaaaataaaatgcggcatgatgctgggttcaaaaatatttttgcccgatacggatattatgatattgaaggaaagccactacttattcggtcgcaccaaccacgacaccttttaa

SEQ ID NO: 199100 - DNA, 201 bp, Klebsiella oxytoca
atgagaaatttaatggtttacctagggctagcacccaagaaagacgaaatggagatggtaaacaaaatcagagaaagttataacactcttgaagttgttggcagaggtactgtgaggatttctgcgaaggaaattcgacaggaccctgttttcaaagatctttctgagcgagcccaaagaattgttgagaattctcggtga

SEQ ID NO: 199101 - DNA, 609 bp, Klebsiella oxytoca
atgcttctcgtaggacgggtccttgacgtcgtgcatcagcgggttgaccttcaccaccttcacgttctcaagcttcgtgttgaagtactccacttcctgaccggcgtcgttgattttgtaccagcggaactccgccgacttcagcgtctggccggtggtcaccgccttgtacaggtacgggctggaggcgtcgatttccttagtgaacaggaacggcgtgtggattcgcgtgccggtcagcttcccggtgttgttgtcggtcgggatgtacaggttatgctcctgcgccaccacctcgatgctgccctcacggtccttcacgtccacggaacctttgatgtccgcgccgccgtcgtccttcagccacagatagactggtattgccatattacttctccatttatacacgtcgtccttcaggctgcctctttgttggctgccttcatttgccccggtcacatagtgaactatgctcccggggacgcattcagttgccgccgcgaggcagcccgaatgactgtgtatcattttaaaaagcgccatcatcctgcgatggcgcgggggtcatgcccggtggctggcaggcgttcgcctgcggcaccagactga

SEQ ID NO: 199102 - DNA, 222 bp, Klebsiella oxytoca
atgttttctaagtatgctcaacaaaataactatatagttatgacagcaaacttaagaagctcatatttagttttaagacttgccaaattgcaaaaagaaaacggtatgcaaattattaaaatgacagaatggactaacctcactgaagttcaaaaaagcgaagaggatcttttcatccgtgcttataaagatattaacgaggagatgaaaattgcaaactga

SEQ ID NO: 199103 - DNA, 222 bp, Klebsiella oxytoca
atgataccgctaatgagtggttatagggataaagacactttaactgttaaatttaccacccattacaatcttctggatgatgatgttattttggtaattaagcaagatgaaatcaattcagctacattattctcatttaggcattatgagatattcgaaaagtctaaggtgaacaagaaaaacttacttgattctcttatggctttcttcgcacccaaatga

SEQ ID NO: 199104 - DNA, 204 bp, Klebsiella oxytoca
atggataacaggagagccagaagattacttggtgtcgatatcaaagatacttaccgcataagcaatcgccgctggctggtatgggggagcaactggccttttgtatgggaacatgcaaaaccatcccgtcgccagaagcggaaagcaaaagaggttgccgcttaccgagcagagcggaaaaagcaacaaccaaccatcgaatga

SEQ ID NO: 199105 - DNA, 612 bp, Klebsiella oxytoca
atgagcatgaaaaccgaaaaaatcgtgatgatggatagcgatgaagctgccagcattcagactataactggctgggtagaccgccatggtcgtttctggggtaatgatgaataccaggcgcgttggtgcggcgccactcatcgcaagtgcaaaaacaaacctgacgagcaccccgttcatagcactcatggctattgcgaagaatgccaccgcgaaagccgccaggcgaagttcgccacctttgcgcgcgcggtatgggccggagagccgctcgttatctttgatgatgaccaatactttttcgatgctgaatcattggcagattactgctgggaacactcacttcttccaagcgaattgcaactacttatctgcgaacctaattacccgccagagttcgacttagagcagcactgcgaagaaatcatgcctgaaggcgatgattattactgcctacctcaggccgtacgtgatgctgccgaagcactgaataaggccatcaaggaaagcttgccagtatcgtggagcggcactgaccgtgttgccatagtatcggatgacatactcgacgatgaacagaaagctgaaattttggcggagcgtgcagcatga

SEQ ID NO: 199106 - DNA, 294 bp, Klebsiella oxytoca
atgactaatcgtgaacataagaagttattacgcgccatccgtcatcaacaaggtatgcgcgaaagccagcagctggcgaagaagattgatcgcgctttctcgcgcatctcagaagactgtagcaatcgtgttgtgctggctacgtcattgggtagcctacgtgacaaaccagctcaggaagagattgcagagcgtaaaaaccgcatctggtacaaacagccaggcgagcgcggaattacctgcagcggccggcagaaatcacggggtaagagcattccggcttattttgactaa

SEQ ID NO: 199107 - DNA, 645 bp, Klebsiella oxytoca
atgacattgagtgagttggcattgcgtgttgatagcgatgtcggaaatctttcacgccttgagcgaggtaagcaggggtttagcgagcagattttacaaaaaatagcttcagctctcgacgttcagatatctgtactattctcttctgatgaagatataagtactgttaatgcatacagtattgagtctttgaagaaagaggagggaaaggatgtgtacagagttgacgttcttgatgtttcagccagcgccggaagtggttcgccgtcaaaagaccttgtcgaagttgttcgctctattgagtatgacattgacaaagccaggacaatctttggtggcatgcatcagcgcgacgtaaagttaatcaacgtccgtggcgacagtatgcaaggtacaatcgagcctggagatctaatattcgtagatgtaaggattaatcactttgatggcgatggtatttatgtctttgattttaacggagatacatttgttaaacgccttcagaaagtaaaaagtgatttggttgtaatttcagataacgttaaatacaaagaatggaccattacccctgaagaggcagcaatgctacatgtatccgggcgcgtaatgcttagtcagtcccagcagttccgccgacacggctaa

SEQ ID NO: 199108 - DNA, 213 bp, Klebsiella oxytoca
atgtgtacaccgctaagaaaaatgcgtgtagagaaagggctaacaatctctgaggtttccagaatgacagagattgatgtaggcaaccttagccgcatcgagaggggaaagcagatcacctctatagaaacggcggagaagctctcgcgattcttcgaagggaagatcactgagatgcagattctctacccgcacagatacaccgcagcttaa

SEQ ID NO: 199109 - DNA, 738 bp, Klebsiella oxytoca
atgccaggacaacttgagcttgtaaacagcacgccttattcattcattcgagatgaagtattgcgcctggaaaagaaatactccatgccaattgagattggtggaccaattccagaaacaatcaactcaaagggatgggtgtatatcttatccaatccctttatgcctggccttttaaaggtaggcatgacaacaacctcaccagaagctagggcgaaagagttatccgctgggacgggtgttccggcaagttttgtcgtcgaggcttcttacttttctgaagatccgagaggtgatgaatcaaaaatacacaaagccttatctgagtatcgcgtcaacaatggccgcgagttttttcagtgttcaatagctcaagcacatgaagcttgcagatcttactgtctgtgcgaaacggaatcgtcacttgaagaaattgccaatgactacgtggcgatctgtgttgataaaccaatcaagttagatcttaaccagtggtttgaagagttctgcatccctcacataggctgctcagtgaacgtcgcgaaaattatcttcgaattaggttgctcaagacttgatgacatcaatcgcgacggggtttccatcatcatcgagaacgagcaaatgaggggcgtcatgagtgaatctcaccaaagctatctcgcctatctagaagagattcatgagcgagagataaacactggcgtgtttggaccaagagagcaggcaggtttctga

SEQ ID NO: 199110 - DNA, 858 bp, Klebsiella oxytoca
atggccgacctgtccaacgggtacaccaaggtcgccaatgagatccagaagctaaaacctcgcctgagactttcaggaagggagtggcaatgttttgaggcggttatctggctcacctatggatggaataaaaaacaggatagggtaacgaacacagtgattgctggcatgacggggctcagcgacacgcatgtttctgacgctatcaagtctctggctgagcgaaaaatcatcttcagccagaagcaagggatgatgaaaattgtaggggtgaatactgatatttctgcctggattttagaaaaaccggaaacgggaagaaaattcccgaaaacgggaaaatccttcccggaaacgggtaaaaggttcccgaaaacggtagacacccaatacaagaacaagaacagtattaaaaacacttcgtcagagaattctgacgaatcccctgactcgctaccaaaatgccttccagttgtccgggatggtgccgcagtgcaaacgccaaaaggcgataagtggggaaccgctgacgacctgaaagctgccgaatggatttactcgaaagtttgcattgtagctccgtcaagcaaacaaccatcctgggcgtcatgggccaacgacattcgcctgatgagaaacgcccttgaggtgacccatcaggacatttgccagacattcagttgggccaacaaagatcggttctggcagtcaaacatactcagcccagcaaagcttagggacaaatgggaaacgctaaaaatccagatgaaccagcccgggaaaaatcagccagccgcggaggtgccaacagcacgccactggaatgatagtcagtcctggagggaggaattcctgtga

SEQ ID NO: 199111 - DNA, 708 bp, Klebsiella oxytoca
gtgagaaatcttgttcaggcaatacaaaaccatgacggtggcgcactggcccggatggctggcgatggccctgtacctgcagagcgcggggtaaatcagggtgacgagcgccttgtcgatattctgtttaacaacctgaagcagctcttcccggcttcaatgtccacggcattgaaagacccgaacgatgaagcagccgcaaagcgacagtggatagccgcttttgccgaaaacggaattaacacccgcgagcagcttaaggctggcatgcaacatgcccgagccagtgcatcaccgttctggccttcgcctggacaattcattgagtggtgcagggctggagagtttcacagtgccggactgccggatgcagaagcgctacatgaaatgttccggctattctgccgtgatcgaggactgtatgactgtgctgaaaactacccgtgggaaagcaacgcctgtttccacatggtgacggctgtctacaaccagatgcggtcattcaacctgactgacggcgagtgtaggaagcgctgcggcgatgagctcagaaagatggctcgaaggattgaatcaggagaggaaattccaccacctcgggctcagctgccacacctgcacatcccgcttaccaacgagaaaggattgcagaaaattgcagagctgagggctaagcacggcctgaggagcaaagggcatggaacgtga

SEQ ID NO: 199112 - DNA, 753 bp, Klebsiella oxytoca
atgatccacttccacggaggacctatcacgccagatacctgtgcgctgaaggcgtggaaaggtcggcatgcatttatcagcttcgcgaacgctggtcagttggcgctggccagcgaggtaacgcagtcatttgctctggataacggcgcattcagcttttggacgaaaaaacgcgttgtggactggaacgagtattaccggttcgtcgagcgttgggctaaccacccacggtttgcgttcgctgttataccggacgtgattggcggcactagtgaggagaatgatgcactgattgctgagtggcctcacgggaaaatcattggcgcgccggtgtatcacttcaatgaacctgatgagcgctttattcgtctgtgccatgagttcccgagagtgtgcatcggttcaatgggtgagtatgacgccaaacgacccagagcgtgtcgcgcgaaactccgggacctaatccgccatgtcgtggacaagaatggctatccaattgccaagttgcatggcctgcggatgctgaataaagacattttcatgcacatacctctttcatcggcggacagcactaacattgccagaaatatcaatatcgataagtactgggaaaaaactccttacagaacatcgagtaaagagactagggcttgggttttagctgaacgcattgaatcaaacaacagcgccagcgcgctcaactataacgccgaacgcgaccgttttatgccgcaattggcctttgagatttag

SEQ ID NO: 199113 - DNA, 696 bp, Klebsiella oxytoca
atggctggaacgcctgccgcgccgccatgcttgcagccgccccgcaggaggcatccagtgaatctcaatgagattgaatcaattttagaaacaaggccaccaaagagtaaaagcaaaaggaatgtaattggggtgggaattaatgacgcccctttcgctgtctccggggtgtttgatggcaagaccataacccatcgtgcttaccggtcttggttccaaatgcttatgcggtgctatgaccaaaagtatctcgccaaaaaaccatcttacaaaggtagccaggtgtgccacctttggacttctttcatgggatttctcccgtggtggaaaaataatttcagtgaagggtttcaccttgataaagacctcttggtgactggtaacaagctgtattcgccagatacttgtgtttatgtgcctccggcacttaacacattcacagcggataatgcgtgcgtaaggggtgaataccccataggcgtaacctggaataagggcatgcgcaaatttgtcgcagaagttaacagcagggaagggcggagactatttcttggttcgttcaaaacaccctgcgaagcttatgaggcatggctaaacgcaaagctctgcatcgctgaaagctttaaagatacttgtgatgagatacatccctgcctgtattcagggttaattagcaaaattaaaagcatgaggtag

SEQ ID NO: 199114 - DNA, 612 bp, Klebsiella oxytoca
atggctagacaaccacggcgaagatgcaaaaacgaagagtgcagagagtggttccatcctcagcactcaaatgtatggtggtgctctccggaatgcggaacgaagatagcacttgagcgacgaagcaaggagcgcgaaaaggctgagaaggccgcagataagaaacgacgaagagaggaacagcagcagaaagacaaactcaagattagaaagctcgcattaaaacctctcaattacttccacaaaatcacccagcaagcctttaacgagtacatccgcacaagagatgcaggtaacccttgcatcagctgcggaaggcttactggcgcgaaaatgaatgcaggccattttaggacagttggtgcatcaccagagaccagatacgacgaaaccaactgccatgctcaatgcgaatattgcaattcatacctatcagggaatatcggggaataccgtccgaagctcataaaaaaaattgggcaggaagcctatgacaaattgatggggccgcatgagaaaaggaaatggacgcgtgaagggttgcaggagttagcaaggcattacaggcagaaaaccagagcactgagtgaaagcaggaaggagaagctatga

SEQ ID NO: 199115 - DNA, 552 bp, Klebsiella oxytoca
atgaacaacccatcgacagattacatttcagagtgccttaggtatgaccctgaagatggactcctttactggaagaaaaggccattagaccatttcgtaaatgaatcatatcaatccagatggaacaaaagatatgccggggagagggccggtaaattcctgatgaatgggtatctgaagctcgctatcgataataaaaaatactacgcccatcgaattgtttgggggctcaacaaaaaagaatggcctcagtacatagaccacataaatgggaataggtctgataacagaattgaaaacctgaggaatgtaagcagaagccagaatcagaggaacttaaaactctccgtgagaaatactaccgggtttataggtgtaactaaggatgcaagaaatggacattacatagcccaggtaaaaattggagagaagcatattcatttggggtcatttaaaaacctaagtgacgctgtagaagcgcgagcaaaagctagcgaggagtatggatttcatcaaaaccacgggcgaaatttcccttcggaggcggcatga

SEQ ID NO: 199116 - DNA, 1452 bp, Klebsiella oxytoca
gtgaacgaaagcgaaatgaataaacaatttgccgcaaatgccagcctcgatcgtgaccgtatgcgctacgttaacgctctgttcaatggcaccagtaatacgaaacgccagcgcctttatcaggagtttggctatccactgaatctgacgttcgacgactttttccgggcctacagccgcaatgcaattgccaatgctgcggttaaccggatggttgatggctgctgggaggacttcccggatgtctacgaaggtgaccagacgaaggatgccaccaagcaaacggaatgggataagcgtgtaaacaaactgctcaagcgttgctggaaacagattaaaggcgctgacaagcgaaacctagtggggcgctactctgcgctgctgatccaggtaaaggataaccggacttgggataagccggtcgataagatagttacttccaggcagaaggaaaaggcgttagttaagttgatcccagtgtgggaggcacagattgagcctgtcacttacaacgaagatcagagcagcgagaactatggtgacatcaccatgtactcgtttactgaaattccggtacaacagcaagctggtgggcagcccgggcgcatcatcaacgtccatcctgaccgcgtaattatccttgctgaaggttcagatgacggccgcctctactcaggcgaatcaatgcttgctgccggtttccataaaatcatggacagcgagaaggtatccggcggtgccgccgaggggttcttcaaaaacgccagccgccagctcaacttcaacttcagcgccaaaacaaacttctcagcgctggctaaggctcttggtgtttccgaatctcagctatccgaagctctcgatgggcaggttcgacgccttaacgacagctctgatagcgctgtgatgatgcaggagggcgatgtcagtgtgctatcggttgcagcggcagatcctgagcccacgtggcgaaccattctgaatgagttttgcgccaccgtgccgatcccggtcaaagtcctggtaggaatgcagacgggcgagcgggccagtaccgaggatgcgaaggactgggccaagacccgaatgagccgtcgaactgggttcctgacagacctgataacggacatcgttacccgattctgggagtttggctttatccccccagcggcaggtgaggaaattaccgtcggatggtctgatttgctggcgccgagccaggcagagaagattgccaacatggataaactcgctgacgtagccgtgaagtcgacgaacgcctttggccgctctgctatcacagaaaatgagatacgcgcagcgggcgaactgcaagccctgcctgaacttgatgacgaggagccgccggatggcaataagccaaagcctgacccactggccgacccagaatcagaagccgaaaagtccggtgataccacggtcgaaagttga

SEQ ID NO: 199117 - DNA, 273 bp, Klebsiella oxytoca
atggcgaaacctgacgagccttatcgtaagttgatagttgaaagctactatcctgccagcacatctggaaagaagggaaaggtacatatacgccccttgcctgggcaatgggccgatccttccttatcagtggaatgctctaaggagctatctgacttgagtaaataccaaattggaagtcaattcgaaatttgcgcaaagctcaccgatagagaaaaaggtggtgagtacatttacagctccttccgatgggaacataaatttattaaatag

SEQ ID NO: 199118 - DNA, 1197 bp, Klebsiella oxytoca
atgaaacgcaatcgcgttaacgtgctgaccgtcgtcaactccgcttcaaacatcaccactgaaaccatcgacggcaagccacacatcgtggttcgcggtatcacgcctgtcgtggacgatatcgtgatgaaccggaagttgtacccggcagcagaaatcgaaaaggcatataacacgctcgaacgtaacccgatgccgctgggccatccaaaagtggatggcaagcacgtttccgcgcgcgatgtccgggcggtgaacgagtatcacgtcggcgcctggctacagaacgtcagccacaaagacagaagagtgacgggagacatgtacgtcaaccgccagtacgccgaatccagcgataagggcaagcgcctgattaaccgcctggataagatgctggccggtaccaactcagaacccatccacatctccacaggattgctgtattccggcattgccgctaatggcgagtcaaaaggcaaaaagtacaacgagatcgccaccaacatgatgtttgatcatgtggcggtgctgctcgatgaacccggcgccggaacgccagaagaaggagtcggcattttcgtaaatgctgaaggcgacgagcttgaaattgaagtagtgaacctcgctgatgctgacgttccagacccgcaagatgcctcattcaaaacatttttcaaccagctaaaggcgtttttcagcgccaacagcgattcaacccagaaggaaacagacccgatgaaagagctcatcgttaatgcgctgaaggccaaaggtaagtcggttgacggtaaaaccgatgccgaactgatggacgcatacaaccagatgctggcagaaaacgccgacagcaaagaagaaacgcctgaagagaaggccgcacgtgagaagaaagaagcggatgacaagaaggctaaagagcagaccaccaacagcgaagagatgccagcgtgggcgaaagtccttactgagcaggtcaccgcacttaacagccagatcaacgccaactctgacaaagagaaaggcgaaaagcgcgcggctgtgaagctggcaatgaacatgagcgatgaagaagtcgcagatctggacggtaaggcgctcgacgccatgtatgccaagtgccagacatctttcggcctgaatggtgcattccgccaccaggcaaccaacacccaatcagtcagcgaaatgccggagtaa

SEQ ID NO: 199119 - DNA, 354 bp, Klebsiella oxytoca
atgtcagaaaaaccagtccgtgaatacgataaattcatgctccgtttcccagatggcatgcgcgatgccatagccgaacgcgccaaagctaacggcaggtcgatgaattcggagatagtgcagatcttgggtgatacactttatggagttaaccaactagatgatgaatttgatcaaatgtatgaatttgtcgtttcagaatatccatgcgatgaagaagaatggcgcgttagagatcgaatgctcacccaattagtgggtgaaatttcaaataggttagaacgtgaaacctctcgcctgaaagctttattcgaaatccgcagtcctgatggtacatacaaaaagcccacctga

SEQ ID NO: 199120 - DNA, 330 bp, Klebsiella oxytoca
atgaaaaaagtattgtttgctttgattgcggttgtttcctttggtgcaggcgcatcgcaagaaatgagaatacctacagatccaaaagccacgtataccattcttgaaaaggacatgaatggcagcatggccacgattgtcacaaaaagagaaggcccggcaggaactacttattcaaagcgtctatatgattgctcttcatggacggttaagtatttaggaacaggcgaatctttggagcagatgaactcttcggcagcggatacagggatgtcgccaataggtgatgagacaatagcttattatgttgggcgaaaagcctgcaattaa

SEQ ID NO: 199121 - DNA, 2139 bp, Klebsiella oxytoca
atggcacaagtaccattacccactccgacagataatcaggtacccagcacagatattcgtgatgcagtttatgccggggcgatgctggacaaggcgatgacaaccacgacggacatgacttatgaagatcgtcttggtaatgagcacaaaacctggcatgccatagagcagggatttgatgacatcgttgcatctcttgataccgcgagttttacttttcctgatgaagaaagtggcctggctggcacaactgatgggcagtatttccgagtcccgcagggagaggatagtgaaattgctttcatttattacaggaataattcaggagtggccacgattgtagccaccacgccatcagagaaattgatcagcaattctattgggcatgacgaagattcgagcctgattaaaactgtaacacctgataatgaagtcacgtctcttcagactgaatcgggtgagatatttattgctggtatgagtgaaagtattcaggggatggcatcgcgtagcgggaaggataacactacgaaccttcattcagctacagataaagacggcctgcagcttatcatcactgatgctgaagggaaaattcgcatcccactaactgattttccgctgcaggatcttctggctcaggttcagcctgttcccggaccctttctcaatactttgagttcagccgataaggcagcttacgcttatattgacgagctcggcggtcttaatcttccggggcttccgacatccgttaataatatgctgaacagcctgtcccgccgcgtacagcagcaggcagatggcaggtttctcacaagtatcaaggactatggctgggacccaaacagccaggaagatgcacgacaggtaattcagcgagcaatccgggatatggcccgaaacccttacggcggggtgatttatcttcctcctggcgtctaccggctgagctcattcctcacgcccgcgccgaacgtatcgattattggcgccggtaccggcaaaacaatcctgatgccgtatggctcatattcggcgctccagttcaccacatcaccgacgaatcccgtcccggaattgacggattttgtgtattccgattttgaggtggattgtcaggaccaggtgttgccggatgagggttatctccccaggactaagggcctgtattttaacttctaccgccgcggccacctgcaccgcctgcgggtgagaaactctggcgcaacggggatcggcatcgactttgctcgcgattccgcgattactgaatgcgtggtggagaatttcgggcgtctggcgccatccgacaatgataaccccgccggtgcatccggtctcggtttaggggccgggggaacacagagtgagccgctgtatgttgctggcaacttctgccgcaacggtaagaacttcggcatctttcttgagaaacagcatggtaccaacgcaccatacagctctgaacacaccatcattatggggaatacctgcacaggtaataacggcgggatgggggattgcggtgtggacggcatgattatgatcggaaataacttctccgaaaataattatggtgtcgttatcagtccaggaaccgtactggcataccccggttcgcgcggtcgcctgcagggaaatattatcgctaaaaatgctaaacatggcgtctattacaacagcacgacagagcagcgtgacggcgaataccagatcgatggcaataccatccgtgataacggagaagacgggatcaactttaaagctccagggcaagaagtccgcagcatgtttatccaggggaatgacgtttatcgaaacggtcgccatggtttccatctggaagacggcacagccatcaatatggacgtagttaataaccgcttctggaataacggcctgaccgctgccggaaacggaattaacctggcctcagaggtcaaactgagttcgtttagcggaaacaaaattcgagacatccaggctacacccactcagcaatatccggttaatgccactggcgcactgaccgatgtcgatatttcgtttaaccactgtgttggtaatgcacagaacacgcttaatctgaccggcacaccaacccgcgtcaccactttgaacaatccaggaatctga

SEQ ID NO: 199122 - DNA, 324 bp, Klebsiella oxytoca
atgcagtttattttgatacatcagagcgttgagtatagcggcgataacccgccgctatcaatggagggattacagggtagggtaatcggtataaccttccgcgccgccgccgtagaagctttccggacgctgtgggttcagagcggcctttttctgcaggcgcgccaccaggtccgggttagcaatgtagtcgcgaccaaaggccacggcatcgatcagccctttaccgatcagatcgttggccttttcaaccgtgtaggcgcccgcgccgataatagcgcccgggaaacggtcgcgcactttctggcggaactgtgcaggtag

SEQ ID NO: 199123 - DNA, 3039 bp, Klebsiella oxytoca
atgagcatgaagattcagtttgatgccaatttagattatcagcgtgatgccattaagtctgtaacgggcgtattcgctggtcaggaaatctgccagaccaacttcaccgttgcgcctttgcaatcctgggaggaagggtcactgtttcatggcactcaggaagatactctgggtattggtaaccgcctgcgcctgctggatgaggacatccatgccaatatccgtaagatccagctgaaaaatggcctggcaccttcggagtcctttgactcgaaagacggtattcacttaaccgtggaaatggaaacaggaacaggtaaaacctatgtttacctgcgtaccgtatttgagatgaaccgtctctacggcttcaccaaattcatcatcgttgtgccgtccattgccatcaaagaaggtgtgcagaagtcactggagattacggcgactcattttaaagagctgtacgaaaacgttgcctttgactatttcacttacgattccagtaagctgtcggatgtgcgtaactttgcgaccagccctgacattcagattatggtgatcaatatcgatgcattccggaaaagctttaccgacccagagcaagagaacaaagccaacatcattcaccgcgcacacgaccgcatgaccggtgccaagccgattgaatttatccagcaaaccaacccgattgtgattgtcgatgaacctcaaagcgttgacaccaccgataagagtaaagaagccatcgcctcacttaaccccatgtgcacactgcgttattcggcgacccatgtggaaaagcaccatatgctctacaagctggactcggtcgatgcctacgagcaaaaactggttaagcagattgaagtggcaggcattgaggttaaggacggccacaataaggcttatatcaaactgctcagtgtgaacaacaaaaaaagcccgatcagtgccaaaatcgagattgatgctcgcctaaagaatggcagcattaaacgcaaggaagtcacggtaaccagcggcgcggatttgctggatgctaagtacagcggtggccgcgacgtatacgacggctacatcattgaagacatctactgcggacagggtaatgaatacattagctttaccagtaagcccaatattctgaagctgggccaggcgctgggcgaagtagacccggacgagtttaaacgtctgcagatccgcaagaccattgaagaacatctcgataaagaaatacgcctgcgcccacagggcattaaggtactgagcctgttttttatcgacaaggtcgccaattaccgctggtacgacgaagacggtaacccgcaaaagggtaaattggccctgatgtttgaagaagaatacgatcgcgccattcgtaaacccaagtatagccagctatttgaaggtgccgatctggatacggctgcacaaggcgtgcataacggttattttgcgatcgataagaaaaaagattcgtcaggcaaggaaatgctcaaagaatctaaaattggaaaagatggcaaggcggcaagcagcgaatctgatggcagtgcttacaacaccattatgaaagacaaggaatggttgttgagttttgattgcaaactgaaattcattttttcccattcagcgctcaaggaaggctgggacaaccccaacgtgttccagatttgcaccctgaacgaaactacatcggtcattaaaaaacgtcaggagatcggtcgtggcttgcgcatttgtgtgaatcaggatggtgagcgggtgcatggctttgcggtgaataccctcactgtgatggctaatgaatcctacgagcaatttgcagagcaattgcagaaggaaattgaaaacgaggaaggcatcaagtttggcgtggtcgagaagcacctgtttgccaatatcgtggtaccggttgacgaccacaatcacgaatacttaggtgccgaggcgtcgaagcagttgtgggaacacttgcagagcgaaggccacattgacagcaagggtaaagtgcaggatagccttaaggcgtcattgaagaacggtactctggagttgcctgaggcattccagccccatacagcacagattgtgtcggtgctgaaaaaggtatccggtaacctgaacatcaagaaccatgatgacaaagccaaggtttcgctgaacaaagcggtgtatctgagtcccgagtttcaggcgctgtgggatcgtattaaatacaaaactacgttccgcgtgaactttgataccagggcattgatcgagaagtgcgccgaagagatcaaaataaaccttcaggtgggtaaggctcgcttcacttaccgcaaggcgaagactgaaattgatcggggtggcgtgcacacagagaagaccgttgaagcaaccagcgtgtacgaatcccgctcgtacgatttacccgatttgatcacttacttacagaacgaaaccaacctgacgcgccgcaccattgtttccattatcaacaaaagtggtcgcctggagtcgttcaagaacaacccacaaaagtttatcgaacaggcaggtaatataatcaaaagccaaatgcgtctgtttatcgtcgacggaatcaagtaccacaaaattggtgatgatcagttctatgctcaggaattattccaacaaaacgaattgtttggctacctgaaagacaacatggttaaagctgagaagtccgtttttgactatgtagtttacgactccgatattgagctggaatttgcctcggccttcgagcgaaatgaggatatcaaactttacgccaaactacccggttggttcaaaatcgatacgccattaggcggctataaccccgactgggcggttctaatcgaaaaggatggcaaggaaaaactctacttcgttgtcgaaaccaaaagcacgctcttctccgtggaaagacgtccggaggaaaatgccaaaatcaaatgtggttatgcacactttgaagcattgggtgatgaggtgaagtttacggtatctaattcgatggatgagttctcaagcaggtatgcgtga

SEQ ID NO: 199124 - DNA, 1929 bp, Klebsiella oxytoca; identical to SEQ ID NO: 112649

SEQ ID NO: 199125 - DNA, 867 bp, Klebsiella oxytoca; identical to SEQ ID NO: 112648

SEQ ID NO: 199126 - DNA, 3267 bp, Klebsiella oxytoca; identical to SEQ ID NO: 112647

SEQ ID NO: 199127 - DNA, 180 bp, Klebsiella oxytoca; identical to SEQ ID NO: 112646

SEQ ID NO: 199128 - DNA, 429 bp, Klebsiella oxytoca
atgttacgcggaacagaaagaaaagaaacattagaaagcctttcccgagccagaacatgttatgaatcacaggcaacggatacccagactgccatcaccgacctgtttttactgcgtcagaaatgcagcaaagacctgattgcccgtggcgagcacttcgtcaaccgtctggcgaacacgccaaaagagttcgatagatcctggagcgagctgaaagcggaaattgctgagttcgacgatgtggtcgaaaagctggaagaagagtatcgcgcctctcacgtgggtaaaagcaccgccgcggcgggtgttgccgtgggtgcaggcgtggcggcgttcgcctcgactgccgcactggcgattgcaaccaccttcggcacggcctctatatcccgtgatgatatatcgctcatttttgttgttctgaggtag

SEQ ID NO: 199129 - DNA, 912 bp, Klebsiella oxytoca
atgtccgaatcacgcctttctatgatggttaatgcaacgaaaaaaccttgcgttctgcgtctaaaactgatcagagaaaaagatcctgaacgacctttattcgtatttgaaggtaatgacgattatgatttttatttccatgctttacattttagtgaattcagcagggaatttacgcatgtaaatggagagggtaaagatcagtcaatatcattatttgaagagttagttagtgagcataatgaatgtctcaatgaaacatatttctttgtcgatcaagattattctttgttttgttattccaacaggcacatttttacacttcctttttatgcaatagaaaaccctctatgcgacaataaagtcataaaacactttctgacatcaacatttaaattcgatgaaggaaataaaagcctcatggagcaaattatgaggctttacactaaggctaaagcagctttttttaacggcatcagaactatttcaatacagctatatatgtctagagtattaagtttgggagtagaattccctaataatgaagaactattcgactcaattaaaaaagacagtgttacttttaggatctcagaacttcctgaaataaccgaaagactctcaaaaatgactgaggatgaaagatcattatacaattctataagtgaacttagtcctgagcaattaattagagggaaatatgtttatcacttcattaaagaatggttaatggtcataaaaaaatacattcacgctcgcatagatagcgccaaggctattgataaaagtaactcactgccaatctctaagttagtaaaagaacaatatgaacataaagacctagcaatatctaggcttgcaccttcatgtggaaagataaaagaactaacagctttcattaattcaatataa

SEQ ID NO: 199130 - DNA, 1446 bp, Klebsiella oxytoca
atggaattgaaacgatttataataaaaaaactatatggttataagaatattgaacttattttcaacaaaagatgcactataataatagctgaaaatggtgcaggaaaaaccacattgataaactcattaaatgcagttcttcgtggtgacgcagatgaattgagaaagctacggtgtgattcaattgaaattgaattcaaggaaagaaaatataaaataaacatttctgaattaaattattctgactttttgtcatttgcacaattaccatcacaatttttaaaaatcaaggagaaaataaagccctcattagttaatgatatgctgcatgatatcaaaagcaaaccgttaagagaactacaaaaaaagagctggtataaggcggcatatcaagcaactccttatggtcactcggagttagaaagtaccatattatcaattaagcggttattgcattcgtattactctaaacaacttggtatatttgaggagcacaatgaaccaagtaatagttctttagattttcttgaagaaataaaaaatagaatgcgtgattatgacatcatttatcttccaacttacagaagaattgaaaaagcaactttaagagagaagttttctatcgaacctgatgaaagggttacaatgcaaaatggtgagttaattcgtataaggaactccggctctcctaataatacaaatattgagtttggattatatgatgtagaagcaaaattaaaagacataagcgaatcaatagaacggcgttctagcttgggttatagagcactaagtgcaaatatcatcgaagacatgatgactggtagaattggtgacagaaaatcaacgtacaagctacctgcaattgatgagctttcgcgatttttaggtagagttgtaagtaaagataaacaggataatgaaaaaataattgacgaagtaactcgtgtaatgagtgataaaaaagctttatcctcaaatggtaatttaagttattttctctccaagctaaaacctgtaatcgattctacaaaagaattagaagaaaagattgaaaatttcgtattaatgtgtaataaataccttcaattatctgatgattcgaaattccttgattatgacgttgaatcattgcaagtagttgttaaagaccttttcacaaacaacccaatagaacttgaagatttatcctctggtgaaaaacaaataatttcacttatggcacatatatatctagacgacactagagagaaaattgttttatttgacgaaccggaattatcactttctattgagtggcaggagcatgttctggctgacattattaacagcccttcagttgttcagttgcttgccataactcactctccttttgtttttaataatgagcttaaaactgaagtaaaaacattaaaaataacaaaaactaaaagtgaggaagaataa

SEQ ID NO: 199131 - DNA, 1230 bp, Klebsiella oxytoca
atgaaaaaaccatgggaacgaagacttaaagacctttcgcacttgctagaaggttgtgcgaaaacatatttttcacccgaactctttcggttgaacctaaatcagtttttgcaaacggcaagaacaattactttcatcatacaaaaaaataaaagtgatattaaaggttatgatgagtggtatcctaagaatgtgatcgagaaatggaatggcgatcacattatgacatgggcaaaaaattctcggaatactattgaaaaagaaggcgatcttgaaatgtacagtgaagcaaaagctacactgatattttcatatcttgaaactcaagatgtcgagattaaatctagccagagtttacttaagcttggtacgagtgaactagtgaaaattgcccataaaaaattcccgtcgtatataaccgatgatgcagttattaaatcggaaagacgctgggtggctaatacccttaaagattatgaattattgtatgcgttgactgttatttatagccgtatgtatgagtgttgtaggtcgttaggttttttaattggggagccaattagtgaaacaataaaaacaccaacacattacgattctcataatgatgagattagacgtgttacttatttgaagttaaaggatttatccaaaaataaaatgacatttgagattgtcgattttgatgaaaatgttatacctaacgctctcaaagaaaaggctatattaatgaagccttcaaatcatattaactctactaaagaattaataggtttttcttcaaagattgctgaaatgacattcttagagtacggctttcatgttcaaactctaatgctatttgatgaaggctatcaagttattgatttaattaacacgaattttgaggatcaagctgataagtatatattttggaggtatgtggctgatagggctcatatgtataaagcttatgggtttatatggatatcagagctttggcttcgaaatgctaatagtggatataataagtctatacaaagcatgcctattatcggagaacagctgcaaattgttggggttgatagagaaaattatcagagaatcatttcttgggatatagtgagagcgggtgaaaatgacatgcctactttaggtacacgaaaggagcaggagtggagcaatgggaaagcatatttcatgcgctcaattttgcaagcgataggagctgacactgatatgctaaatgattaa

SEQ ID NO: 199132 - DNA, 573 bp, Klebsiella oxytoca
atgaccaaatcaaccataaccagagagcaactggaagaatgggttgcacaatttgatgaagatggcggctgtgatgccactgaccggcagttagaggctctcattcgtcaatcgctggccgcactggacagcgagccggttttcaatcttttggtttcgcaggcaggctataaaggacagaaacagggcaataactttgggttcaccactcttgacgcagcgcgtgagttgaaagaggggaagtaccaactctatcgccacgcgcagccagcgccggtagtgccggagggcctgaaccctgaaaccaccgatttggttttgcggttcgcaagtgcgctggctgataagttgtataaggccgagcagaagtatggccgctcaaccgattggatgaaagatgactggtatgacgactgcctgcaatcactttgggaacacatcgaaaaaggtgatccgcgagacgtagcggcttactgcgcttttatgtggtatcacgggtgggtaacaaccgactatgaccggaatgtgcagagcacctgccgcgccgccatgctcaacggaggtaaactatga

SEQ ID NO: 199133 - DNA, 288 bp, Klebsiella oxytoca
atgaccaaatccacagacgtacatgacctgttaactgcttaccagaaacaggcgcggaaaatccctgcaaagggtgtttatgcatctaggcatcggcaagttgaggtcaatgcggcccacgtgcgcaagataatgcgcaagcgtcggcggtcagtcggcaagtcaaataagcttggctgtcgctttactgcggaaatgcgcgtagcgctgatttgcgacatgaatttttgggcgctggtatgccgctctaaccgcaaccaggtaaatacgacgggagccaaccaatga

SEQ ID NO: 199134 - DNA, 480 bp, Klebsiella oxytoca
atgaaaactgatatcaccggactggcgaagagcctgaaagcggcagcagagaaagcgactcctggccaatgggggcgaggagacggcaagcacggtggcgaattactggtgtattgcgatgatgcgttaggctctgctgtttgcgaagcaaccagtgaatataacgcaatcccaaaatatcagcgtatagataacctggatttcatcgccctggctaacccggtaaacatcctcgcgctggtagaggcgctgaagaaggcacagacaaaagcgattgagcaggggcgtacttcctgtgagttgttcgacgaggttactgctctgcgccagcgcatcgccgagttggagtcacgcagcgtgaagttgccgtctgagctggaattgcgtaacaacgaggtatgtagcgtatgcgccgggaatgcattgcaggtgatcgaggacaagcttaccgccgctggcatcaagtgggaggctgagtga

SEQ ID NO: 199135 - DNA, 360 bp, Klebsiella oxytoca
atgtcttcatgcatggcggtagttttaaacggtgttactgaagttaaatatttccctttccacaattgtgctagcgctgaagtagcaaccgatatggccgacgaatggcgttatgccgcgatcgaggctatcggctgggatgaagcgcatcgcttccacctgcgtaccgtccgtccggtggttgtgttccgcactgtcaatggctctatcgtcgaatgtgacccgttcgacgtggacatagaccctcctgtctgcgccgacctggattatcacctttgcgcgttcgggttcgacagggaacgccgctgctccggtaactgggatctgggcggtgctgaaattattgagtacatcgcataa

SEQ ID NO: 199136 - DNA, 168 bp, Klebsiella oxytoca
atgtcagaagtatcatcaacaccaaatgaattatggttattgattaaatccatcgcggaaacgaatttaaacgagattagcaatcgtgtttctcgcggggagagcttgcttgaatggcatcaggaggaagtatccagccttgcatctctactgaaagagcaagcctga

SEQ ID NO: 199137 - DNA, 456 bp, Klebsiella oxytoca
atgacaaatctgaaagaagtcgtaaaggcgatgtgcaaagcctaccaggggggtcgcgaagcaatggctggcgcgctggggatgtctatcacccaattcaataacaacctctacgagaagaacggctgtcgtttcttcgaagtatctgagctggaagcgatggaagacatttccaacacgtcgctactggctgactacttcgcccgccgtcgcggcgctctgctggtggatgtgccgcacctggaagaactggatcgcgtggacttgtttagtcgcgcaatgcgtacctcagcagccagagggcaggtggatcagattatcgaacaggcgcttgaagacggggttatcgaaagacatgaagctgaagaaatcatggtgcatcaccgccgccacctggctgcgcgtgaagaagagatcgcggcaattatcacgttgtttgcacgcaaaaagaagtga

SEQ ID NO: 199138 - DNA, 486 bp, Klebsiella oxytoca
atgctaaaaaacatcaacacaacagggctgattgtatcagcactcaacatcatagcctccctaagcttctctgttttcttaacgggtagcttgaccaacaatactgatgctttgaatcttgtagctaacgtattttcaatactatctggctttttactattagttattactatgtccggtgaaaactcaacattacttagcaacatgagtgcgttggatgctgctaatcaagaaagaaggttcttgatgcgttttaacaaatactatgctctctttttactttacatacttacattggcattaatatttatcttttatttaataacaaaagataaaacaaacacttcaataacactaaccaatataaaatcagtgattgggcactcaattgctttcctgacttgcttctcatttattcagtcaacttttattccgctaaaaataaaagagctctttaaggagaaaagagaatttaataagaagtaa

SEQ ID NO: 199139 - DNA, 822 bp, Klebsiella oxytoca
atgaacttctctagctccaagaaagatggactgacaaaaaaatgtctagtcaggggtttcaaagtaaacacggcatccactgacattctctttgaccaaatcgcaaagtctacagccttcaaagtcgatgcggttatcaagatcagtacagagaaacatctcatgctgaaggcatttgaaactaacaacaatctccactatcttcatctagccctctacaatcctaaggcgcaagtttcaatcacccctttaaaaaaagcagtaagcgatctgcttgatgtagaaaacctcgatgaccttcatgcattcttaatgattaaggacaaccgaattgcatcattaatgcagatctcaaccaattggtgcgaagttaagattgcaaaaatccttaaggaatttggtatatcagtaactccaactcctattttgaaaaataatgtcatacaaaaaatcaaagacgataaattaaaggctcttcatcttaacattgacgtagaagaatcggatttcgttaaggctcctgggttgatagaatcaatttttaataaagagccaaaaattagagcaaagggtatatctggacacttaactatcgacgctaaaggaaacaccgaattagctcaatctatagaaaacgataccgcaaactgggttaatgatctggataaggatttttacattgaaacgaaaaaaggtgataaattttatagcgacgatctgaagctcaatagaacatacttcacagtcccgtatggttctaaatctataaatgctaaatatgcaaaagaaatcctagaggattttgtaacaaaagagctataa

SEQ ID NO: 199140 - DNA, 210 bp, Klebsiella oxytoca
atgggacagtattattacgttaataaaaatgcgcagtttaatggcgatcacgaagtacatgtgagttcatgcactcggttgccagaagagaaaaacaggctgtatctggggatttttgaaacttgctctccggcagtgagagaagccaagaaaacctactcgcaatcaaatggctgttattactgctgttatgcgtgtcatacgtcctga

SEQ ID NO: 199141 - DNA, 3006 bp, Klebsiella oxytoca
atgcccgttgactttctgaccactgagcagactgaaagctatggcagattcaccggtgaaccggatgagcttcagctggcacgatattttcaccttgatgaagcagacaaggaatttatcggaaaaagcagaggtgatcacaaccgtctgggcattgccctgcaaattggatgtgtccgttttctgggcaccttcctcaccgatatgaatcatattccttccggcgtccggcattttaccgccagacagctcgggattcgtgatatcaccgttcttgcagaatacggtcagagggaaaatacccgccgtgagcatgcagcgctgatacgtcagcactatcagtatcgtgaatttgcctggccctggacatttcgccttacccgtcttttatatacccggagctggataagcaatgaacgtcctggcctgcttttcgatctggcgacagggtggcttatgcaacatcgtattattctccccggagccactacgctgacccggttgatttcagaggtaagggaaaaggcgacgttgcgcctgtggaacaaactggcactgataccgtcagccgaacagcgttcacagctggagatgctgctggggccaactgattgcagccgcctgtctttactggaatcactgaaaaagggccctgtgaccatcagtggtccggcgtttaatgaagcaattgaacgctggaaaactctgaacgattttggcctgcatgctgaaaacctgagtacactcccggctgtgcgcctgaaaaatctcgcacgttatgctggtatgacttcggtgttcaatattgccaggatgtcaccgcagaaaaggatggcggttctggttgcctttgtccttgcatgggaaacgctggcgctggatgatgcattggacgttctggacgccatgctggccgttatcatccgtgacgccagaaagattgggcagaaaaaacggctccgctcgctgaaggatctggataaatctgcattggcgctcgccagcgcatgttcgtacctgctgaaagaagaaacaccggacgaatcgattcgtgctgaggtgttcagctacatcccaaggcaaaagctggctgaaatcatcacgcttgtccgtgaaattgcccggccctcagacgataattttcatgaagaaatggtggagcagtacgggcgcgttcgtcgtttcctgccccatctgctgaataccgttaaattttcatccgcacctgccggggttaccactctgaatgcctgtgactacctcagccgggagttcagctcacggcggcagttttttgacgacgcaccaacggaaattatcagtcggtcatggaaacggctggtgattaacaaggaaaaacatatcacccgcaggggatacacgctctgctttctcagtaaactgcaggatagtctgaggcggagggatgtctacgttaccggcagtaaccggtggggagatcctcgtgcaagattactacagggtgctgactggcaggcaaaccggattaaggtttatcgttctttggggcacccgacagacccgcaggaagcaataaaatctctgggtcatcagcttgatagtcgttacagacaggttgctgcacgtctttgcgaaaatgaggctgtcgaactcgatgtttctggcccgaagccccggttgacaatttctcccctcgccagtcttgatgagccggacagtctgaaacgactgagcaaaatgatcagtgatctactccctccggtggatttaacggagttgctgctcgaaattaacgcccataccggatttgctgatgagtttttccatgctagtgaagccagtgccagagttgatgatctgcccgtcagcatcagcgccgtgctgatggctgaagcctgcaatatcggtctggaaccactgatcagatcaaatgttcctgcactgacccgacaccggctgaactggacaaaagcgaactatctgcgggctgaaactatcaccagcgctaatgccagactggttgattttcaggcaacgctgccactggcacagatatggggtggaggagaagtggcatctgcagatggaatgcgctttgttacgccagtcagaacaatcaatgccggaccgaaccgcaaatactttggtaataacagagggatcacctggtacaactttgtgtccgatcagtattccggctttcatggcatcgttataccggggacgctgagggactctatctttgtgctggaaggtcttctggaacaggagaccgggctgaatccaaccgaaattatgaccgatacagcaggtgccagcgaacttgtctttggccttttctggctgctgggataccagttttctccacgcctggctgatgccggtgcttcggttttctggcgaatggaccatgatgccgactatggcgtgctgaatgatattgccagagggcaatcagatccccgaaaaatagtccttcagtgggacgaaatgatccggaccgctggctccctgaagctgggcaaagtacaggtttcagtgctggtccgttcattgctgaaaagtgaacgtccttccggactgactcaggcaatcattgaagtggggcgcatcaacaaaacgctgtatctgcttaattatattgatgatgaagattaccgccggcgcattctgacccagcttaatcggggagaaagtcgccatgccgttgccagagccatctgtcacggtcaaaaaggtgagataagaaaacgatataccgacggtcaggaagatcaactgggcacactggggctggtcactaacgccgtcgtgttatggaacactatttatatgcaggcagccctggatcatctccgggcgcagggtgaaacactgaatgatgaagatatcgcacgcctctccccgctttgccacggacatatcaatatgctcggccattattccttcacgctggcagaactggtgaccaaaggacatctgagaccattaaaagaggcgtcagaggcagaaaacgttgcttaa

SEQ ID NO: 199142 - DNA, 294 bp, Klebsiella oxytoca; identical to SEQ ID NO: 32300

SEQ ID NO: 199143 - DNA, 255 bp, Klebsiella oxytoca
ttgcccgccttttttaaacctccatgtatcgttcttgccccgtttatgcggggctttttttttgcttctttctatgagttgacatctttaagttttattcagagacataaaaaactttttcgtgtcactgaacctattaggttacagagcgacgttgctatcctggtaaaagttttttctaaaggaccggtaaaatgtcatctcttgattctgaagctaaacccgataatgcaggtcacagcgtactggctttaa

SEQ ID NO: 199144 - DNA, 1053 bp, Klebsiella oxytoca; identical to SEQ ID NO: 31750

SEQ ID NO: 199145 - DNA, 462 bp, Klebsiella oxytoca; identical to SEQ ID NO: 118084

SEQ ID NO: 199146 - DNA, 420 bp, Klebsiella oxytoca
atgagcggcgcctataacgccgggcaggcaattgtctgtcttgataatgacagtgtcgctgaatatgtcagttttctgaaccgccgcatcagtaacagtatcaccaaccagaatctggctgccgccgcgaaaattgtcggcagttctgaagttacggttgaggtaaaacgtctcggccaggtacgaaacggccatcaatcctttatcagttcattcatcaacggcgatatgcgtgtatttgacggcatcaataaatacagcggtgcgccgcttgtatcaactcagctgaaccgcttaatgattggacgggcaagaacgacccctggcgctgtttcaaacgcatacctgaagcgcctggtttactacccgacaacgttagctgatgctgatttagtatctcagtttaatgcgttgtcgtag

SEQ ID NO: 199147 - DNA, 318 bp, Klebsiella oxytoca
atgggctttccatcgccggctacagattatgtagagagtacgctgacagtgagctcgctgtgtggtattggagcaaactcgcgagttatcagcacagatagtggctttgctgttcttgatttgtctctgaaagctaagcaggggagtacagttctcattcgtcacgcagggttcatggagtttgcgaaaatattaggcagggcgtttatcacgatggagggggaggctatcgaaggggaagctctggatgaagtggaagtgatcggagtcgtcacgtatacgattcacaatgtgatgcaggatagcagtcctgtgtga

SEQ ID NO: 199148 - DNA, 2007 bp, Klebsiella oxytoca; identical to SEQ ID NO: 31776

SEQ ID NO: 199149 - DNA, 222 bp, Klebsiella oxytoca; identical to SEQ ID NO: 26755

SEQ ID NO: 199150 - DNA, 1233 bp, Klebsiella oxytoca; identical to SEQ ID NO: 31775

SEQ ID NO: 199151 - DNA, 522 bp, Klebsiella oxytoca; identical to SEQ ID NO: 118116

SEQ ID NO: 199152 - DNA, 879 bp, Klebsiella oxytoca; identical to SEQ ID NO: 31774

SEQ ID NO: 199153 - DNA, 936 bp, Klebsiella oxytoca; identical to SEQ ID NO: 118118

SEQ ID NO: 199154 - DNA, 2133 bp, Klebsiella oxytoca
atggcctttaatccgccgttggggagcacgtctcccgaggtgttggtcggtaatgccaaacgtctcgatgagctggtgaacggccccgccgccgacgttcccgatcgtggtggtgatcctctggactcctggcgtttgataatggaacaaaaccagacacgcgtagagcaactggacgatatcattacctctcttgatactgcgagcttcactttcccggacgaacccgcaggcatcgctggcacgactgatggtcagtatttccgcgttcctcagggggaagggaacgttgtcggatttaattattataaaaacagcgcaggtgtggcagtcattgttgcatcagttgcatctgcagaaattactaaattgctgggcatgaccgatgattctggtctcgtacggacagtttcatctgatggaaaggttacggaagtaaaaacagagaccggtgataattatctggcggggatggacgaaagcattcaggagatggcgtcgcgaagtggaaaagacacaactggcaacctgcattctgcaacagataaagacggtctacagcttatcatcaccgatgctgaagggaaaattcgcatccctctgtctgacttcactttgcaggaccttctggctcaggttcagcctgttcccgggccgtttctcaatacgctgagtgcggccgataaggcggcatatggctatattgatgagctgggcggactcaaccttccggggattccgacatccgtcaacaatatgctgaacagtctttcccggcgcgtgcagcagcaggcagatagccggtttctcaccagtatcaaggactatggatgggatccgaacagcgaggaagatgcacgacaggtgattcagcgcgcaatccgggacatggcccgtaatccgtatggtggtgtgatttacttgccgccaggagtataccggctgagttctttcctcacgcccgcgccgaacgtatcgattattggcgccggtaccggcaaaacaatcctgatgccgtatggctcatattcggcgctccagttcaccacatcaccgacgaaccccatcccggaactgacggattttgtgtattccgattttgaagtggattgtcaggaccaggtgttgccggatgagggttatctccccaggactaaggggctgtattttaatttctaccgccgcggccacctgcaccgcctgcgcgtgcgaaactctggcgctacggggatcggcatcgactttgcgcgcgattccgcgattactgaatgcgtggtggagaatttcggtcggctggcaccgtcgggtaacgataaccctgcgggggcatctggtctcggattaggggctggcggtacgcagagcgagccgctgtatgttgctggcaacttctgccgcaacgggaagaacttcgggatctttcttgagaagcagcacggaacaaatgcgccttacagctctgaacacacgatagtcaccggcaacacatgtacagggaataatgctggcctgggtgattgtggtgttgatggcatgatcgctaccaataacaacttctcagaaaataattatggcgtgattatcagtccgggaactgtgctggcatatcccggttcgcgcgggcgtctgcagtgcaatattatcgccaaaaatgctaaacatggcgtctattacaacagcacgactgagcagcgagacggcgaataccagattgacagcaataccatccgtgataatggcgaagatggaattaacctcaaagcgccaggccaggaagtccgcagtatgtttatccaggggaatgacgtttatcgaaacggacggcatggtctgaacctggaagacgggacggcgatcaatatggatgtggtaaacaaccgcttctggaataacggcctgaccgcttccgggaacggaattaatctggcctcagaagttaagctcagctcgttaagcgcaaataaaattcgcgacatccagtctacgcctactcagcaatatcctgtttatgccagcggtacgcttaccgatgtcgatatttcatttaaccactgcgtgggtaacgcgcagaacacactaaatctgaccggcacgcaaacccgcgtcactacgcttaataatccaggaatctga

SEQ ID NO: 199155 - DNA, 585 bp, Klebsiella oxytoca
atgagcgacgaaattaaacaaattgccgcccttatcgggcatcatcaggcgctggaaaagcgtgttacttctctgacagaacagtttcaggccgcctcatcacaattacagcagcaaagtgaaacgctgagcagggtcattcgtgagctggacagcgcgtccggtaatatgactgacaccgtcaggaaatcggtgagttccgcgctcactcaggttgagaaagaactgaaacaagccggattagcacagcagaaaccggcgacagaagcgctgaatcaggctgccgatacggcgaaagcgatgatccatgaaatgcgtcgtgagatgtcacgctatacgtggaaatccgcgatttatcttgtactgacgatattcttcgtcctggcttcctgcgtgacggcatttacgtggtttatgaatgacgggtatagccagattgctgaaatgcagaggatggaagcggtctggcaaaagaaagccccgctggctgacatatcgcgctgtgacggaaagccctgcgttaaggtggacactcgcactacgtatggtgataaagagaatacctggatgattattaagaaataa

SEQ ID NO: 199156 - DNA, 1116 bp, Klebsiella oxytoca
atggcctcctatcatctcagcgtaaaaaccggcggaaaaggcagtgcctctcctcatgccgattatattgcgcgtgagggaaagtatgcccgtgaaaaagactccgaccttgagcacaaggagtccggcaatatgccggcgtgggcagcgcataaaccgtccgagttctggaaagccgctgacacgtctgaacgtgccaacggctgtacctaccgtgaaatcgagattgccctgccgcgtgagttaaaacccgaacaacgtcttgagcttgtccgcgattttgtccaacaggaaattggcgaccgccatgcctatcagttcgctatccataatccgaaagcagcgatagccggtggcgagcagccccacgcccatatcatgttctctgaacgcattaatgacggtattcaccgtgaccctgagcagtattttaaacgggctaacaccaaagagccggagcgcggtggcgcaaaaaaggcacgtttcggggaaacaccgaccgaacgcaaagaataccttgttgcccagagggaacgctgggctgacctccagaataagcaccttgaacggtatcagcacgctgaccgggttgattcccgttccctgaaggcgcagggcattgaccgtgagcctgagcggcatctgggcgcgggtcaggttcagcgattcgatactgagcaactacaggccattcttgagcgcagggaggctgaaaggcaggtgcagcagtcccgtgatgaacgtgacagcgtaattgacgtgactacctcgttacgggaagccctcagcgagagggatactctgacgctaaaacaggagctgaagtcagagcctgagcaggaatcccattccggcagaacgtttgattttgaaaaagagcctgacaagctgaacgcactggtcagtgatgccatgaaggatatacaggaagaaatcgatcttcagtcccttgttaacgatgcgatggcggagttccaggggatacatcaggagatggaaaggcagagagagcgcgaacgtctggcggaaaaacagcgtcagcaggagaaagaacgacagcgactcgccgaacagatacgacagaagccggataaaggctggtcattctcacgatag

SEQ ID NO: 199157 - DNA, 468 bp, Klebsiella oxytoca
atgaataaaagcgaaaaacaggaacaatgggcagcagaaagagtgcagtatattcgcggcttaaagtcgccgaatgagcaacagaaacttatgctgatactgacggataaagcagataaaacagcacaggatatcaaaacgctgtccctgctgatgaaggctgaacaggcagcagagaaagcgcaggaagccagagcgaaagtcatgaacctgatacaggcagaaaagcgagccgaagccagagccgcccgtaaagcccgtgaccatgctctgtaccagtctgccggcttacttatcatggcgggactggtagacagccagacagggaagcccgtcgatgatactgctgccctactgggcgcattagccagtctcaatgatttgtcacgggataatcctaagtggtctgactggaaaatcagaggtcaggaactgctgaacagcaagaagtctgacagctctgcatag

SEQ ID NO: 199158 - DNA, 681 bp, Klebsiella oxytoca
atgcgtgtttttaattgggctgaatatgcagagttcaatagggaaacacaagaggtaactttagtttttagtaaatatataatcccattactatttcacctaaagagattcattaaatacaacctcgagcatgttaagtcctttgaaaataaatactcaatgcgcatttatgaatggctgctaaaagaactaacgcaaagaaaaacacataaagccaatatttcaataagcattgatgagtttaaattcatgctaatgttagaaaaaagctacccagaatataaattactaaatcattgggttttaaaaccaatttcaaaagatttaaatacctatagcaatataaaactatctattgataagcgcggtcgtcctgctgatacgctgatcttccaagttgaactggataaacaaattgaccttgtgactgagctagcaaaagaaccaatatcaaaaaaagaagataactcaatccgtttaacgcctgaaaatcgtctgcatgaggggctaaaaacaacattacatgatgctttaactgcgaaaatacaacttactggatttgaagctaaattcctgagtgacatgcagagtaagtatgatctcaacggctcatttacatggctgactcaaaaacaacgagccacgctagagaaaattttagctaagtacggacggaactga

SEQ ID NO: 199159 - DNA, 450 bp, Klebsiella oxytoca
atggctttagtatcaataagcgaagcagccagactaactggaaaaagccgcacaacagtacagtcatacattaagcagggaaaactgaccaagtgcacagatagcggtggtgcttcaaaactagacacatcagagcttctacgtgttttcggatcatttactggtcagcaggttggcagtgaacaatcaggcagtactgtgcagcatttggcaggcgattttgtgcagttacctgaccagaatttgctacatgaaaactatgccttaaaagctgaaatagaactcgtaaaggcattgctgcgtgagaaagagctactactcgatgaaaaagacaaacgcaatgaggatctcaaacatgctttgctgctaatcgagtctaaactgccagcaacacaggaacctgccacgcagccggtggaaaaaaaatcatggcgattctggaagaaatag

SEQ ID NO: 199160 - DNA, 1047 bp, Klebsiella oxytoca; identical to SEQ ID NO: 30071

SEQ ID NO: 199161 - DNA, 414 bp, Klebsiella oxytoca; identical to SEQ ID NO: 30070

SEQ ID NO: 199162 - DNA, 810 bp, Klebsiella oxytoca; identical to SEQ ID NO: 30069

SEQ ID NO: 199163 - DNA, 1356 bp, Klebsiella oxytoca; identical to SEQ ID NO: 30068

SEQ ID NO: 199164 - DNA, 228 bp, Klebsiella oxytoca; identical to SEQ ID NO: 105755

SEQ ID NO: 199165 - DNA, 582 bp, Klebsiella oxytoca; identical to SEQ ID NO: 30066

SEQ ID NO: 199166 - DNA, 426 bp, Klebsiella oxytoca; identical to SEQ ID NO: 105762

SEQ ID NO: 199167 - DNA, 417 bp, Klebsiella oxytoca
atgactttttcaataacagaagtgcgtgaggggcgtattggttctttagttattacaaaagagctttacgataaattagaaaaatactcttgctcaaatggattaataacatccacatacaaccatggtcatggcgttgttagatactacaccgtgaaatattgcctccagatgaactatcacggacaaaatcatcctcaaaaatatcttattaaaagaggggggagatatcccagcaagtattcaatggtcaaaaaaaccgttgaagagttagagtattcaacaccgacatttgacgcaatatgtaggaacatagcaataaaatacccacacatggtcaagtttgctaattacatatcagaaaccccattaaaaggcttcgccgcaacctttaataactccgttgataatgattaa

SEQ ID NO: 199168 - DNA, 591 bp, Klebsiella oxytoca
atgccgtcactctctgttgagcgctggttagcactagctactgctggagatagccaggctagatttcatctgggtaagatattctcatgcggtcttggtgtgcatcaggattataagcaggctatatactggtttcagcttgcagctgagcaaggccatgatgatgcccagtttagtcttggtttggcatatcatctggggttaggtggatataaagatgctcaaaaagcttcggaatggtatcagaaagctgctgagcaaggtcatgcagaggctcagtttcagcttggaaggctgtatactttctctgatttaagaaatgatgcgttagcagtcgaatggtttctctgtgctgcgaagcaagaccacagtagtgcccaatttaaacttggctggatgtaccatctcggtatgggcgttgagcaaagtgataggcaggctttccattggtttattctggccgctgagcaagatcatgcaggagctcaggcatctcttggtgagatgtataaacatggatggggggtcgagcaagatgatgttgctgcgcaggattggttttatcgtgccagaaccatgcactatccctaa

SEQ ID NO: 199169 - DNA, 537 bp, Klebsiella oxytoca
atgtttgatactgactgcattactgttcttacagctaggggtattactgagattttaaatagtggaggaagccaagcttggagacttgatgctactcacgtagctaagcttccgtacctggtttgcgtccaaaattcgaaaaaagactggggtagtcaggaggctaagcatcatcatgcatttatgatcgggaaaatatccggagtaagtcgagcccctgaaaaccctaagcgctggatcataaatattgattcctatgctgaaattgatatccctgggcagtgggacggcaatcgtaatccagtctcctatagaaaacttgaagacatgggaattgatatctctaaagtggatttccaacccctacctaaagaggattccttagtcttgaatacgataaaaggcggggatgaatatgatgagtatgaggaggatagcaacagagttaggccgataaatctaaaagaggctaaagcagggttggctttatattttggtgtgaatgaggatgatattcagatcacaattaagggatga

SEQ ID NO: 199170 - DNA, 168 bp, Klebsiella oxytoca; identical to SEQ ID NO: 118675

SEQ ID NO: 199171 - DNA, 645 bp, Klebsiella oxytoca; identical to SEQ ID NO: 118676

SEQ ID NO: 199172 - DNA, 453 bp, Klebsiella oxytoca; identical to SEQ ID NO: 118677

SEQ ID NO: 199173 - DNA, 1053 bp, Klebsiella oxytoca; identical to SEQ ID NO: 198549

SEQ ID NO: 199174 - DNA, 471 bp, Klebsiella oxytoca
atgccccaggttcagctggctcttgccgccgtactccgtgctgaccttgatgtgctcttttccccgcgcgtcgtcgaggcggattttgttgttcgccggcgtgcgcagcacgttacgtttatagttccggatggtgacagggtccgggtgcgccgagtcgtgcaggacaccggctatatacggccggtccgggtcgccctgctcaaaggcgatggccacctcggtgcccgccagcaggggcagatgcaggccgtacgtgtcaccggcatacgggcgcgcctggcgtacccacagactctcttctcccggctgccagtggtcgcggtcgaacagcaggttgaccctgtaacgcccgtcgcggtcgatatggccgtagatatcactgcttttcgtgctggtgacccgcgccggcagcgtcccggccatcaccggcctggcgatagtagccgggcggaagccgtaatcttctaa

SEQ ID NO: 199175 - DNA, 249 bp, Klebsiella oxytoca; identical to SEQ ID NO: 32317

SEQ ID NO: 199176 - DNA, 576 bp, Klebsiella oxytoca; identical to SEQ ID NO: 32318

SEQ ID NO: 199177 - DNA, 840 bp, Klebsiella oxytoca; identical to SEQ ID NO: 6027

SEQ ID NO: 199178 - DNA, 492 bp, Klebsiella oxytoca; identical to SEQ ID NO: 15993

SEQ ID NO: 199179 - DNA, 309 bp, Klebsiella oxytoca
  misc_feature (283)..(292): n is a, c, g, or t
atggacattaaaaaggcctgggaaaataagaccgtcagactttctgttattggcgctctgctggtagtgattgtttatattattagccagtctattttttccacaccagttaagaaagaaaagaaaacacagaaaaaagacatgcagaccaatttgttgttagatgattcgcaaatgaacaaattgagtaatgaagaaagccagaaagtatataaagaaatggttaagcaaaaccgacttgaccaaaatgcggcgaaagaggaccgcgaaaaagcagaaaaannnnnnnnnngcccaacaggaaactaa

SEQ ID NO: 199180 - DNA, 2058 bp, Klebsiella oxytoca; identical to SEQ ID NO: 32296

SEQ ID NO: 199181 - DNA, 936 bp, Klebsiella oxytoca; identical to SEQ ID NO: 118628

SEQ ID NO: 199182 - DNA, 681 bp, Klebsiella oxytoca; identical to SEQ ID NO: 30073

SEQ ID NO: 199183 - DNA, 2967 bp, Klebsiella oxytoca; identical to SEQ ID NO: 153364

SEQ ID NO: 199184 - DNA, 681 bp, Klebsiella oxytoca
atgattctcgaagatcagagcggtattggtatccgcgttggcttgcgggatatccgagtcgctatccgaatccgaatcgctgtcagagtcggaatcactgtcagagtcagaatcgctgtcggagtcggaatcgctgtcggagtccgaatcgctgtcggagtccgaatcgctgtcggaatccgagtcactgtcagagtccgaatcgctgtccgaatccgagtcgctgtcggaatccgaatcgctgtcagaatccgagtcgctgtcagagtccgagtcgctgtcagagtccgaatcgctgtcggagtccgaatcgctgtcggagtcagagtcactgtccgaatcggaatcgctgtccgaatccgagtcactgtcagagtccgagtcgctgtcgctatccgagtcactgtcggagtccgagtcgctgtcggagtcggaatcgctgtcgctatccgagtcgctgtcggaatcggagtcactgtcggaatcggagtcgctgtcgctgtcgctatccgagtcgctgtccgaatcggcatcgctgtcagagtcagaatcgctgtcgctatccgaatcgctgtcagagtccgagtcgctgtcgctatccgagtcactgtcggaatcggaatcgctgtcggagtcagagtcagaatcggaatcgctgtcggaatccgagtcgctgtctga

SEQ ID NO: 199185 - DNA, 1578 bp, Klebsiella oxytoca
gtgcagcttatcatcactgatgcggaaggtaagatccgcatccctcttactgattttacgctgcaggatctgctggcgcaggttcatcctgtcccgggaccatttctcaatacgctgagctccgctgataaggctgcatatggctatattgatgagttgggcggtcttaatctcccgggtcttccgacatccgttaacaatatgcttaatggcctgtcccgccgcgtgcagcagcaggcagatggccggtttctcaccagtatcaaggactatggctgggacccgaacagccaggaagatgcacgacaggtgattcagcgcgcaatccgggatatggcccgcaatccgtatggtggtgtgatttacttgccgccaggagtataccggctgagttccttcctcacgcccgcgccgaacgtatcgattatcggggccggtaccgggaaaacgatactgatgccgtatggatcgtattcagccctgcagttcactacgtctccgacgaaccccatcccggaactgacggactttgtctattccgattttgaggtggattgccaggaccaggtcctgcctgatgaaggctatctcccgcggacgaaggggctctattttaacttctatcgccgcggccacctgcaccgcctgcgggtgagaaactctggcgcgactgggattggcatcgactttgcgcgcgattccgccattactgaatgtgttgtggagaatttcgggcgtctggcaccgtcgggtaacgataaccctgccggtgcatccggtctcgggttaggcgccgggggaacacagagtgagccgctgtatgttgctggcaacttctgccgcaacgggaagaatttcggcatcttccttgagaaacagcatggcaccaacgcgccatacagttctgagcacaccatcatcatggggaatacctgcaccggtaataacggaggtatgggcgattgtggcgtggatggcatgattatgcagggaaacaacttctctgaaaataattatggtgtcgttattagtccggggacggtgctggcttaccccggttcgcgcggcctgttgttgggtaatattatcgccaaaaatgctaaacatggcgtctattacaacagcacaacagagcaacgtgatggtgaatatgcaatcactaataacaccattcgtgataacggggaggatggtgtttgcttcaaagcgccgggccaggaagtccgcagtatggaaatatccggaaaccgtatttataacaacgggcgtcatggattccacctggaagacggtacagccattaatatggacgtgattaataaccgaatctggaataacggcctgaccgcttacgggaacggaattaacctggcatcagaggtaaaactcagctcgttcagtggcaataaaattcgagacatccaggctacacccactcagcaatatccttttaatgccactggcgcactgaccgacgtcgatatttcgtttaaccactgcgttggcaatgcacagaacacgcttaatctgaccggcacacaaacccgcgtcaccactctgaacaatccaggaatctga

SEQ ID NO: 199186 - DNA, 192 bp, Klebsiella oxytoca; identical to SEQ ID NO: 197388

SEQ ID NO: 199187 - DNA, 360 bp, Klebsiella oxytoca
atgcaaaataagatcattagcttcatgtttatacataaagaggcggcagtacttgcagaagctataaaacacataatgaataatttacctaaaggtgccatttctgaacctcgcgacgttgcggtgttacagcagtggttttatttcatgagtgatgcttcaatgttaaagcgtattatttcaggagagcaaaaggttactgactggttggaatctattaccagatcatttaatcaaagctcacaaacagaaccgaacgcgctacagaacacaggtattgaagctattttagattcaacaaatgtgtttcaggaagacaatgctgaaaatggttttgatatcgagctcaaaggctggtaa

SEQ ID NO: 199188 - DNA, 366 bp, Klebsiella oxytoca; identical to SEQ ID NO: 195231

SEQ ID NO: 199189 - DNA, 228 bp, Klebsiella oxytoca
atgcaggcggacctcgccatttaccggctggacgatccgcgctacttcggcctgcacgatatggccattgggccggtggcctgcggtgggcgcgccgcgctaaaggcgctgctgctcaatggccgccccatcgtggaagacgacgccattcccggtctcgaccttgacgcgatgcgccacgacgcgctggcggccgtccgtaccctccaacagcgcgccgctgtttaa

SEQ ID NO: 199190 - DNA, 213 bp, Klebsiella oxytoca
atgctgaaaagtgaaccgtcattcgcgtctctgctcgttaagcaaagccccggcatgcactacggccacggctggatcgcaggtaaggacggcaagcgctggcacccttgcaactctcagtccgaattattaaaagggctgaaatcaaagccagtcaatcaatcaggctttttaattattcgcattgtccgttcaatcctaaaaggtaactaa

SEQ ID NO: 199191 - DNA, 201 bp, Klebsiella oxytoca
atgacccgtgatgaattgagaatcgtattaggtgcttttattccaaatatggaggaaggctttgaaataaagacgcgtgatggtgcggtcttgcgcgttaatcctgaatgggagtgctgcaaagaattcaaagatggattaaaagcggaagttataagccagttaagaagtaaacccgccgtcgtttttggttatagctaa

SEQ ID NO: 199192 - DNA, 582 bp, Klebsiella oxytoca
atgagcattattaatacgacaattagccagcatgccaaacgttggcttaatgatgggtacttatttatcgataccgaaactactggattaggtgacgatgcggaaatcgttgaaatctgcattatagataaaaatggttttattatgcttaacacgctaattaaacctactaaacctatccctgatgaggctatcgctattcatggtattaccaatgaaatggttgcttatgctccaacgtggaaagatgtccacggtgcagtagccaatctattctttaattatggcttcgttatttataatgctgattatgatactcgtctgatacgtcaaacagcggaattaaatggattagggacagacgggctatcttcatttatagatcattccctgtgcgccatgatgttatatgcagaataccgtggcgagccggggagatttcacggttataagtggcataaattagtcgatgccgccgcgcatgaaggggttgtggttgaagggcaggcacaccgtgctttagcagattgcaaaatgacattaggtgtcattaaagctttagcgcaaggcggtgcagaatga

SEQ ID NO: 199193 - DNA, 273 bp, Klebsiella oxytoca
atgagcattcgcattgaaatcggcgacaaatggattattaacagcgaccagtatcaattcattctgagcgagaaaaaggtcgcgaaaagcggccgtaaagctggtgaggagtggcttgatactattggctactatccgaaaatcgaacagcttatttacggccttattcatcatcacatccagcagtcgaccatcacctcaattgaggaaatggccgctgagattaagcgtatcggagaaatgtgcgcctccttaatcaaggcggcggcatga

SEQ ID NO: 199194 - DNA, 642 bp, Klebsiella oxytoca
atgaatacgttatccacgatacaggagctcgctcgcgcgattcgcaacctcatccgctcaggcgtggtgactgaggtcgataccgtgcaggggctgtgccgcgtacaaagcggcgggatccagacgacatggctgaactggctgaccacccgcgccggtcggtcgcgcacgtggtgggctccttctgttggtgagcaggtgctgctgctggcaatcggtggtgagcttgataccgcgtttgtgctaccgggtatttattccgacgacaaccccgcgccgtcggcctcggcggatgcgtggctcgttgagtttccagatggtgccgtcatgagttatgagccggaaaccggcgcgctgaccgtcaccggcattaaaaccgccgatgtgaccgcatccgattcggttgccgtcagcgtgccggtggtgctgataaaagccgacacccgcgtcaccctcgatacgccggaggtggtctgcactaacaagctgacgaccggtacgctggaggtgaaacaaggcggaaaaatgtccggcaatatcgagcacagcggcggcgctttcacatcaaacggtgtgcaggtggacagacacggtcacggcggcatcaggcgcggcgatgaatggacggagggcacccaatga

SEQ ID NO: 199195 - DNA, 597 bp, Klebsiella oxytoca
atgaataactcgttgatggcgacaggttcgtcggtgctggaacagcgagccgccgaagcgtgcgccgtcatcagtgatttatccgtcccgctgcgtgacctgtggaatccgtggaaatgtccggccaagtttctgccttatctggcgtgggcgttttctgtggaccgctgggatgaggactggacggacacgcagaagcgacaggcaattattgattcattctggctgcatcaacgcaaagggacgattgcggccgtcaggagagtgattgaggacatggggttttcgccatcattaacggagtggtggcaggtggatgaccccgccgggacttttcggcttgaaatagatgttaatgaggtcgggttaaccagtaagtcactggacgaactgaaccggctgattaacgtgactaaacccgtcagccgccatgtttcgcagttagctatctcggcaaaagtgaacggcgatatttttgtgggtgccgccctgcagagcggtgaaatcattaccgtctatccggaaaactatgaaccggatgacagcattttttataacggtctgtttttccacgatggaaatattaactacaggtaa

SEQ ID NO: 199196 - DNA, 135 bp, Klebsiella oxytoca
atgggggcggtcatttttgtcccccataaactggattgcatacgcagcttccgcaattttcattattgtggagccagtagagtcaatggatattactccctctccctggagaaccactggcacggtaatatctaa

SEQ ID NO: 199197 - DNA, 558 bp, Klebsiella oxytoca
atgaatgaattagtatctgacaaaaatgttgccataaacttactagaacatcgagaaaggttattaaaagccggcgacagagcatacctatatgacatcaatagatgctataaaacagtgattcgtcatttacaaaaatccgggtataaaaaaatttcctccaaaaaatgcccacaactaatcaaaacatttgtggatctaatttttgaggcgcaatataaaaaaccttttttccatatcgaaggagatctcccattttgctggaactctccagcaaagggcggttgggagctggattatataaaatatgagtggggacatttcaactctataaatcaaaatatcaacacagcccataacatagaaaatctctgcttacaatcagctaggtgcaatcaacatatacaaagctcactaaatatccctgagttattatcttacggaggaaagctagaggaagttgtaactcaaaacataaaaagaagaaatgaactattcaaatcaaaagagtggaaattattaattgagaacctcgagcattacaaagatcaaccctaa

SEQ ID NO: 199198 - DNA, 762 bp, Klebsiella oxytoca
atgacagataaagcaacatatcgcgctaattgtccattatgtatgggcgaaagaaactgcatagtttttggagagaccgaacgatattggagcaacagcaataacaaataccatgtagaatgggggacagagtaccgtcttctgcaatgtaaaggatgtgatacggtattttatcattcaaaatcttggcatagtgaggattcagaatatgatcaagatgacgaaggaaaaactatcgtcatatcaaattatagatatgaaacctatcccagtgcgcttgaacagcgcccattatgggttgaaaaaatagttgatgttgattaccagctttatatattgcttaatgaaatgtataaggcttattataatgaatcatatattttggcttcaatcggtttaaggactgccttcgatcgcacttctgaaatactaaaaatattacccacattgcctttagtaaaaaaaatcgaaagacttgctgagcaaggttatattggtgagactgaaaaaagtcagttacttatagttacagatgcaggtaatgctgctgcgcatcgtgcttggtcaccgacagaaagcgagtttaaatctttgttaaccataactgaagatttcattcgccgctctgtacttcgagataacagtagcataaaaaaaattgcggggaatatccctgttaagatgaaaaaaagtgtcgacaaaggtgtggggttgcctgaccactcttctggagtagaagatttaccttctgatagaagttag

SEQ ID NO: 199199 - DNA, 501 bp, Klebsiella oxytoca
atgatctgggcattaatcaaagcgtactggaaacagttgcttatcgtggcgatgcttgctgctatggtgtccggcggcgttgtcgcctggaacgtccacggtgacaggcagtataaagccgggtatgcacaggcgaaggcagaccgcaaagcagaagatgagaaagcccgtcaacacgacgaacaggagaaagcaaccaatgaacgtgaagcccagcagaggatcgaccaggcgcgcaatgatgctcttgatgctgccgctcgcgctggccggctgcagcagcagctcgttgccatccgtgagcagctcaggcagtataacgccactgtcggcgctgggacgtcagccgcagacaccggagttttgcttgccgacgtgctcgaaaaatctctcgaacgaaacaggcaactggcagaatacgctgaccgggcagcagaagccggaaaggtctgcgaaaggcagtacgatgaactaacgaaacagggtactatttcccggtga

SEQ ID NO: 199200 - DNA, 606 bp, Klebsiella oxytoca
atggcctcagttattgagatctgcaacctcgcgctgagcaatatcggcaacaaccggagcattaatagcctgacggaggcgagcaaagaagccgggcagtgctcacttcattacgaaaatacacgtgatgcggttctggctgatttcgactggaactttgccaccaagactgtagctctggcagatactaacaatccccctccaaactgggcatatgcatatcaatatcctactgactgcttgaggatcacagaaataccattgccgggggtgagatatccaacagcggcacagcgtgttcagtacataactggttctaatagtgaaggtacagggaaactgatctatacagatttgcctggtgcctggctgaaatatgtttcccgaatcactgatgtgaacatgttcgattccatattccaagaggctttagcctggcggctggcagcagcaatcaatatggtgattaccggtaatgccgatctcggcaataacgcgctgaatatgtacagccgcgtaatcctcagcgcaggctctcacagcatgaatgaatcgcaggagccgcagctgccggacgatccgtttaccgtagcgaggatgtgctga

SEQ ID NO: 199201 - DNA, 222 bp, Klebsiella oxytoca
atgtcacggttattttggaagattttgtttagctctacattcgtctatcacataacgcattgcgactcttccaagatcatttggattctcatgcaaatgtacctgcgcttttgcaaatacgcatatagccttaacatacccagcaggaacgactccaacctcagcatttttgaatgcctctttaactgccttatcgtcgtaatctccaccaataagctctga

SEQ ID NO: 199202 - DNA, 444 bp, Klebsiella oxytoca
atgaccagcaaattaaccagagagcgcatcgagcagtacgccaacgatccgcgcatgtgcaacatcaacgatgagattcgcgagatggcccgcatggcgctggccgcaccggacagcgagcctaaccgtaatcctgtgctgccgtatgccgacagttatcgtgatatggcgaaacaaggcgtcgagtcagtcccaatatggagcgtcattaccgaccttgagcgcaatatagcgccgctctatcgccacgcgcagcagccggttgtgcctgaccgctccatattcgaaaaatggtgggaatcacagaatggagcgcccctcgatggctgggattcgttacggacaactgacggctattgtgacgatggcattgatggtcaatttgaagcctggaacgccgccacgctcgcagccgccccgcaggaggtgccagatggaaaatga

SEQ ID NO: 199203 - DNA, 135 bp, Klebsiella oxytoca
atggactttgatttcgtgaattacagccggcggtcactgctgctgtttgtgacagtggcaaacatcattgggtgggtggcaatcatcgccgtcgtgtctgtggtctatctggcgatcgaatgggtgacggaatga

SEQ ID NO: 199204 - DNA, 603 bp, Klebsiella oxytoca
atgagcacgaagaccaatgctgctggattgattgtatccggtgacaaaaatccgaactggaaaggcgggaaagtcgaaaaggtttgcgccgtatgtggcaagcaataccaggttaagcgggtcaattcttcctcgcgtttttgctcgcttcagtgcgttggtatctcccagagaggaaagactgttaatcgagaaccaaagcgtgaaacgaaaacatgctgcgtttgcggatctccgttctctgttttcagaagccacgcgaagcgcatgaagtgttgctcaaagtcgtgttccaacgaaatgcggtcatctctcatgaagggcgatggaaatcctaactggtctggtggcttatcgcgctttccatatccgtgggacttccgggagacgagcaaaaaggtgatcgagcgtgacgggtttatttgccagaacccagggtgtgatggaaatgacgaacgcctcactacgcatcacatcaactacgacaagcaagattgccgacaggagaacctgatctgcctttgttcgagctgtaactcgaaggctaatttcggtcggcataagtggcaaaagttttatgaatcactgatggcaaagagatag

SEQ ID NO: 199205 - DNA, 354 bp, Klebsiella oxytoca
atgaagaaatcattgcaggcgctcgggagacttaaggccgggcagatgaataaaaccgagacggcttactgccagcacctcgaactgcgcaagcgctacggggaaatcgcctggtaccggtttgaaggaatcaagctgaggctggctgataactgtttcctgactgtcgattttgccgtgatgttggccgatgggcggttggtgatggtggacgttaagggcagcaaggcggtctttactgacgatgcgagagtcaagatgaaggttgcggcagacagctatccgttcgtctttcaggttgcttatccgaaacctaaaaagctcggcggtggatgggagattgaagagttatga

SEQ ID NO: 199206 - DNA, 900 bp, Klebsiella oxytoca
atgagcaacgacatcacaatcacttctcaacctggcgctaccgtcggcaccgcggcggcaatattcagtccggaaggtatggatcgcctggtgcgcttcgccaccctaatggcagacagcaaagccactgtaccggtgcaccttgctggtaagccagctgattgcctggccgtcactatgcaggccgcgcagtggggcatgaacccgttcgcagtcgcgcagaaaacgcacgtggttaacggaacgctgggctatgaggcacagcttgtaaatgcagtagtgtcctcttctaacctgctagcaacgcgcctgaactatcgctgggatggtgactggtcaaaggtgaatggcaagagcgataaatccccttcactgacagtgacggtatcggcggttcttaaaggggaagctgaacctcgcgagttgacaataagcatggcgcaggccggtgttcgtaactctccgctatgggaacaggatccgcgccagcagctggcttacctgtgcgttaagcgttgggctcgccttcatgctcctgacgttcttctgggagtctacacgcctgacgagttacaggagaccgcgccgcgcgtagagcgtgatatcacaccaccagcaagaaacgccgctgggatgaactcgctcatcaacgctaaacctgatcagcagccggaagataagcacccaacccgatctcaagatgaaatcctggccagtttcacggatgcagctggtaaggctgaaaacgctgacaagctaaaccttattttcaatggagggacctggccagatgggaaaaaacgcccaggcgcatgtgatgcgctttctgataaatggctggaaatggcgacagaagtctacaccatccgccgcgatgaactgaacgaaaacccgatgtaa

SEQ ID NO: 199207 - DNA, 213 bp, Klebsiella oxytoca
atggcctgcgtcgtggtggttatgctgggatctgcgctactgccggggtggtttatgactaatccgcacgacaacattcgcgtaggtagtgtcaccctggtttattcatcattgcgccgtgggtggctggcgcctggcggtcaggttatccagaacccgctgaaggctcagcgcctggctgagctaatcaacagtaagaaggtggcggcatga

SEQ ID NO: 199208 - DNA, 243 bp, Klebsiella oxytoca
atgcagattttcttttgtgcggggaactcagcaaaaaaccgccgctcatttgcccgaggttttttctggttggcaatcaagatgctgagaggtgggaatgtgagtattgaagtcaaagaccacgaaggctccagggagagtattttacagggcggaggtggcgtcgtggcgctcgttgataacggggaaacaatatccgtaagagacaaaggaggttgtaaatccccttcatcatgtgagtag

SEQ ID NO: 199209 - DNA, 303 bp, Klebsiella oxytoca
atgagtatgaatgtggcggaaaagctaaaaatcatgcgcgaaagtgagcgcctcaccagtctgcctgacgcagccaagatgttaggccttaatcgagatgctttatggcgttacgaggcaggtaaaacagtccctaacactgaggtgatcatgaacatccttaatcatccgcgattccagaaatacgcgctttggttcattaccggaaagattgctcctgaatccggtcaaatcgcaccggctctcgcacactttgggcaagacgaaacaatctctcagccctcagaccagaaaactggctaa

SEQ ID NO: 199210 - DNA, 975 bp, Klebsiella oxytoca
atgtatgaacaatggaaaaaagcggtagttcatttggagtgcgctactgatagtgataacctttacctaaagtggaagaaagatgaagagttacaggaaaaattagataagggtgaaatttcttacgaggaatacagagagggttcaaagtccaaaacccgagatataagatttcacggtactgctatttttgttgttcataatgaaaaatattacctattaacggcaaggcatgttcttttcgatgagcgtcaggccaatgttgaattacaagaaagagaaagaatacgtgagaaaatgccagaaccatttggcagtattttttttaatgaggaaatgaaaaaatcgtctaattatatttttaaaatcatttttagagtgccatctttagatgaggcaataagcgggattgaacagggagggtatgactttttatcgcatttagccgctggggtttcatatatgcacccttatacattctcgcctcccgaactggatttagctattatttctttaagaaaggagttaagaggttttgctgacaggttgattagtttaggttattcaccaatttcatctgaattaatagcagacggcccctcatctgaaggggctgaggttttcactgtcggctttcctagtgccacctcccttgtgacgcaagtaatgcaacatccctctgatgtaccctggtcttccggttttttatccctaccagttttctcttgggggagggtttctatgctgcacgaacaacttccattttattggtgtgacatgagcatttacccgggtaacagtggaggaccggtgattgaaaaggggcaattggttggaattgttagcgcgcaagcaacattaccactagagggggcacctatgaccagaactcgcatcccgttcggaaaaataattaaaaccaatttcgttaaagcgcttcttgatgagcaagaggctaaagatctacgacaataa

SEQ ID NO: 199211 - DNA, 420 bp, Klebsiella oxytoca
atgatgaattttgattatttgatttgtgcattagaaagaaacaaccctgaaagtgagttttcggataagtttagagccataatggcacttaactttctgccacgaagatacatagacgaatcgggcaacttaggtgagatatgcacattcgctgaatctaaacaagagattgcgcttggagatgtgaaggggaaagtttattgggaatacttcattcctcacaccgctgttactgcggaatttttcagcaccgttaacagtcgtctttcaatatggaattttacaggagaactactgagaaaaggtgttgagatttatggcttagatgagtgtggaaatctgttcggaattagccacaaacataagataagagtaatttcagattgcgcacgaaaaaacctcccttacaacgcaaaatga

SEQ ID NO: 199212 - DNA, 597 bp, Klebsiella oxytoca
atgagtaactccctcctgccgccttcttccggggactggctccgctataccgaagcgggcacggccaagctgtcggcgatcaccgttgcacttcgcactctgtggacgccgaccgcctgtccggttgatctgctgccgtatctggcctgggcgctgtcggtggacaggtgggataagggctggccagcagagagaaaaattgccgctatccagcgctcgtactggttacaccgccggaaggggacgcgcggtgctgtacgtcgcgttgttgaggatatgggtttttcggcgacattcgccgagtggtttgacgtcagcgacgagccaggaacattccgacttgaggtggacgtgaatgaagccgggctgacccctaaaacactgagcgaactggaaaggctgattgatgatgccaaacccgtcagtcggcatttagctcagctcaatattgcagcgaaagtggccggtgatatacgcatgggcgcgacgctatatagcggtgaaatcattactgtctatccggaaaactatgaaccggatgacagcattttttataacggtctgtttttccacgatggaaatattaactacaggtaa

SEQ ID NO: 199213 - DNA, 153 bp, Klebsiella oxytoca
atgaccacgttcactgtagaaattcacaaagaaaacgtcactagacttaaaaagagcgtccagccggagataacactagacatgccatctgtcccgggcttggcgataagttgcgggttaaaagtatgccaggcacacatattgtcgaaatag

SEQ ID NO: 199214 - DNA, 3063 bp, Klebsiella oxytoca
atggatatctcccgccagtttattaacaatccaatccgcgtctggctgactattttactgctgggcatcggcgggatcttcgctctgctgaacatcggccggctggaagatccggcgtttaccatcaaaaccgcggtggtggttacccattatcccggcgcttcagcgcagcaggtggaagaagaagtcaccctgccgctggagaacgcgctgcagcagctgccctatctcgataacgtcagctccatttcctctaacggcctgtcgcaaattaccgtcaacatcgcctcgcactaccactccagcgagctgccgcaaatctgggatgaactgcgccgccgggttggcgacgccgctcgccagttcccgcccggcgtcgcttctccgttcgtgaatgacgattttggcgatgtctttggcttcttcttcgccctctccggcgagagctttaccaaccctgagctggttcgctatgccgagcagctgcgccgtgaactggtgctggtgcccggcgtcggtaaagtcgccatcggcggggcgatcccccagcaaatcaacattgatatctcattggcgaaaatggccgcccgcgggattacgctcaaccagctggcggcgatcctcagccggttgaacgtcgtctctaacgccggagaaattaaatccggcagcgaatcgatccgcctgcatcccacgggcgagtttgccaaccttgacgagctgggcgatctgttaatcagcccgcacggttcgggaacggcgacgcggctgcgcgatattgccacgctctcgcgcgggctgagcgaaacgccctccagcatttaccacgccaacggtcgccaggcggtcaccatgggggtgtcgtttatccccggggttaacgtgattgatgttggccgtgcgctgcaaaacaaactggcgcagatgtcggcggaaaaaccggccgggatcaacattgacctgttctacgatcaggcggcggaagtcgcccattcggtcaacggttttatcaccaactttctgatggcgctggcgattgtcgttggcgtactactgatctttatgggcgtacgcagcggtattattatcgccctgtcgctggcgctcaacgtactcggcacgctgctgattatgtatctgtgggggatcgagctgcagcgtatttcgctgggggcattgattatcgccctgagcatgctggtcgataacgctatcgttatcgtcgaaggcgtgctgatcgcccgccagcagggatcgacgcgacttacggcaattaattatgtgattcgccgttcggccctgccgctgctgggggccacggtgattgcgattcttgcctttgcgccgattgggctgtcgcaggactcgaccggggaatattgtaaatcgctgttccaggtactgctgatttcgctcatgctgagctggttctcggcgctgaccattaccccggtgctcattaaatggtggctgtttaagcctcaatcgcagccggtggcgcaggccgataccaacccgtacggcggacgtttttaccgcctgtatcagctgactctgcaggcccttctgctgcgcaaaaccgtcaccctgaccgtcatggcggcgctgctggccgccgctatctgggggtttggttcggtgcgacaaaactttttcccctcttcaaacacgcccattttctttgtcgatctctggcttccctacggtaccgatattgcgaccactgaaaagatgaccagcgatattgagactgccattaacggccagcccggagtcgtcaccaccgtggctaccgtcggccagggcagtatgcggtttatcctgacctacagcgggcaacggcagtacagcaactatgcgcagatcatggtgcgcatggacgaccagcgcagcattgccgccctgacgcagcatgtagatcgctatattgcgcgtaactatccgcaggtgaacgccagcacaaaacgcgtgatgttcggcccttccggcgacagcgccatcgaggtgcggatcaaaggtcccgacccagacagactacgcctgatcgccagccaggttggcgatatcctctccgcagacccggccaccgatggcgttcgcaacgactggcaaaaccgcagtaaagttatccgtccccagtactccaccgcccttgggcgcgaactgggcgtcgataaacaggatatcgataacgcgctggagatgaacttctccggcagccgcgcgggactgtaccgtgagggtgccgacctgctgccggtgatagtccgcccacccgccgccgagcgccaggatgcgaatcacttaaataacgtgctggtctggagccaaagccgccagcagtatattccgctcagtaacgtggtcagcggctttcaccttgaatgggaggatccgctgatcctgcgccgcgaccgcagccgcgtgctgacggtgcagaccgatcccgacccgctcagcaaccagacctccggggatatcctctcccgcgtgaaaccgcagatcgatgcgctggtgctgccgcacggctacagcatcgagtggggtggtgatgcggaaaactccagcgaggcgcagcagggactgttcacaaccctgccgctgggttacctggtgatgtttatcatcaccgtactgatgttcagttcgctgaaaaatgcgattgccatctggctgaccgtaccgctggcgctgattggcgtaacgccgggctttttaatcaccggcatcccctttggttttatggcgctgatcggtctgctcagcctgagcggaatgctgatccgtaacggtatcgtgctggttgaggagattgaacagcagaagcaggaaaaagagcagcaggaggcgattatttatgccgccacgtcgcgtttgcgccctatcctgctgacggcgtttaccaccgtgcttggcctggcgcctttactactggacgttttcttccagagcatggcggttgttatcatgtttggtctgggttttgctactattctgacgctgctggttctgccggtaatttacgcctgtttccacaataaggacatgaagcgacaaccatga

SEQ ID NO: 199215 - DNA, 651 bp, Klebsiella oxytoca; identical to SEQ ID NO: 198762

SEQ ID NO: 199216 - DNA, 912 bp, Klebsiella oxytoca; identical to SEQ ID NO: 191413

SEQ ID NO: 199217 - DNA, 252 bp, Klebsiella oxytoca
atgctggtcactacggttatttataagggaattaaagtagaaaacgctgagctgtctgtcggaacgattaatatctccgatgataaaacagtgatgtcatttactgtcaatcaccgtgcccccggtagctatgatgttttttatgaagaaacattcagcagtgaatacgacatagagggagaaaaccccgagaaacaggcttatgaatatctgttctcgctgccccggttcagcgatgccgttgagcgttga

SEQ ID NO: 199218 - DNA, 192 bp, Klebsiella oxytoca
atgattacgggtgagcgcatgctcgcccagctgttcatccgtgtaatcctttgtctcgtttcccgcattgatgacatcttccaccgtcgcaataacaatgcccgggttaaccagaagctctatattttccgtactgctgaccgcaagccatattctcagtatggtgaaacgccccgacccctctgccagtaa

SEQ ID NO: 199219 - DNA, 225 bp, Klebsiella oxytoca
atgaaaatagaatttattgataaaggtgtgattgcaaccgcgattgtcaccagtacggtattcgaattccggctacacaatcgcgccgttgatactgctttattcctggctccttctgttcgttcaaagcgtagcggattctttattttaaaaacggttatttccggtaaaacacctcacgtactgcgcgcatacagcgcacttcgcgcggaggcttcacgatga

SEQ ID NO: 199220 - DNA, 234 bp, Klebsiella oxytoca
atggaaaccgaaacactcaactgctacagctgcggcggctccttttcacgcgaagaattgcagtatcgccccatcggaaagggggcataccgtaagcaagcctattactgccctgtgtgcaatgaaaagcaaaagaagaaagaaacgctcacagctgcacagtcatcattccgaaactcattaccagccagaccagcaacagcccaattacggccttcgttctggaataaataa

SEQ ID NO: 199221 - DNA, 543 bp, Klebsiella oxytoca
atgagcatcatgatcgaaaaaatggatgttctgtctttcaccattaccggcgctgaacgcttagaccctgtgcgggtgatgattgaaaactatgagccagggaagggaagaatcacagtcacctgctacgggcaggcatggactggcgcatggtttgcaatgggcggtgacactgttcaggagttcattaagcgtgtcagcaatgactacctgatcgggtgtttatctccccggcttgaaagctcggttgacgatgataacgacgccaaccttgcattcgttaaatctcaaatcatcaagttgcgccgcgaacgggaacttgacgctgagaaatcccgtgaaatgtggaatgaggccgaaaatgctgatgacgttaaggcatgttgctgtgactacggtattggcaacgaacttttagagctttttggcgatgacccctggtatgccggatggccgtctgtacccaatccgaaatatcaatatctcgatcgcatcctgaatgccgttcgtgtcggcctggtagaaatggagcgtacagcatga

SEQ ID NO: 199222 - DNA, 900 bp, Klebsiella oxytoca
atgagcttaaggtcagagcgcacaaaatgggttatgtttctgccatgttcgaattcatccgctgagccccggcacgtccttgacctggtttttggtgttttatgtctggaacgtgcaggaattcaaccgcaagatatttacatctacattgacagtcccactcagtgcatggatagtttttttaatcttggatcaacgcatcaatacatatcacggccaactacggattttttcattgatctgattgataactcatatgataatttggtgatgtttattagtggccatggaagtccatttggtttagatgcaccaaaaccaataacacccaatcaattgattacatctctaaagtcaacgcctgttctaaaaaatgcagtcatctatttaggccaatgttatgctggaacctttaattttgttaatgcagggaaggctaaaggtgagattcttgatattatcttggtaggagccaccaaccttcatcagagtttaagtactggtacatctgaacagttttccgttcctggaattaaacttccctggatggcaaatgtctttctcctgcatgtttttaaatggatgtcttcacctctggacattgatggtgatggaatttatacgattatggactcatataaatatgcgggcgtgtatactaatgatgcaaataaacaagtcaaaacaaatggcttcatcagtataattgatatgcttaatgattttattggcgctagagagttagcaaaagttgagcatgaagatgagcaggtcaatatcgataacaaagtggattgccaggcaaaatatgaaatgtatattaaccggctagcacttcatcatgtgcatcaggaatgttggatattaaactccaggcctgcgcagttgattgagttctga

SEQ ID NO: 199223 - DNA, 639 bp, Klebsiella oxytoca
atgaatccatggggtcctataattgcggccatgattgcggggtttatagcgttcattggcatgataataactaaggaaaataaagtctcagaatttaggcaagcatggataaatgattttagggaagagatttcatatttaattgaagcatataaaaaatggacccttaacaataacctctaccagactcatttaggtatctcttatctttatatggtcgatgaggtattggctaaaccatatagagataaatcgcagtggtatgagcaaacattgtcagatgcaattaatgagatggaaagatataagggtagaataaagcttaggctaaattcagatatcaatcgaagaaaagaacctgaaatccgtctagacgccttgcttgataaacttaactctacagaagatttgactcttgccgagaaattatcaaaagatatttatcttaactcttctttaattttaagtgcagaatggaaagtagttaagaaaggggaggagtcatacgtcaagtcaaaaaagtttcttctacatttcgcaatttttgtttgcatcatcggaggcgtcggtttttgttttcatcttgaggatgcaatgaggtggataatgaataacccacagcctttaataaaacattag

SEQ ID NO: 199224 - DNA, 315 bp, Klebsiella oxytoca
atgcaacgtatgaatccaaccgatggtcacaacctgccttactggtggtcagggttgcttggcttcttttccgttctgagtttgcaggattacgtctttatcatcggtgcgctgatatcggcgtatttcacgatcaagacgtactacgcgaaacgcaaggaagagcgcgagcggcttgatgaagaaaaaaaacgcactcagcttctggcgagttacctggctgatgtttccacaaagcccagcagtgaccgcccggcatcggctgaggttgtaactgaagctcttaaacgtatcgcaaatgatgcccagggataa

SEQ ID NO: 199225 - DNA, 543 bp, Klebsiella oxytoca
atgacgccatcgacaagagcaaaactaagcgcggccatgctggcgcttatcgccgctggcgcatcagctcccgttctcatggatcagttcctgaatgagaaagagggtaacagcctcacatcataccgtgatggcgccggcatctggacgatatgtcgtggagctacccggatagacggaagacctgtaacgcaggggatgaagttatcccaggcaaaatgcgatcaggtgaatgctgttgagcgcgacaaggcgctggcgtgggtggacaggaatatcaaggtcccgctcaccgagccgcagaaagtcggcatcgccagtttctgcccgtacaacatcggtcccggaaaatgctttccctctggattccttcgcaaactgaacgccggtgaccgtaaaggtgcctgcgctgagattcgtcgttggatctttgacggtggacgtgactgccgcctgacaaaaggccagaagaacggctgctacggtcaggttgaaaggcgagaccaggaaagtgcgttgacttgttgggggatagaccaatga

SEQ ID NO: 199226 - DNA, 321 bp, Klebsiella oxytoca
atgaaaaacggtatttacttcgttactttcagcagcaatgaccatgacgttggacagggcactgtagtagtaaaagaaaacgccatcaacggtggggatttcggatttacctaccaagggcatattcagggcgatacattagatttgcatgtttctcagcataatcctcaggcggtcaatgtcattcaaggtgtaaatgactacacgatggaaatgagcattgtagaagtgcaagggggttaccttttatcaggggccgttaaaggagtccctcaggctcggcttagagtaagtgcaaaattcattggtgagttggtttaa

SEQ ID NO: 199227 - DNA, 264 bp, Klebsiella oxytoca
atgtacctaaaaattaagctaatcaaaggaaaggggttggttggtgaggatcctgacactggtaaagtttatataataaataccggattatcctttactggtgttactagcaaaggagagaaatgctcagtgatcaataccgctagggttgaatctcttcaagatgtgtcagaaagaatgattgttattcatggtggtaccgtgcttactggcgatttattgattcgcccagaccgagaatgtcgattagctgaaataagataa

SEQ ID NO: 199228 - DNA, 714 bp, Klebsiella oxytoca
atgaacgcgaaactagcgctatgtctgctcgtcttaccgttgtattcatatgcaatgacttgtccttttggcataggattttcagcgccgcaaggtgggatcaagggtgaagagccgtactttttcacgcctgaaggtgtttgtctcaatggccgcgatgtaagtcagcaattaaagagctatcccgacgataaaattaccggggcattctctttggcaaaaggggatggttcactgttttttgttagcgtctacagtgaaaagcattaccatggaagagttattcttttatccgataccaataaaggagctggctacgcagtcctcttccagaaccaacctggcataagaacaaataatccagaggagtcagtagaaaaccttaccattaattattttgataatcagacgtcaacgctttacttcagtgctgatgcttgggctcaagcaagggccttgcatgccattatttgggaaaacccttcaaaccctctcagagtgacggagcggtttattcatgacggaacgtttcagggggtcttcaatggtatgccaatggtatctacgattgcgcatgatgaaaagggcgcatactttccttcttacgttgttagaaacgacggttcaatatactgcactatcaatacgcgcgagaacttttggcaactgacgccatcatgcctttcaccaggggatgactatcgggaaagatga

SEQ ID NO: 199229 - DNA, 2466 bp, Klebsiella oxytoca
atggaaaagaaatatattgaatatctacatgcagcacaaacggtacaaaatgattccgaaagattaagctttttaacttccactctaagatcactacttcaaacagctgtaatatcttcgtttgaaattgctaaaaacttaacaccaagtgatgaacatgacctaatagaattaactaatcgcttttgtaaaccatcagatggtttgcctttgcaaattttagacacccttacaccagtaataagaagctatatcgcaaatgattatttgcacggttggtttgaatcaaccaaattaatagaaaaaccattatccaaacaattaatagaatgggttgaattcagaaataaaagaactgggcacggagtcctcgacgaaaaaataaacaaagaatgggcaagcaaaacagaaggcattattaaagactccttaattgtattcgcaaaaatattaccagagatttctcccaacgaagaactgttacctctaaaacactttagcggaacaaagatatccactccgatatatttcatgaatagtgcagttgtaattctagccataatcgtcagaaaaggtatatggaaacttaaaggacaattactttctttcaaaaatgctaatgaattctcgatcaaccttgaagacgataatatattcaacacaacaggaataaagccaacaggaaagtatgagcttgcagatataatatcgaataataatcaccattcattttttcacaacatccccgtaagacaaacagatatattcgaaggtagaaaggatgaactaaaaaaattacaagaatggtttgatgacgaagactctagatattgtttagtttacggtgatggtggttacggtaaaacaactttagtcttggaaatgttgaatctatttctagaaagccaatatgatttcaatgaacctttaccaacaattattagttaccatacagctaaactgacgagatggaccgatcaaggattagttcatttaactggaacgcttccagtaatggatgagtgtttgagagagctagttagatgctttcatcctgttctcagtcaggaatggtatacaacctctggaaaaccattaattgataaaacaattggtgttcttaaagagaataaacttacacgcaatgacgttattctcataatagataatacggaaactcttgcgacaaatccccaagaagtcaaggatcttggcgcttttttcaaaacaattggcaaattgataggcaggataattatcacatcgagaaggcgcgagttcattgaggctactccaatagctatagagggtctttctgaaattgaaggcgtcaatcttatgaaaagactagcaaatgagttctcagcaaaagcgatccagcaagccggcgaagctaagttgagaaaagtgtcagaacaactgatgcataagccaattctgctagaggcacttgttaaatacgtagcacgagtatcctcgggtattgatgttgcaatcgatactgtgttcaaaaaatcaaatgagcagctattagaatttttgtacgaagatgcatggcaaagaatgaatcaacttcagaaagaggtatttttaactttaattcaccttaccagtccgttagatcagaacacaattagcagaacctgccaaaagattggaatacaacatactgagtttcaagaggggctcgaagaaactcatttctcagttttgactgattatggccgtacttacactatagaactcgttgacttagctaaaaggtttttcctccaacagtttagtaaattagaaaccgatgaaaaaataaaactcaaagatatagctgagcaagttgattcatatgcagctgaacgagaagctatagacaaagaatataaaacagaccggatagctgaagcatttagaagtgagtatgcaaaagctgcaaaagtttatgttgataagggggatataaataatgctatcgacatgtacaaacttgcaattgaagatgatccattaaactcttcattacatgacagattttcatggtttttattaaataaaaccactgattacgcatatgctaaaataatttctgaaaaagcggttgagcttgacaaaaacaattgtgatgccattgttggcctagcactagttaattatcgattaggtaacattccagaaggagacaaatatatagatctggcgcaaaacgctgggcgcagcctttctttctgtttactgagaaaagcaatagctagatattaccaggcaaaaaacgaagaaattatagatcggaaaattgtttttttagaagtggcgcttgattttttagaacaagccgacagaaaaaacacaatagccaaaggttatgatgcaaaaaataaaagcgacatattacgttaccaggcgctaaccaagaatcgacttagtgctttaagagcatcaagaacaaaaatgatgagatataatacaaattaa

SEQ ID NO: 199230 - DNA, 234 bp, Klebsiella oxytoca
atggggtgggatttacaaatggcgtctttttgctcgcttcgtcatcatcccttcataaagcaggtgcattcagcggcgcttatcactattctccatgatacgaaaggccttttcatgaattccctctccgccttgcgtaaagaaataagtacatctacggaatttgataattacacaaacacaacaatatgtgcgctgcatcactcggggcaaaacgggccgcaggctcagtga

SEQ ID NO: 199231 - DNA, 831 bp, Klebsiella oxytoca; identical to SEQ ID NO: 96578

SEQ ID NO: 199232 - DNA, 492 bp, Klebsiella oxytoca
atgacagaacaatcctacggcgaaagcctcaaatttttctcagactggcagaaggaccccgcgaaacgcaccggcctgaatgtgcaacacacgctaaccagaggtgaatatcctacggtcagcatcgagattgcgccgatcagggcatcggggtccagcccagactggaaaagcaagatcacggtgcagctcactcgcggcgaactgacggcgttttgcagcgttctctttggtttgcgtagcaaggctgagggttcctatcacggcgacgcgaagaataagagctttgcggtttacaacaacggcaaggccggtgttgcgatcatccttagtgagcgaggaaaccagctccagaatttcatcaatgatgacgaccgaatggagctcgcagtcttcgcagttcgccagctttccaacgcatggaaagttaccccttctgatgccatcgcgctgctacgccaatcagcgtggatggaccgaaatttgtcctaa

SEQ ID NO: 199233 - DNA, 288 bp, Klebsiella oxytoca; identical to SEQ ID NO: 25034

SEQ ID NO: 199234 - DNA, 435 bp, Klebsiella oxytoca
atgttggattttgtttttttggtgtttttggggctgggcatatctatggtgctggtgcgtcggtcttcccgtaaggggatggatcttgaactgacatggctccagtcgttgaaggttgtgctggttcgtggagctgttgcattgggtctggggtttggcattggcaggcttgtattgatggggatgcagtatggtttccttagtgagtctgtcctgagggaacatgcacttgtctccgtagcggtggtgctgatctgtgggcttggttcgttcgttgcgtttcactggatcatcgggaggatctctggaagatcgatcagcgtcgtttctgtgatcaaagctgtggtgtacgagtctggttactttgtgctgtcgatgcttatcttgttagtgatactcgtcctgttcggccttgcatacgagacttttctctaa

SEQ ID NO: 199235 - DNA, 474 bp, Klebsiella oxytoca
gtggcccagcttaaacataaccgcttcgtcatgttggggtccttggtagcgacggtcgtagctgctgcgaatggcttgagttttctcacccttatggctggtggaatgacccttatccagttcatggcttggaagcaacaagatgctgtccgtagccggtttaaagctgcgaaggatgcgtttgaagcgttgaacgttattgcgttcgacaagcactgggtaggttcaaccgcgacggtcgccaaagtgtcgaacatgatcactccgcccgaacgactggataagccctgggcggtgcaagttctggccgtaaccaaaggtgggacgtggttcgcagtggatctgcaagtgaccggcactgacaaggttcagatgcttagcctccaccagcttagtgaaaaggcggcaaagaccatgctggccttcgacctcgaagtgtatgaaaaatttttcggaaaacctgatgttgcatga

SEQ ID NO: 199236 - DNA, 429 bp, Klebsiella oxytoca
atgatcaagattacaactaaattggggtgccttctggcggggctgcttgtcctgtcggcttgctcaagcgtccctcagacaagcaacgaatacacgaaagccctggatgataccaaacaggtatgtgctgcctgtgctctggttggtaatgacctgctggttgccctcaacaagtcatgcgacaaacccataaccccggagactctaaccagcgtcatgaacagtaactcgatgtttgccgccatgatggcaattaactccattggtggaaccgacctttatcaggtttaccgtgatgcggctatcgacaccctgcgatgcaatgagatggacacttggcctgaacggaccaaggtgcgtttccagcagcccgacatgcaaaaggcgctggccttgagggtttctgtcagacagcagaatgcaaattaa

SEQ ID NO: 199237 - DNA, 360 bp, Klebsiella oxytoca
atggagttacaagaagcaaaaaatgctctcgatagccttcacccccacaaggcctcagcccctttgaggcttgtcatccaccagcctggagggattggtggaacccctaccgtaggggtgaaagcaattcatgctgggtttgattgggacagcaacaccatcctgatctacccggaagagcagctcacccggttgacgccggatgaggtcgccgccatcacgaagtcagtatcgaagggacagtcctggcattcatatcagcagttcaagaagtatcgggagcagttggccgaagccacggaggaaattaataggctcagggctgagctgggcaggtatcagaataacgggagggggtaa

SEQ ID NO: 199238 - DNA, 519 bp, Klebsiella oxytoca
atgacgacgaatactcaaaacgcgaacgccaaccaggttcggtctttacgcgacatgcttgtccccgccctgttgttctatgtggtgatgacggccatgtttgtgggtcttgacgcattcatggataaacccaccagcatgaacctgccatttatgccgttccttgtctcgatggtgagttttaccagtgacgcacgtcgagcgtgggactggcggaacgggaccaaggttgtggccgtattgactgcggtagccatgctgttggcattcatctatcaactcgcggtcggagaggtaaatctcttaggggttggtatatacccggccacagccatccttctgttggcaatcacctgggtgattcgcgctatcggaaagacggctcctttccagttcctggggagacacctggcgcggtttggtgcatcgaagtgggtccagcgtaccgccgcagtcattgtgctcgcgggtggccttgccatcactgtctatgcctactggcttaaccacgggagctga

SEQ ID NO: 199239 - DNA, 192 bp, Klebsiella oxytoca
atgcgataccaggtatttaaaacgaaggaagggggcctgccggtgtttactgcaccgtggtactggttggcctctgccattgctcactggtcatctcttaactgggatgcctgtcgaatcgtagacagcaaggcggataaaacaatgctctgctgggccaaggctctaccggctgcaaaaaagatggagtga

SEQ ID NO: 199240 - DNA, 528 bp, Klebsiella oxytoca
atgaggttcggttttgcaaaaaagacggggatttcagcgttcctatcagcaatgctggtgctggctcctcatgtgtgggcagagaccttcactgcaaaggttgtgggggtgtctgatggtgatacggtcaaagtgctaacggaacaaagctgcgataccggaaaagactgccggagtggcaagatccagtaccgagtaaggctcgcggagatcgatactccagagaaaaagcagccatacggctcaaaggcgaagcaggccttatcagatctggtgtttggtcgaatgatcaaagtggagcaaatcgacaaagaccgttatggccgcctggttgccaatctctatgtcgatggcaaatgggtcaatgccgaaatggtccgttctgggagtgcgtgggtgtaccggcagtacgccaaaacaccggagctgttcaagctggagaccgaggccaaagccgataagcgaggtctctgggcattaccggaatcggagagaactcccccttgggagtggcgaagaaagcactaa

SEQ ID NO: 199241 - DNA, 294 bp, Klebsiella oxytoca
atgaggttgtcgtcaactcaaaaggacgttttgttcattctatacgcaattgaggccggtggaaaagccgagcctgtaccaggtgtaaaaatactggagatgatcaactcagctcgccagagcggtattcatggaacgaacttccgaacgtcatgccacacgctggtggagaatggcctgttgaacaagtaccggaatgcttctctaaagctggcctttaggctgaccgacgatggcagggaacgtgcaggagagatataccgcaaacggctggaggaagtgcaagataagtaa

SEQ ID NO: 199242 - DNA, 303 bp, Klebsiella oxytoca; identical to SEQ ID NO: 25011

SEQ ID NO: 199243 - DNA, 351 bp, Klebsiella oxytoca
atgtgggtcatcgagacaactgacacctttgatgagtggttcgatgcactggatgataccgatagagccaacgtgctggcttcgatgatggtgctgcgagatagaggtcccatgctgtcgagaccatacgcggatactgttaacggttcatcctacagcaacatgaaagagctgcgggtccaaagcaaaggagatcctatcagggcattctttgcgttcgatccaaagcgtaaggggattcttctctgcgccggtaacaagaccggggacgagaaaaggttttatgaagtaatgatcccaattgcagaccgcgagtttgcggcgcacttggataaattgaagaaggagtga

SEQ ID NO: 199244 - DNA, 549 bp, Klebsiella oxytoca
atgaacaacctgcccctactgctcgacgcaagagaagccattgactactaccaccagcatccagacatgactgatgcagaaaaggcctatgtggtcgcgttcctaagcggagaggggcgctcaaacagtcagatcagagaggaactggggattgagaaggtatacacggttacacacctgaaacgcgccggtacgctgtcggaggaagagctcacactctggctcagaaatccacgcaagatcaccctgggacatgtgagagccgtggctaagttacctatcagcaagagagaaaagctcctgagggatctcctgcataccaggacaccggttcatacatatgaggcgatagcgaagggcaaagaagtggatagggatgctgacattaagcgtctggaaaccctgatgagcgatgcgacgggtaggcccatcaaaattcgctataaccccgcgaagcgctccggggagctgacgctgggattcttcacgctcgatgacctggatgacgtgtgcaaggctctggggtttgatccaagcgagcagatgtaa

SEQ ID NO: 199245 - DNA, 195 bp, Klebsiella oxytoca; identical to SEQ ID NO: 25008

SEQ ID NO: 199246 - DNA, 372 bp, Klebsiella oxytoca
atgggcaaaaaagtacacatcatttgtggaaagtgcggcagtgacgagatgaactttgtcatcaatggacactgtccagacgatccccagaatgttgccagtatgtcctgctcaaattgttgcgaactgacaggcatagccgagtggtcggaatttaatggacgtgagctgaaaggtgaagccgtcgccctatcaacaccggcaaacgtgaatgctcttctaggattgcttcgccaggcgatggacagcgttgagtatcgcctctatggcgggggcatgtcattgagcggtaatgatgctgccgaactcatagacctccaggagcgagctgagaaggtcttgtctgttcttcggagtgatcagcatgagtga

SEQ ID NO: 199247 - DNA, 471 bp, Klebsiella oxytoca
atgagtgatttatacgaaccgcttgagtttgtgttctgcggctttaggaaaggggacgctgggctctttatctcggtagccactttgcgcgatggtgttttaggccgtgagatgtatttctcaaagggaaaaagcaaaaggcgctgggttgtcggtggcatttactcaggggcctcgttttcggacaacggagcaaaaggtctggatgatgctcattacgttaaagcatgggaagtgcaaggcgacaagatagagtggcaagcaaaaagcgagcaagccgaagccttggcgcgaagcgagaaacttgaagccgacgataggaagcgcaatgaactcgaagagctgatgctacccatcaggaagcaatatggggcattaacaaagcgacgtgatagggcaggggccgcagctcttgaagaagctgtcctgagagcgctgagagcgcccatcaggaaggctgaggagaaataa

SEQ ID NO: 199248 - DNA, 336 bp, Klebsiella oxytoca
atgaaacatgtactgaatatcgcgctgatggctgttgttgttcttggcctggctatgcttgaggcaaccaactggggttacgcagtgctggctatcccggcagtgatttgggccaagccggtgctcaaccttctgcacaaactgccggttctggctgctgctttttggattctggttgctgttttcgcgtggcaagcggcacttgttggtatcctgttctatggcgtacttgcgacccctaaagcgccagcaaacaccaatggcaaaaaaagccgaaaagccaatctgatgggcacttacagctacgactttaaaaccggcgaatgctttagctaa

SEQ ID NO: 199249 - DNA, 489 bp, Klebsiella oxytoca; identical to SEQ ID NO: 25004

SEQ ID NO: 199250 - DNA, 498 bp, Klebsiella oxytoca; identical to SEQ ID NO: 25003

SEQ ID NO: 199251 - DNA, 933 bp, Klebsiella oxytoca
atggaacaagcaattcaaagttacttggctgacgaccggcaatatcaagacaggattaccgcagctctcagccaggttgaagagaaaggtgcagagtacgaagctctttgccaacagcgtgctcagttggggatctggcaaaaaattataacgttctggcagtttcgtcgagacatcgccgttatacgttcagcactaaaaggccataacagcgatttgcggtatttgcgccgtgggagagaccagctcaaagagggattggtttctcgggccgtgaagcaagcgattgacggtagccagattctggaacgaatcacccaagctcaagataggcttgacgccgcatctcgactccacgagagcaacaagcgactggtggacatggggcaaaaagccttacgtgaaatcagtgaggcctcttccagtatttcatcagcacaaacaatggaggttctcgaccttgtgactgacaacaagggcatttccgtcatgtcgtcgatgtcaaactcctcggccagcagtgaaatagacgatgcgaagagagctgtgaaagccttcgcaaatgcgctgggggatcatcgtgacattgtgggctcactgcaccactcaatggcaactgagtttatcgatctgggtatggactttgccggtttgaatgatggtttcgactttgggagcgtcttctcgctgttcagcttgtcgtctgccagttcctctctggacaaagtagagtctcgcgttgaatctctgatgccagatctaagacgagccgcctccaattcggcagcagagtatgcccgtgttaacgaagagttctttggcctaaaacaacaggcctgttgccaagtgcatgagttgctggtgacaaatggtatagacgtgtcagtcaagcgcgttgagtccgccgtgaacagctacagagttggaaggtga

SEQ ID NO: 199252 - DNA, 1185 bp, Klebsiella oxytoca
atggtgatgagaaggacagggcgcgtcccccttcttttgctggttggtctcatggtcgcagctcctgcggcctttgccagtgactttgtgactggcgtaatggtggggcaaatgctctcagatgactcaggcagcaagaaggtagaggacactggcccggagagcaaaacggtcattgattaccatgacggtcagccagttgtgaccaaagtggaggccttcaaaagcaataaatggcgcaaactggatggccctcagggcggctattttgtttgcccaggtgaataccgtagctattcgggaaggctgcgttgtcgcgtccatgatgacgggctcaatggctttatgggcggtatgactgatgctcaggagctaccgctccaagaagctctgaccaagttggaaggtaaacccatctccctgcaaaccattgaagtccacgggaacaacctggcagtcaaataccagttagcaccaccagcacaaacgcacgtcaaaactcaggacctgggggtggttaagcaagatggtgaaatgcagaaggttgccagccaaccaccagcgctatccatagagactgcaccaaagagtgaacctcccaagcagattggtgctgcacaagacaccgaccgcaataccagtgcgtttcaaagtccgttcgaggaggtaagtgactccatgatcggtctaatggatagctctttcgtcaaagtcatagcggggttgatgctggtgtttggggttgctagtggaattatgaggcagagcccatcaggaattgtgatggggataatgcctgcaattatgatcatgaccgcgccaacggttattcgtaccatgttcgatacaggcgcggccagtaccaagccagtggaagatagcggaagctcatttcctttcttcttggtggcaatagtgccggtgctgattttctttgcctatagagcttttatgaacaaccggagcgactccgaaattgatgagttgttaagagaagcccgacgtgctgaaagggctgaacgaccaagcaatgagcctccctcagtggatgaactccgtgagcgccagcaacaaaacccagaaagagaaccggtggttgtcagctcatcagctccggcaccaaaggtgcaaaaggaagagccaatcgaagtacagccaggcaagcgcaaaattattttggattag

SEQ ID NO: 199253 - DNA, 429 bp, Klebsiella oxytoca
atgatgacacgggcggctatggccgcgctgttatccgcgttggtaataggccttgtgtctgatttgtccgcacaagagctggtggtaagccaggtggctatagacaagtccactgaggtggagaaagaagctaccttccacaaccgcaagtgggtgttaaggacggggcaggttagtggattcttcatctgccaaggagataacaaagacatttactaccggcatgacagggtgggcgctcactgccagaagacatcgactgggtggcgcaatgtactgggtctcagggacgatgttccggaagttgagctgagcgtgtacctggggaccgttgaaggtgtccccgtgaaagtccttcatcaggaagtggatggttacgatctgaaagtgcagtacaaggttgcacgtaaagggtcagcaaatgagtga

SEQ ID NO: 199254 - DNA, 564 bp, Klebsiella oxytoca
atgagtgagagtgtgcgtcggtcaacgccgatggtaaagattaaaatcctgccgagtttcgtaggggttcccttcccgtcggtgctacttatcgttgcggggctccttaatggccctttgtggggctttgccgcattcgtctttcatatcgtcatcaagcggtacatctacagagaataccggaggttgccatatccgatgccaaccggctcaaggcctatggatgagttgagcgagctccttgtaaaggggataccggaggaatttttccggcggcttgacgcagcttgcagctctgatgcgtcagtacaaataacctgcccaaagaaataccggctgctcaaaatgtcgttgaatcgctatgccaaccgcgctggttgttacccgcagttccgggagggggatgaaatagcgattgaggtaacagagcagagaccaagaaaagcaggagcagggaagggctttccaagtattcaagttctgaaagcgtcagagggtgttctgagtgaaccggagcagcctatcgaaattcagaaagataagcgcaagattatcttggattga

SEQ ID NO: 199255 - DNA, 570 bp, Klebsiella oxytoca
atgcggtcatttttatacagaatattgcttctttgcttcgtcattatcgtccagatagggctaatcgccattgatgcgagcccgttggttgttgctatgttcctctcgctaacagctttagtcgctggggtctggatggcgtaccttcattcccgatttttgatggcggtgactccagtagttatctctgtgctaatggcgaccctcgccatgaaaatgtttgagccgagactctttgtttctgccagcgaaaaaggctggttccctttgtcattgttcgtctcgataccgttttacttctacttgagttacttgcttgagatagaggagaagagacgtacattccgggccaatgtgattgggtttttgcgtggagtttcggaagagatccgtcgttcaaccagagagcatagagatcaaggtgagataagacacggtggaacagagctggggagtattgacgaactacaaaggggcgaggccaaagagccagaagtcatcagctctacatcggaccagaaagaacaaggcactcccaagcgagacaagagaaaaatcattctggactga

SEQ ID NO: 199256 - DNA, 198 bp, Klebsiella oxytoca
atggggcgctgtactgttgaggatgccatccagttgctggaagggggaaccattgttgcggtcgtaccggcgtcatccggaccagatacgctggtggtttcctctatcaggcttgaatccggactgacagtacagttttcccctccagcggcagccagtgtcagtgttcagctcgcggagctcgatgatgaacagtga

SEQ ID NO: 199257 - DNA, 249 bp, Klebsiella oxytoca
atgaacagtgacaagaaatcgtctgaactagccagactgaggcgtcagcatcagctagtttgctctgtcatcgcagccttgctcatctgtgcaggtatatatgggaccgttgcacgtttgggcttcatcctgatggcgccattgtttgttatcgccttaggtgtgttagtcgatgcgttcctgccaagggtaagttggttcttctgtgtgcgggacgtgagagacatatttgggtggagaaaacgatag

SEQ ID NO: 199258 - DNA, 243 bp, Klebsiella oxytoca
gtggcgaagttgaaggtttatggcgggatcacttatggggccgaggggcagttcagaactgtcgttgcggccacaagtaagagcaaggctgcttcaattctgaatatcacgatttaccagatgaatagctggtggacggagacttttaacaagtacgaggtcgaggcggcgatgtctgagccgggggctattttttcaaagcctctcgatggcagagacccatttgtaaagcaggaaggataa

SEQ ID NO: 199259 - DNA, 363 bp, Klebsiella oxytoca
gtgagaagtgtttttgtatggttgaaggccggggcaatactggctttcctattcttcggtattgctggtgctgtcaaccgggtctattgggttaacagccaaggtttgagccaggggtcgatgtcatccacattggttaaagaaaagtttggcctagaccttggtgcaatgtgccgttatgacaaaccccagcatgtcgagttcaaagtccttcctgatcagacaatccagttccgctgctcatggtttgaaggtggcggattaacctggtggcctttctacaccgagcatgatgtaaagagcgccgaggcgacctctgtgctcaatgacatattccagggtacggaggggcatgatgagtag

SEQ ID NO: 199260 - DNA, 1245 bp, Klebsiella oxytoca
atgagtagccagctagaactctttcatgtccaagaggcgtatgccaaggccgataagccgttatcgaatgaggagctctacgattcggtggcagagctcgctggaatcccgaaaagcgctctgaatgaacaaagtgaaattggcaaggcaaaggtcaagcggagcaagctgaaaagacagatacgctggtatcagcaaaccctcaagtcgatgaaccttctccagaaggtggacggcgagcggggtgtctgggagctctcaagcaaaaccaagaagggcctgcatgaagcgctaggtggcgttcgactggtcgcttattcaacaaatcttgggctggcggtgtggtcaaacaacaagagctttttctctgacctcgatgagccggtgcatctgtgtgtgacatctccgccgttcccgctccgtatacagcgtggctatggaaacgttgatgaagccaaatgggtggatttcattactcaggcactcgaaccgatagtcaagaacctggtgccaggaggaagcgttgtcctgaatgtcagcaatgacatattcgaggccaagagcccctccagatctctctacgttgagcgaatggtgctggcgctccatgatcggcttgggctctctctcatggatagatggccgtggatcaacctgtcaaaaccaccaagtccgacccactgggcttgtgtgaaccgttaccagttgtgtgccgggtgggagcctgtttattggttcaccaacgaccctgacagggtgcgttctgacaacagaagggtcctgatccctcatacagagaaacatcagaagctgatggcccaaggcggtgataacagagtggtcagttatggtgacggggcatatcgactgagagggaacgcattctctaacgtcacggaaggacggataccgaaaaacgttatccagcgcggccaccgttgtgcggatactctggagcttcggagaatcgctagagaactggggttgccaccgcacccggcaatgttcccaacagacatacctgaaatggctatccgctttctgacggaagagggcgaccttgttgttgatccgttcagtgggtcgaataagagcgggttggccgcagaaaggaataaccggcgctggatcgcctgtgacatcattcttgagtacattcgcacccaggcggaaatgttcaccggctttgatggattttggatgaacccggccatagcagcagtgggcgggggagcgttgaattaa

SEQ ID NO: 199261 - DNA, 450 bp, Klebsiella oxytoca
atgaatttaagtattatcgcaagagtcttgcgccaattggcaattatttttgtcctctccgtgcttcttgtggccggatatatctactatgccggtaaacaacatcagcaggcagcaatcaacttttggggtgagcaataccagcctgatgccatctcgacgcaaattgattgggggtttatcggtaattgggttattcctcgcggggggccaattatttctccgggcattgctggagtgtgtcccaatacaccacttcccgttgtgcctcttaaaactggtcctgatggccggggttatgttctctgtggcattggaagtgaggctgtcgctaccagctttgatgtcaatgacatccaggatgaagagatacgaaacacattaaaaacgatgtttgaggaagaatttgaaaaaactgttaagggggataaatggacactcaagaactga

SEQ ID NO: 199262 - DNA, 282 bp, Klebsiella oxytoca; identical to SEQ ID NO: 25132

SEQ ID NO: 199263 - DNA, 675 bp, Klebsiella oxytoca; identical to SEQ ID NO: 25131

SEQ ID NO: 199264 - DNA, 657 bp, Klebsiella oxytoca; identical to SEQ ID NO: 25126

SEQ ID NO: 199265 - DNA, 618 bp, Klebsiella oxytoca; identical to SEQ ID NO: 25125

SEQ ID NO: 199266 - DNA, 300 bp, Klebsiella oxytoca; identical to SEQ ID NO: 25124

SEQ ID NO: 199267 - DNA, 489 bp, Klebsiella oxytoca; identical to SEQ ID NO: 25123

SEQ ID NO: 199268 - DNA, 618 bp, Klebsiella oxytoca; identical to SEQ ID NO: 25121

SEQ ID NO: 199269 - DNA, 2973 bp, Klebsiella oxytoca; identical to SEQ ID NO: 25120

SEQ ID NO: 199270 - DNA, 447 bp, Klebsiella oxytoca; identical to SEQ ID NO: 25116

SEQ ID NO: 199271 - DNA, 378 bp, Klebsiella oxytoca; identical to SEQ ID NO: 25115

SEQ ID NO: 199272 - DNA, 663 bp, Klebsiella oxytoca; identical to SEQ ID NO: 25114

SEQ ID NO: 199273 - DNA, 144 bp, Klebsiella oxytoca; identical to SEQ ID NO: 25113

SEQ ID NO: 199274 - DNA, 366 bp, Klebsiella oxytoca; identical to SEQ ID NO: 25112

SEQ ID NO: 199275 - DNA, 918 bp, Klebsiella oxytoca; identical to SEQ ID NO: 25109

SEQ ID NO: 199276 - DNA, 672 bp, Klebsiella oxytoca; identical to SEQ ID NO: 25065

SEQ ID NO: 199277 - DNA, 1008 bp, Klebsiella oxytoca; identical to SEQ ID NO: 25066

SEQ ID NO: 199278 - DNA, 2796 bp, Klebsiella oxytoca; identical to SEQ ID NO: 25067

SEQ ID NO: 199279 - DNA, 528 bp, Klebsiella oxytoca; identical to SEQ ID NO: 25074

SEQ ID NO: 199280 - DNA, 1032 bp, Klebsiella oxytoca; identical to SEQ ID NO: 83983

SEQ ID NO: 199281 - DNA, 1278 bp, Klebsiella oxytoca; identical to SEQ ID NO: 25077

SEQ ID NO: 199282 - DNA, 336 bp, Klebsiella oxytoca; identical to SEQ ID NO: 25079

SEQ ID NO: 199283 - DNA, 540 bp, Klebsiella oxytoca; identical to SEQ ID NO: 25080

SEQ ID NO: 199284 - DNA, 390 bp, Klebsiella oxytoca
atgtctatcaataccaaagttgaacaaatcgcatacggtcatgctaccgctctagtgctcagtgaactgggccaacaagagaattggtgcaaggcttatgagtatttgtctgagtgtgtagaacggggagacgaacctgaggatctggtcgtttggcaaccgtttgagcactgggaatggaaagacattctggagcagatcgagagcgaagccgagtctctgctttcgactattaagtcggttttaggcttggcccacaaaggcatcattcagtcagcaattgactgctctctggattcggacatgacccagcttgacctgattggaatggtcgagctcggaagtgaaatcgaagatggggagtgtgctggatgggcttttatggcatag

SEQ ID NO: 199285 - DNA, 387 bp, Klebsiella oxytoca; identical to SEQ ID NO: 25094

SEQ ID NO: 199286 - DNA, 204 bp, Klebsiella oxytoca; identical to SEQ ID NO: 25096

SEQ ID NO: 199287 - DNA, 270 bp, Klebsiella oxytoca; identical to SEQ ID NO: 25098

SEQ ID NO: 199288 - DNA, 219 bp, Klebsiella oxytoca; identical to SEQ ID NO: 25099

SEQ ID NO: 199289 - DNA, 558 bp, Klebsiella oxytoca; identical to SEQ ID NO: 25100

SEQ ID NO: 199290 - DNA, 852 bp, Klebsiella oxytoca; identical to SEQ ID NO: 25101

SEQ ID NO: 199291 - DNA, 393 bp, Klebsiella oxytoca; identical to SEQ ID NO: 183846

SEQ ID NO: 199292 - DNA, 717 bp, Klebsiella oxytoca
atggttgtcaaactcgtggattcattagttatccgggagattcaggaacctgaggtagttaattggcaggaaaacgctgttattgagaatcacagaattccttttggcgttattttgtcatcaatggcgattgcagaggataataacataactccacattcgatgtattcgcatgacagtatctggaatcatcctgatcagttggttgtttcccgcacgaatgcaggtctcttctctatcatctcaaatttagtatctcttgctgaaagcaaaattgtcattattgatccttacggttggacagcggagtcagtgagttttatccgatttatgcttcaatccatccctcgcaatcgagttagtggtaattttccagcaataattcttttttacaaggaaaaacggggtagcgagaatggcggtagaggaagtccttctgctgatcacgtcaggaatcagattctagagggattaacaggtgatttgtcgaatctacaggttcaggtttatgagctcagggagagaggcgatgctgatgtttttcataaccgctgcatcttgaccgagcatggggggatcattactggtcatggtttcggagtatctggttcacaagagcatacagatgatgcagtattaatgagattaactatgtatcagaaaaagtgggatcaatttgtagagcgaaatggttacgaggtagtttctgaggcctaa

SEQ ID NO: 199293 - DNA, 144 bp, Klebsiella oxytoca
atgttggacattctgccatccggctgcaagacccggaagatatccgagttttaccgccatcctggtttgacgctatccgcggttgggatttgtccctataatcccgacaacttgtattcagaaaaagatatcgcactggattaa

SEQ ID NO: 199294 - DNA, 1992 bp, Klebsiella oxytoca
gtgactcggattcggacagcgattcggactccgatagtgactccgactctgacagcgattcggactccgacagtgattcggatagtgacagtgattcggattccgacagcgactccgactccgacagcgactcggattccgacagcgattccgactctgacagtgactcggattcggactccgacagcgactcggattctgacagcgattcggattccgacagcgatgccgattccgacagcgattcggactcggacagcgactcggactctgactctgacagtgattcggactccgacagtgattccgactccgacagtgactccgactctgacagcgattcggactccgactctgacagcgactcggattcggacagcgattcagattccgacagcgattcagattccgacagcgattcggattcggacagcgactcggactccgacagtgattccgactctgacagcgactcggactccgacagtgattcggactctgacagcgatgccgattctgacagtgattcggattctgacagcgactcggactccgacagcgatgccgactctgacagcgattcggattctgacagcgattcggattctgacagtgactccgattcagacagcgattcggactccgatagtgactccgactctgacagcgactcggactccgacagcgattccgactccgacagtgattcggatagtgacagcgattctgactccgacagcgactcggactctgacagcgattcggactcggacagcgattccgattcggacagtgattctgattcggacagcgactccgactctgacagcgactcagattccgacagcgattccgactctgacagtgattccgactctgacagtgactcggattctgacagtgactcggattctgacagcgactccgattccgacagcgattccgactccgatagtgactccgactcggacagcgattcggattcggacagcgactcggactccgacagcgattcggattcggacagcgattcggactctgacagcgatgctgactctgacagcgattccgattctgacagcgactcggactctgacagcgatgccgattccgacagtgattcggattcggacagcgactcggactccgacagcgattcggactctgacagtgattccgactctgacagcgactcggactctgacagtgattcggattcggacagtgactccgattccgacagcgattctgactccgacagtgattcggactccgacagcgattccgactctgacagtgattcggactctgacagtgattccgattcggacagcgactcggactccgacagtgactcggattccgacagcgattccgactctgacagtgattcggattcggacagcgattcggactctgacagcgatgccgattccgacagtgattcggattctgacagcgattcggattctgacagcgactcggattctgacagtgactccgattccgacagcgatgccgattccgatagcgattcggactctgacagcgactcggactctgacagtgattcggatagtgacagcgactccgattccgacagcgactcggattcagacagcgattcggattccgacagcgatgccgattcagacagcgattcggactctgacagcgactcggactctgacagtgattcggatagtgacagcgattctgactctgacagcgattcggattccgacagcgatgccgattcagacagcgattcggactccgacagcgattcggactctgacagcgactcggactctgacagcgattcggattcagacagcgactcggattctgacagcgactccgactctgacagtgactccgattcagacagcgattcggactctgacagtgattcggattcagacagcgatgccgactctgatagcgactcggatatcccgcaggccaatgcggataccaataccgcgctga

SEQ ID NO: 199295 - DNA, 513 bp, Klebsiella oxytoca
atgaaaatgacaataatatatgcactactatccgtattttttggagtatatggaacaacggccagtgccagtaacacaaatcaagtatcacaaaatttagaaactgcgattccccaacaaaagcaaatagttatcggcaattgggacgagttcaactcaagaaaaattgacagactcattcaagaagcaaagcagaagcctgcgcattctttatatgctgtttttgattttgacaacacaacagcttttctggatatcgaagaggcaacgcttatctatcaactagaaaaccttaaattttcgatgaaacctgagatattgaaagagataatttacaaagatataccgccttcaaactttaactcggattataataataaaaatcatcaaccggttaatataaacctcattggtcaagacattattgatagctacacatggctatacaataattacagcggatttgcgggtaataaaacgcttgatgaaattaaaaaaattctaattatatga

SEQ ID NO: 199296 - DNA, 288 bp, Klebsiella oxytoca
gtgagttataactttgccgatcttaatctaccgcagttaaccctgggcggtgccggaacctacggctggcacgtggttagcgatgtcagtaaaaccggttcggcgagaaagtacgacgggagcatggtgtcgttcgatctttccgctcgctatcaggtggcggacggcatggcgaaaggcctctcctttaccctgctcccggcgctcttccgggcgacagacagcaactataaaaccgatcgtaacgacgtgaagtttatcgtcggctacagcatcaatatcttctga

SEQ ID NO: 199297 - DNA, 2373 bp, Klebsiella oxytoca
atggcaactggcaacgcgccgcgaggattcccccgggtcctgcagtggcttctcgccgggctgatgctgatcatcggcctggctatcggtattcttggtgcaaagctcgcctccgttggcgggaccttctattttgcgattatgggcctggtgatggttatcgccgcggtgctcattttccgcagccgtcgcggcggtatcatactgtacgcgatagcgtttatcgcctcgatcgtctgggccattagcgatgccggctggacctactggccgctgttctcgcgcctgttcgcgctcggcgtactggccttccttgccgcgctggtctggccgtttctgtcccggcagccggcgaaaaaagggccgtcgtttggcctggcagcggtgctggcggtggtactgttggtcagtttcggctggatgtttaaatcccagccgctggtcagcgccagcgaggcggtgccggttaaaccggtcgccgcgggcgagcagcagaaaaactgggcgcactggggcaacaccacccacggcgaccgtttcgccgccctcgaccagattaacaaacagaacgttgaccagctgcaggttgcctgggtcgcccacaccggggatatcccgcagagcaacggctccggcgcggaagaccagaatacgccgctgcagattggcgatacgctttacgtctgtacgccctacagcaaggtgctggcgctggatgtcgatagcggtaaagagaaatggcgctatgattcaaaagctaccgcgccgaactggcagcgctgccgcggcttaggctattacgaagagagccaggcccaggtttcccctgccgccgacgcgcagccggccgcctgctcccgccgcctgttcctgccaaccaccgacgctcgtctgatcgctattgatgccgataacggtaaactgtgcgacgccttcggcgaccacggtattgtggacctgagcgttggcatgggggaaatcaaagcgggttactaccagcagacctccacgccgctggtggcgggtaacgtggtcgtggttggcggtcgcgtggcggataacttctccaccggcgagcccccgggcgtcgttcgcgcctatgatgttcataccggcaaactggcgtgggcatgggatccgggcaacccgaacctgaccggcgaaccgccggtaggacagacctacacccgcggtacgccgaacgtctggtcggccatgtcctatgacgcgaagctgaatctgatttatctgccgaccggtaacgcgacgccggacttctttggcggcgaacgtaccgcgctggacgataaatacagttcctccatcgtggccgttgacgccacgaccggccaggtacgctggcattatcagaccacccatcacgatctctgggatttcgacctgccttcccagccgctgctgtacgatctgcctgacggtaaaggcggcaccacgccggtgctggtgcaaaccagcaagcagggcatgatctttatgctgaaccgcgccaccggtgaaccggtcgccaaggttgaggaacgtccagtcccggcgggcaacgtcaagggcgagcgctactcgccgacccagccctactccgtcggcatgccaatgatcggcaacgagacgctgaccgagtcggatatgtggggcgcgacgcctgtcgacctgctgctgtgccgcatccagtttaaagagatgcgtcaccagggcgtcttcaccccgccgggcgaggatcgttcgctgcagtatcccggctcgctgggcgggatgaactggggcagcgtgtcggttgacccgaataacagcctgatgttcgtcaacgatatgcgccttggcctcgccaactatatggtgccgcgcgccaaagtggcgaaggacgccagcggtatcgaaatggggattgtgccgatggagggcacgccgttcggcgccatgcgcgaacgcttcctgtctccgctgggcattccgtgccagaaaccaccgttcggcactatgtcagcggtcgatctgaaaaccggcaaactggtgtggcaggttccggtgggcaccgttgaggacaccggcccgctggggatccgcatgcacatgccaatccctatcggtatgccgacactgggcgcctcgttatcaacccagtccggcctgctgttcttcgcgggcacccaggacttctacctgcgcgcgtttgataccgccaacgggaaagagatctggaaatcgcgtctgccggtcggcagtcagtccggcccgatgacctacgtatcgccgaaaaccggcaaacagtacatcatcatcaacgcgggcggcgctcgccagtcgccggaccgcggcgattatattatcgcctacgcgcttccgcagcagaagtaa

SEQ ID NO: 199298 - DNA, 678 bp, Klebsiella oxytoca
atgaaaaaaacgctgattgccgccgcgctggtactctttaccggctccgcgctggctgaacagaatgcggtattgcaggttcaggggaagctaaccgcggcttcctgtacgccggaattaagcaacgggggcgtcattgattatggctatattcacctcagcacactttctcctacagaagttaacccgctgggctttaaagatattgaattaactatcaattgcacagcaccgaccaaagtggcctggacgtcagcggataatgaaactgacagtcagccctccccgcctataaacgtcatcacgacttcaggttcaatggcatctcccccaacctatcaggcctatggggtgggtaaaactgaggatggcgtggctattggtaactacgcttttttcacggatcagagcccaacttacgatggtaacgtcggcagtattatttatcataatcctgactggggctctgcgcgttggagtgcgggtcccccctcgctaagaaacgatggatactcattgatatccgttgcatctccagacactttagaacctatcgcctttagtcgcgcggtttttaaactgtccgcgacactgtcgataaaagacacgacctcgttaaatattaaggacgataccgagctgaaagggcaggcaaccttcacattgcgttatttataa

SEQ ID NO: 199299 - DNA, 555 bp, Klebsiella oxytoca
ttgaataacccggacaaaatcgttatcaagaacgttgacatgtatcagtccacccttggtgatgtgggtggtaatctgatgaataacactggttattcctctggtaccgtcgatcttattgacaataacaccttcagtagaatgccgactgtaacaattaccaacgtaaattattacggctgcaagttttatcctgaatgctacatagctgggacgggggaatattccgccgccgccggtgtcaatattgcggtgtcattatccgtgcgcaggccacataatagcacggtcaccgatgcagcttcagcccgccagataacattttctatatcttcgcagcccgatggctccgaccagtcaacagttacatccgcggtaaaaagtctggctaacgctgtcgaaatactgaataacgccaccacacgcgggaagattatcgccgtgcctgatctgggggttatttcatataatttccgcttggatgccccaggtacgcgttacatcttggttgaatgcggaggattcaggaaggttttaacactaacgtggacatag

SEQ ID NO: 199300 - DNA, 630 bp, Klebsiella oxytoca
atggacattagccagtttcagaaagccgctggtgtcagccttgcgctggcaacccgctggcattcgcacatcacttccgcaatgaaagaatttggtattaacaaccccgacgatcaggcgatgttcatcgcgcaagccgggcacgaaagcgcggggttcagcagcctggtggaaaacttcaactacagcgtttctggcctggcgggttttgtgcgtgccgggcggctgactcaggaccaggcaaatacactcggccgccggcagggtgagccatcattgccactggcgcggcagcgtgcaatcgccaatctggtttacagcaaacgcatgggtaataacggaccgggtgacggctataacttccgtggtcggggcctcattcagattactggcctgacaaattaccgcaactgcggaaacgggctgaaggttgatctggtgtcgcagcctgaactacttgcgcaggacgagtatgcggcgcgcagcgctgcctggttctacgtcacgaacggatgcctgaaaaacaccggtgatatcgctaaggtgacgcgcattattaatggcgggtcaaacggcattgatgaccgccaggcccggtacctgactgcgaagaaggcgttggcatcatga

SEQ ID NO: 199301 - DNA, 585 bp, Klebsiella oxytoca
atgatctcggcattcgtgaaagcatactggaaacagttgcttattatcgtgatgcttgctgccctggtagccggctgccgtatcgcctgggtgatgcacggcgaaacgcaatacgccgctggaaagggcgcggaaaatcagaaatgggagcttaagtgggccgagcgcgataaagccgatgcgctggcgaaggcattacggaacgatgttgagcgagagaaagaacggagccggcaggcggccgcagatgaggaagaaaccaatggtgaaaaagctctggcaaaagctaaggctgatgccgataatgctcagcgtgctgctgacggcctgcagcggcagctcgcagatctccagcatcaactcgggcgaagtgaaaccggcaggatttccgcaactgccgccctcggccaggcaaggggagagaccgccgtactgctcgcccagttgctcagcaaatctgaccgtgcagcgggagagtatgcagcagcagctgacagagcttatgagtcaggaaaaacatgcgagcgcacctacgacgcggtgactgctgagcatggtatttcacatggtactgtttaccggtga

SEQ ID NO: 199302 - DNA, 270 bp, Klebsiella oxytoca
atggcattatttttttattcaattaacgcaaagaataaagtttattcccactcaattatttacggaagacgtaaccaattgactgataacaactttaaccaccaacttatttcacataccgttttatataccgtcaccggtaaacagtaccatgtgaaataccatgctcagcagtcaccgcgtcgtaggtgcgctcgcatgtttttcctgactcataagctctgtcagctgctgctgcatactctcccgctgcacggtcagatttgctga

SEQ ID NO: 199303 - DNA, 255 bp, Klebsiella oxytoca
ttgcagcgcgtgtgccagagcgccggattctcgccgatgattatccgtgaagtgatggagccgcaaacggttctggcgatggtcagtatggggataggtattacgctcatcgctgatagctatgcgcaaatgacgtggccgggggtggtgtttcgtccgctggaagaacgcataccggcagatttgtatatcgtctatgaccaacagcaggcgacgcccgcgctggagaagctgattgcggcgctggtgaattga

SEQ ID NO: 199304 - DNA, 1077 bp, Klebsiella oxytoca
atgatcaaatttatggtgtatccattagcgctgctggccctgagttttggcgccaatgccaaggagtgtcaccttagcgaaggtgaggctggtacgctggcgttgagcggcggatctaccgcctctccggtcatgttcgagttcgcgctgggaaaccagggaagtacaaaaccagaactggcaaccttcggcgttagccccagttacgaactctggagcgaatgtgatgcgggaaacgatgggtttgatttttacgccaaaaccaacccaagcgccacgccgaccaccgagaatggccgggcgctattccccactaatatcgagggtatttactatgccgtgaaaatatacaccgaagccggcggcggcggatattttccaggggctaacggcagcagctgggtttgggtcagtagcggtacccagtcgtactgggataataagcgcataaagattaatgtcaccttatatcaagcggtcccgtttaacggtaacctcaaccgtgaagtcgtcattcgaccgaaagactcaaggacgctggggcaaatccgcgttggctcagcggattcggatgacaataacccctggacaattaacgtcaccgccgacagctttagcgtaccgttagcactggcaacatgttcttccgccatggtcaataacggtagcaataacgtggagttcggcgacatcatgttctcatctctccgggagggttactggccgaacgccccgtttacgctaaggttaagcgggtgtagtaacaccgtctgggtacggatgaagctaacatcccctaaaacggcgttaaacgccgccggcaccttgacgctaatgaccaatacgctcaccggcagcgatgcggcagccggcgtaggagtagagttagcatcgaactttaccaccgcggatagcgtcaggctgcagcccggtacagaaatatggtcgccgccaacaaacataggcagcgcgcagtcctatgactatagctttgatgcctggctttcccgcacatccggtgagctaaagccgggaaaatttaaagcgataggcacgtttaccatcgattatttctaa

SEQ ID NO: 199305 - DNA, 627 bp, Klebsiella oxytoca
atgccattctatatccgtcttatcaacccaattgggaaggcattgttggtagtgggggcagttggcgggctgggcatggcttcttggtttgctaatgccgcggatgacaataaagaggggctggacatcaccctcaccgccaatatagtggaaaatacctgtcagatttccatctctggcaatgggaccgttcatctacccacagtttcccgccgttggttttatcacgatgacggcacctcgcgcttgcagcccggcgacccggccagcggcacgctctttagcgtgaacgttgaaagctgctcaggcgatgccgcaacggccagtaccctcacctttggctttcagccgcaaaacggggtctggccggcggaaagtcagcaggtatttatcaatgaaacgtctgccgccgcaggcggggcggagaacgttgggatcgttattttttctacccgcgataaccgtaatgttgtgaatagcgacggtagctccgccgtggtgattgatgtgtcaaaaatggattactacctggccagctacgatttttatgcccgctatcaaaatacgggcgccgttaccccaggtaaagtcaacagtcatgtcctggtagacgctatttaccagtga

SEQ ID NO: 199306 - DNA, 558 bp, Klebsiella oxytoca
atgaaaacaatctcttttctgggcggtgttgtcggcacgttgcttttttccgcgccctcttttgccgagatagccggaaccactagcgtttccgccacttttacctccacaattgaagccggcacctgcacggcgcagatccagaacgccagcggtcagccgatgagtacgctgaatttcggcgatgtatttaaatccgatctggtcaatcaaagccgcagcgaaccgttcaaggtggcctttagcgactgttctggggtgaagtccgcccaatatcaagtcattccaggcagcggcggcggctgctcgggccccaactctaacggcgactcttttgccgcaggcaactcaacgggttttgaagtctggcaaggggagtccgcaacaggaacgttacttagctgctacaacaagccctcgcaaacgctcagcatcagcgggagcacgctcagcgttgattttgcttcccgcattgttatcgctaaagatagaaaaatttctgacgttaccgccggtagcgccagcgcccccgtaacattcgtgattatttatcagtaa

SEQ ID NO: 199307 - DNA, 582 bp, Klebsiella oxytoca
atgaagataaacagtttcagaaaacgctatctactgggctgtagcggcattttactcgctaccgcgctaccgggtcaggccacatcgctggacgtcacctttaccgctaacctgcgcgaaacgacctgcgatatggccattgaaggcggcagcgggaatggcaaaaacaatatcattcctgttggcgcgaatggcgctgttagcctggataaaattatcagcggcgacagcgcagcgcaggcaacctttaagctgaaaatcacggaatgcccgagcagcctgcagtcgcttaaaaccaccgtcagcggaacaaaatcagggtacaaagatacggtgatcattaatggcgcgacaacggcggatgccgctgactaccttggaatctcaatcgccagagcgtctgccaccgatgctcctttcgtgattaatgcgagttccgacgcaggtcgactgctctggagcagccaggagattaacaacaaagaagttcctctggtcgcgacgctggttgaaacacaaacggggcaaggcacgacgggtacctttagcgcgctggccactttcaacttcacctatgaataa

SEQ ID NO: 199308 - DNA, 1482 bp, Klebsiella oxytoca
  misc_feature (1411)..(1412): n is a, c, g, or t
ttgagccaggaatacactgaagacaaagaagtcaaattcacaaagctgagtagcggacgccggctccttgaggcgttactcattctttgctccctttttgccatctggttgatggcggccttactcagctttaatccctcggatcctagctggtcgcaaacggcgtggcatgagcctattcacaacataggcgggacgccgggagcctggcttgccgatacgctattttttatttttggcgtaatggcctataccattccggtcatcattatcggcggctgctggtttgcctggcgtcatcaagaaaacgacgagtacatcgactatttcgccgtctcgctgcgtttaattggcgcgctggcgctgatcctcacttcctgcggtctggcggcaatcaacgctgatgatatctggtatttcgcctccggcggcgtgatcggcagtctgttgagcaccaccctgcaaccgctgctgcacagcagcggcggcacaatcgcgctgctctgcatctgggcggcaggactgacgctatttaccggctggtcctgggttagcattgctgaaaaactcggcggtgcgattctttctattctcacgtttgccagcaaccgtacccgtcgtgacgatacctgggttgatgaaggggaatatgaagatgatgaagaagaatatgaagatgatgaacccgcgaagcagcagggttctcgacgcgcgcgaattttacgcagcgccttagctcgccgccagcgtctggctgagaagttctctaatccgatgggacgtaagaccgatgcggcgctgttctcgggtaaacggatggatgacgccgaagacgaggtccagtacagcgccggcggtgcgcctgttgccgctgacgatgtccttttttctggctccagcgcagcgcgtccggcaaatgctgatgatgttctgttctccggcgtcagtgcggcacgtcccggcgattttgacccctacgatcctctgttgaacggtcatagcattgccgatccggtggctttggccgcgcaggataccgctgcgccgcaggcatggtctgaaccgctgccagggtatgaggctcagccggtctatcatccggaacaggcaccggtacaacagccagcatatcagccagaaccggcttaccagccgcagcacgggtatcagctggaacaggcgccggtacagcagccagcatatcagccagcaccggcttaccagccgcagcatgcgtaccagccggaacaggccccggtacagcagccagcgtatcagcctgaatcggcttaccagccgcagcatgcttaccagccggaacaggccccggtacagcagccagcatatcagccggaaccggcttaccagccgcagcatgcgtaccagccggaacaggccccggtacagcagnncggcttaccagccgcagcatgcgtaccagccggaacaggccccggtacagcagccagcgtatcagcctga

SEQ ID NO: 199309 - DNA, 1215 bp, Klebsiella oxytoca
atgaaaaccaaaacctccgatgctttactggctgctgaggtgagccggcgtggtttaatgaaaaccacggcgattggcgggctggcgatggccagcagcgcttttaccttacccttcacgcgcattgcccaagccgcagacaacctcaaccccgccagcgaaacggtcacctggagcgcctgtacggtgaactgcggcagccgctgcccgctgcggatgcatgtggtgggtggtgagataaaatatgttgaaacggacaataccggcgacgatagctacgacggtctgcatcaggttcgcgcctgtctgcgcggccgctcgatgcgtcgacgcgtctacaacccggaccgcctgaaatatccgatgaagcgcgtgggcaaacgcggcgagggcaaattcgagaaaatcagctgggaagaagcgttcgatactatcgccagcaatatgcagcgcctgataaaagagtacggtaatgagtccatctatctgaactacggaacgggaaccctcggcggaaccttgactcgctcatggccaccggggaaaaccctgattgcccgcctgatgaactgctgcggcggctatctcaaccattatggcgactactccaccgcgcaaattgccgcgggtctgaactacacctacggcggctgggccgatggcaatagcccgtcggatatcgaaaacagcaagctggtggtgctgtttggcaacaaccccggggaaacccgcatgagcggcggcggggtgacctactacctggaacaggcgcgggagaaatccaacgccaggctgattattatcgatccacgctataccgataccggcgccggacgcgaagacgagtggatccctatccgcccgggaaccgatgccgcgctggtctccgcgctggcgtgggtgatgattaacgagaacctcgttgaccagcctttcctcgacaagtactgcgtaggctatgacgagaaaacgctgccggaaggggcgccggccaatggtcactataaggcctatattctcggtcagggcaaagacggtatcgcgaagacccctgagtgggcgtcgacgattaccggcattccccaggcgcgtatcgtgcagctggcgcgcgaaatcgccagcgctaaacctgcctatatttctcagggctggggcccacagcgccatgccaacggtgagctggtctcccgcgcgatttccatgctgcaatcttaa

SEQ ID NO: 199310 - DNA, 279 bp, Klebsiella oxytoca
atgagcggtaaacgttatcccgaagagtttaaaattgaagcagtcaaacaggttattgatcgcggtcattctgtttccagcgttgcaacacgtctcgatatcaccacccacagcctttacgcctggataaagaagtacggtccggactcatccactaataaagaacagtcagatgctcaggccgagatccgccgactccagaaggagttgaagcgggttactgatgaacgggacatattaaaaaaagccgcggcgtacttcgcaaagctgtccgactga

SEQ ID NO: 199311 - DNA, 267 bp, Klebsiella oxytoca
atgaccagcaaattaaccaaaaaagaaaaagcgtggtttgccgaagttaacgcggtgctggcgagatgcccgtcgccggagaaattcggtttctacactatcggagattctaacgtgatggtgtacgacaggcgcaaagagaaagagatcgagcaaaagcttgactcccggtcatcctccgattggtgcattgctgttcgcgatgccaatgcggagatctgcgaagatatctactttccatccgcagtactaagcacggcaggataa

SEQ ID NO: 199312 - DNA, 522 bp, Klebsiella oxytoca
atgaaaaaactaatacctttattgctaattttgccctttattgcctttgcctcctcagatttagttgaggattcaggatatatcgtcccaatatcaggcccaggaataccagttactaatccatataccgactataaggtcattaatagtatcgacaatggtaaaaaaattgaaatccatgtagctgtattacatttacgaacctataaagaaaacgcagattttagtgaatccaatactcactatgtggaaggaagcaaaaccttatctagttacgacactaatgtttacacagccgattttataaaattctcctcagaagctgctctaaactcaacaaaagaagacttaaaaaaattatattgtacgcctgacggtttttacccggtttcatctcaagagcggctattctacgaaacccgaaaagaaaataaaaaaataatgctcaattactacagtgattcaggaaaaaccctcatgtttgggtttggggtttctccagaatcatgtaaatcgaaatag

SEQ ID NO: 199313 - DNA, 165 bp, Klebsiella oxytoca
gtgagcgataagaaacaatctttgaccatggagcaacaggaattcattttccgaacaaaagcggaattgttggccgagcttattaaattccagatccccggtaaatccgaagcggaagaactggccgaagtggtcaatgccgcattcgacaaactaacagcttaa

SEQ ID NO: 199314 - DNA, 879 bp, Klebsiella oxytoca
atggaagaaaattcgattgacgttttcaatgatatgtattgttctttcaacagtttcgaaatgcaatcatgcatgaaagctgtcgacagtatcttagggttttatttggccgataataatccctatgcagagccatttatttattttcacagctatataacatctccccagcctgaatttattaataatctaagaagtaatcctaaggggggtaaatgggcagactcgatgattaatggtattttgcttgatgtccaaaatacattttgctgcgttttgtatcactatgaaaatttggtggcattagaaagtaatgttacccaagcaatacttaaaacaaattataaatcagttattgggaattctactgttggtcttggaaatacactaaaatgggactttgagtatcagtctttcgttctcgcattgagaaggtgtttagattatcttgcgaaatcagtttcggcttattttaaaaatgacttccattcatttcgacgcctcggtagtttccttgaaaaacagaaagataaccccgtcagttcaaacttaaaagtgatgcatgaaaaatacagttatcttctttcgttcgtactgtcagatggagaaagaaaatctgtcagagataggatttctcactacggctatgtttctgccggaacaatgaatttgacatcgaatggtatctcattatttggaggtggggaggaaattggttttgaacaggatggtgttctgctttcgattataataaggaaacacttggataatttttttgattgtataagtgattttgtccatggctttatagatggaatgaaagcgcatcagtgtattatatctgatatggacgttaatgaaaataaaaatggaatctag

SEQ ID NO: 199315 - DNA, 456 bp, Klebsiella oxytoca
atgagaaaaaaaacactcgacgcggatgaatcagaaaccgctcaacgtctccgggacatctggaacgaaaaaaaagtaactttacgccttacacaagaaaaggcggcggatgcacttggcttcagtacacaggctactgtcagccactatctgaacggtaatattccgctaaacaccgacgccgctctaaagttcgcagctttgctgggagtaaaacctgaggacctacgtcccgatctggccgaactgatgaactatgttcgaaaatcgggtacacacgttgatgattattcgtcagcagggtggcgtctgttgaagccagaagaagccgaactcatcgagctgtatgaaagacttcctcaaagtgaaaaagaaaggcatctatctgaattaaaagataaagtagttggttttgaccgtttatttgaagagttactcgcagcaagaaagcaataa

SEQ ID NO: 199316 - DNA, 591 bp, Klebsiella oxytoca
gtggaggcgcgcgacgcgggcctgcgcccgtcgcgctggatacgcgccactccctacgagatcctgcgcttcatcgggcgcggcacgtctctcaacgactacctgcgcctgaaagccgcgctcgaccggctgcaatcgaccacggtggccacgtccatccgcgaaaccacgggaaggcgattgcatcgcttctcgtggatcaacgagtggaaggaactggccgatgccagcggcgtgccgctgggcatcgaactgatcctgccggactggttctatgcgggcgtgctcgatgccgccttggtgctgaccatcgacccagcctatttccgcttgaagggcgggatcgagcgctggctgtaccgcctggtgcgcaagcacggcggcaagcagccgggcggctggcaattcgacttccggcacctgcaccgcaagtcgggcagcgctgcgcgcttctccgacttcgcttacgacctgcgcgtcctggtggcgcggcagtcgctgcccggctacgtcctgggcatcgagcgaatgccggacgacggacaagaactgctgaccttccggcccgtgctgcacacggcacggggataa

SEQ ID NO: 199317 - DNA, 639 bp, Klebsiella oxytoca
atgatcctcgctctgctcaaccagaaaggcggtgtcggcaagaccacgctcgccacgcacatcgcgggcgaactggcgatgcgcggccagcatgtcgtcctgctcgatgccgacccgcagggttcatccctggactggacgcagcgcagaagccagcaaggcttgccacggctgttcagcgccgtgggcctcgcacgcgaaacgctgcatcaggaagcgccagaactcgccaggcgggccgatcacgtcatcatcgacgggccgccgcgcatcgccgccttggcgcgctccgcgctgctggcggccgagcgcgtgctgatcccggtgcagcccagcccctacgacctatgggcttctgccgagatggtcgcactgatccgcgaggcgcaggtgttccggccgctgctccgcgcggccttcgtcatcaaccggcgcgtcagcaccaccatcatcgggcgcgaggcgcggcaatcgctcgccgaacagccgctgcccgcgctgcgctcggaggtgcatcagcgcatcgtcttcgccgacagcgtggccgctggccggctcgcacgcgagacagcgcccgacagtgccgccgcccgcgaaatcaccgccctggtggacgaactgctgcggtggccgacatga

SEQ ID NO: 199318 - DNA, 276 bp, Klebsiella oxytoca
atgacagcgcagcagccacccaacagcaaacgcacgggcaagcgcgtcggcatcggcgcacgtccgcccgcgaatccgcacgccgaggcgtggattcgtcagggcgacgcagatgccgtgcagaaaggcgacctctacacggcccgcctcacgctcgacatcacgcccgccatgcgggcgcgcatcaaggtgtcggccttcacgcaaggcgtgaccgtggccgacctgctgcgcggcctgctggagcgggagtttccgccggagaacacaccatga

SEQ ID NO: 199319 - DNA, 546 bp, Klebsiella oxytoca
atgaacgcattcgcttggcctgccgcgaacgcggcaccggctgcgccgctgcctgcgctttcggcactcgccggacaggccggcaatgtgccgctgacgcgcgtttcgctggcctacctcgaacatcgcttcaagctctacctgcgcttcggcgaaccggcgcgcacgcttcagctcgaccgctggcggcgctgcgcggtgttcctgccgggcgcgatgctctgccgcatccgctggcaggccaacgactacggcacgatccgctggcaactcatggtgatgcaggcttgcacaccgctggacgcggcgcagcgcatccccggtgttcagccgggcgcgcgcttgctcctacacaccgaaggcgatgccaacgtgcgcgccgtgctggagcgcatcgacggcatcgaggcgctgggcatcgctgccatcgacgtgtcgccggcgtactggcgcacgctgggcaaccgtcttgcggctcgccttgcgctgcccgaatacaccaccgagcggcataccgcctggctggccgggaaggtgctgccatga

SEQ ID NO: 199320 - DNA, 600 bp, Klebsiella oxytoca
atgaccgccccgaccaccacacccaacgcgcccgacgtggcgccgcgtcctcgctcacgcctgcgcgctcgcatcgtgctggcgacactggccgccatcggcttcgctgcgctggcctgggcggctttcgtgtcgccgctgccgcgtctgacctacaacccgtccgacagcgtggcggtcggctggtatcgcattgacccgttcgacccgcgcaccgcctcgctgccacgtccgttgtccgtggacagcatcgtgctggtgccgcttccggccacggctgccgcgctcgctgcgcagcgcggctacctgccgacgcgcgttccgctgctcaaacgtgtgggcgcggtcgcgccgcaacacgtctgcatcgtcgccggtcaggtacgcatcgacggcgtgccttcggccgccgtactgcccgccgaccggctgggccgggcgctgccgtccttgcagctttgccgccgccttgaaccgggcgaactgctcctgttgagcgtgacgaatccagcatcgttcgacagccgctatttcggcccggtcagcgcatccgccgtgatcggcgttgcgcatccggtgtggccggagatacgcccatga

SEQ ID NO: 199321 - DNA, 1983 bp, Klebsiella oxytoca; identical to SEQ ID NO: 158961

SEQ ID NO: 199322 - DNA, 1389 bp, Klebsiella oxytoca; identical to SEQ ID NO: 158960

SEQ ID NO: 199323 - DNA, 618 bp, Klebsiella oxytoca; identical to SEQ ID NO: 158959

SEQ ID NO: 199324 - DNA, 336 bp, Klebsiella oxytoca; identical to SEQ ID NO: 158958

SEQ ID NO: 199325 - DNA, 3117 bp, Klebsiella oxytoca
atgaagatcacagaaatggcgctgcgcgccagcagactcacctaccttgccgcggtcatcattcttgttgccggcattgccacgtttctcaatttcccttcgcaggaagagccatcggtcacgattcgagatgcggttgttgccgttctgaaccctggcatgccagccgaacgtgttgagcagttgatcgcgcgtccgatcgaggagcgtttgcgggagctggccgaggtcaagcgtgtaaccacaaccgttcgcgcgggcggggccgtcatacaggtcacgatctgggagcggtacaccgacctagcccccatatggcagcgcgttcgcgcgaaggttgccgatgctcagcctctgcttccacagggtacgttggggccatttgtcaacgacgacttcggccgtgttgccgtggcctccattgcggtgaccgcgccgggctactccatgggcgaaatgcgtgtgtcgttgaaagagatgcgcgatcgcctatacgcgcttcccggcgttgatcgcatcagcttctacggcttgcaggaagagcgcgtctatctcgaatttgatcgaccaaaactagcccagcttggattgaccccacaaggggtgatcgatcaactcgttaaacaaaacgtcgtgctttcaggcgggcaaatcgccatcggtggcatcaacgcttcgctggctgttagtggagaggttcgcgacgccgcctcgctgcgcgcgttgccgatcatgatggcgcaagctcagggtgcgcgcggtgcttcgcctgctccttcaatctcactgggagagcttgcgcgcgtgcaggtacaacctgcagatcctcccgagtctgctgcagtctataagggccagcctgccgtagtgatggcagtgtccatgacctcgggccagaacgtggagcaattcggcgtagccctcaaatcccgtgtggccgagcttgagaaacttctgcccgcaggtttcgagctctcctatgtgacattccaggcagacgtcgtcaaacgtgaaatgggcaagatgaaccaggtgatgatcgaaacgattgtcatcgtgctcggcgtcgtcgtccttttcctgggatggcgcacaggattcatcgtcgggatgatcgtgccgcttaccattctgggggcactgatcgtgatgcgcgcgctgaacatcgagctgcaaagtgtttcgatggcagccatcatcatcgctttggggctcttggtagacaacggcatcgtgattgccgaagacattgaacggcgcttggcagccggtgaagaccgcaaacaggcttgtctcgaagcgggtcgtaccctcgcactgccgctgctgacgtcctcattggttatcgtcatcgccttctccccgttcttcttcggccagagtgcgacgagtgagtatctgcgctctctcgtcattgtcctcgcgctcacgttactcggatcttggctgttgtgtctgaccgtcactccactgctgtgctaccacttcaccaaagtgcatcatcaaccggcgaatgacgcgcaaacctacaacacacgcttctatcgcggctatcgcaagttgcttgagtgggtgcttgaccacaaggcgatctacgttggtgtgatgacgggtgcattggccgtagctctgtacggattcacgacactgccatacgacttcttgccgaagtccgaccgagttcaattccaaataccggtgcagctcgcccctggaacggattcacggctcactcttgccaaagtgaaggaagtgagcggctggctcggtgatcaagaaatcaaccccgaaatcacggatcacattggctacgtcgctgacggtgggccgcgcttcatccttgggctcaatcccccattgccagcatcgaacatcgcgtactttgtcgtgacggtcaaggcaggcaccaacattgacgtcgtgattgcccgaactcgggcttacttcgcgcagcatcatggagatgtacgcgcagagcctcagcggttctcgctaggcactaccgaagccggcacagccgtctaccgggtcagtgggccggatcatgaggtgctgatgaatgcggcggcgaaaattgagtccgcgctacgggagctgccaggtacggccaacatcaagaacaactgggatacccgtgtcggccgtctcgatgttcgggtcgatcaagatcgtgcgcgacgtgctggcgtcaccaccgacgacatagctgcctggcttggcacccgctacatcggccagtcgatctctgtgatccgagatggcgataccagcgtgccaatcgtgatgcgcgggacgtccaatgatcggcgcagcactgcggacgttggttcgacgaccatctatccagcgtcgggtggccagccggtttccctggcgcaagtggccgatgtcacgctcgctagcgagccgtctgtgatccagcgccgcaatctcattcgtacagtcacagttcaggggcagaacaccgcatacaccgcgcaagagatcgtggatcacctcgcacctcggatcgccgcaattgaactacctgcaggctatgccatagagcttggtggagaaattgaggaatcggctgaatcgaatgcatcgctcacgcactacatgccgttcgctcttctggcgatgttgctgctattcatctggcagttcaactccttccgcaagctgatcgtgattctcgcaacgattcccttcacgttgattggggtcgtgattgcactgaaggcaacaggcactcctttcagcttcatggcgacattcggggtgcttgcgctgttcggaatcatcgtcaacaacgccgttcttctgctcgaacaaattgaacacggcctctcggaaggtctcgcccgacatgaagccctggtgggagctgcgatgcagcggctgcgtccaatcgtgatgaccaaggtgacctgtatcgcgggtctcgtgcccctgatgttgtttgcggggccgctgtggaagggcatggccatcggcatgatcggtggtctcgcacttggcacgctcgtgacgcttggcctgattccgttgctctacgaggtgctgttcggaatgaagtggccgggcagcaaacggagtcacgaggcggtacaacaaccagtgcaaccggtctga

SEQ ID NO: 199326 - DNA, 1167 bp, Klebsiella oxytoca; identical to SEQ ID NO: 158956

SEQ ID NO: 199327 - DNA, 636 bp, Klebsiella oxytoca; identical to SEQ ID NO: 158955

SEQ ID NO: 199328 - DNA, 1299 bp, Klebsiella oxytoca
atgaacgaagcgggtctggctgtgcagcaggtgccagcacaagcactcccggccgagtggtggacggcgtacggtgatccgctgattgacgcgctggtgcgcaacgcgctggagcacaacaccgatctcgctattgcaagagcgcggattgatgaagctgtggcgatcacccgacgtacacgcgcttcaatgttccctagcttggcgctcacgccccaagcaacgcgcgcgcgcgacttttctttggcaccgaccatcagcagcgatgccaggcttccgctgtcggcttcatgggaagttgatctagcgggccgcctctcgcatgccgctgatggcgcacggatggacgcagttgctgtcgaacagaactggttcgcgacacgttggcagatcgcctttgagacagtgtccgctgcactgcagcagcggcaggcggcagagctggaagatctggcaaaagagcgacttcaagtcgccgagcgccttgagcgtctgacagagcagaagttcaaggcaggtcaagctacgggctttgacattgaacgcacgcgttccgaggtcatcgccctccgggtggagcaagagcagttgcgacgcgtacgcggcgaagcaacgcatgccttggatgtgctcgttggccggattccgggggcgcttggcagcggtcctgcgcttgcctctctcaccatgcccgattggactcccagaagcgtgccaggcgaattgctgcagcagcgccccgacgtcagagccgcgcaggcgcgtcttgcagcggcgacggcgcgatggaacgcagcagaaggcgagcggttccccaaacttgtgctcgatttgagtggtgggcgccaacgcttcgagaacaacggaacacgtgtggcagggaacattttctctctgggcttgggtgtgacgcttccgatctttgacggtggagcaatacaagcgggaatcgacgagggctcagcacgcagtcgcggcgcacaggctgacctggaacgcacggttttgcttgcgcttcaggatgtggagaacgcttatctgggctggcagacccagcggacttctctgcagcatcaggtcgatggtcttgtcgtcgctgatcgactccttgaccgcagtcgacgcctctttgaggcgggacaggtggatgcgaccgttgttgcagaagcggagcgtggcaccttgtcccagcgagcggctctggtccgtgctcgcgccgacgcagccgtgcaatggggtgttctcgctaaagcgctttctggttcgccagagcatgtgaatctgcaatcttcaccctga

SEQ ID NO: 199329 - DNA, 945 bp, Klebsiella oxytoca; identical to SEQ ID NO: 158953

SEQ ID NO: 199330 - DNA, 276 bp, Klebsiella oxytoca; identical to SEQ ID NO: 158952

SEQ ID NO: 199331 - DNA, 2016 bp, Klebsiella oxytoca
atgcaaggtacgaatgtgctgttcggtcagatagccgtggtattcggcatcgtgatcgcgggtgtgtggggcgccacacaatggacggcagcagcccttggctatcaggtacgccttggctccccctggtttgatttcctcggcacaccgatctacctcccgtggaagctgtttgagtggtggttcttcttcgatgcctacgcgccacgcgttttcgacacgggcggtgccatagcgggtggcagtggcttgctggcggtggtggtcgcagtctgcatgtcgatctggcgctctcgtcaatcacgcctagtcacgacctatggctcggcacgctgggcaagtacggaggacattcgcaaagccggccttacgcagccgatcggcgtgttcctcggtcagcacgatggcaagtaccttcggcatgaaggcccggaacacatcctcactttcgcgcccacgcgctcaggcaaaggcgtcggccttgtggtgccgacgctgctttcttggcctgcatccgccgtagtccacgacatcaagggcgagaattggcagatcaccgcaggttggcgctcacgctactcacactgcctgctgttcaatccgaccgatgcgaagtcggcggcctacaacccgctgctagaagttcggcgcggcgcacatgaagtgcgtgacgtacagaacatagccgacattctggtcgatccagaaggcgcgcttgagaagcgcaaccattgggagaagacttcgcacgcgctgctggtcggggccatcctgcatgtgctctacgcgggcgaggacaagacgctgcgcggcgtcgccaatttcctctccgatccggccagccccttcgagctgaccttgcaccggatgatgaccacacagcacctcgtgaacgtggaaggtggtggcccgcatccagtcgtcgcttcggcggcgcgcgaagtgctcaacaagtcggacaacgagcgttccggcgtgttgagcaccgccatgtcgttcctgggcctctaccgcgaccccacggtggccgaagtcacctcgcgctgcgactggcgtatcgccgacctgatcgcgtccgagcatccggtgtcgctttatctggtagtgccaccttcggatatttcgcggacgaaaccgctcattcgcctgatcctcaaccagatcggccgacggctcaccgaatcgctcgacggcagcgacggcatcgaacgccgccacaagctgctgctgatgctcgatgagttcccggcgctgggccgcctggacttcttcgagacggcgcttgccttcatggcgggctacggaatccgcagttttcttatcgcccaatcgctcaaccagatcgacaaagcctacggccagaaccattcgattctggataactgccatgtccgcgtgacgttcgccaccaacgatgaacgcactgcgaaacggatctcagaaacgcttggcaccgctaccgaactgcgcgcgcagcgcaactatgccgggcacagattggcaccgtggctggggcacctcatggtgtcgcggcaggagacggcccgcccgctactgacgcccggtgaagtgatgcagcttccgactgaggaagctgtggtgatggtgtccagcgtggcaccgatcaaggccaagaagctgcgctactacgccgacgcgaatttcaagaaccgcgttttaccgccgcctgtgctcgcggccgggcaatacgcggacgcgccaccggcccggcccgacgactggagcggcctatcgatcccagccgtgtcaacggtccgggctgcgggcctgtccggcgatggcacaggcaccgccgatgacggcggcccacgccgacagccggagctatccgaagtcagcgaatacagccccgaaccgctgctcgccggccatgacctgactctgctcgatgacgacgacgacctgccgctgccgcttcccggccagctcgacccggccatgcagcgcacggcccggctggcttccctcgaccccaacgacggaatcgacttatga

SEQ ID NO: 199332 - DNA, 465 bp, Klebsiella oxytoca
atgagccaataccgcctcaatctgttcattcagcccgagcacgccaagcgtctcgaagaactggccgccaagaaaggcgtgtccaagtcgtccattgtcgcggcggcgctcgcgtcgtggctatcgcccgatgctggcgaccagcgcgaggcggccatcgccaagcggctcgatcgcctgtcgcggcaggccgagcgcatggagcgcgaccagaacatccagatcgaaacactggcgctgttcatccgctacttcctgaccgtcagcaccccgattcccgaagcccatcaggacgcagctcgcgcccaaggcaaagcgcgtttcgagcaattcgtggagcggctcggccgccacctgctgcgtggccgcagcctggtgcgcgacgttgtggaagaactgcacccagacccggcgcgaatggatgacgcggaggcactggctgaagcgcaggagcgtgcctcatga

SEQ ID NO: 199333 - DNA, 1068 bp, Klebsiella oxytoca; identical to SEQ ID NO: 158950

SEQ ID NO: 199334 - DNA, 384 bp, Klebsiella oxytoca
atgacgcagatgcacgttcacgctttccgtaattccgtaaatccggtttcaaccatcgcacgcctgcggcggctggccggccccgcgcaccacggcctgctgctggccgcagtcatgctgatgacggcgggcacggcgaaggcatccggctcctcgatgccatgggaaggcccgctgcaatccattctggagtcgattcaggggccggtggcacgcatcgtcgcggtcatcatcatcatcgccacgggcctcgcgctcgccttcggcgacacgtcgggcggctttcgcaagctgatccagatcgtgttcggtttgagcatcgcgttcgccgcgtcctcgttcttcctgtcgttcttcagcttctccggcggggctgtcgtatga

SEQ ID NO: 199335 - DNA, 273 bp, Klebsiella oxytoca; identical to SEQ ID NO: 158948

SEQ ID NO: 199336 - DNA, 2451 bp, Klebsiella oxytoca
atgcttaaccttgccgaataccgccagcggcccgccttgctggccgactggcttccctgggctgggctgatcgcgccgggcgtggtgctgaacaaggatggctcgtttcagcgcacggcgcgctttcgcgggcctgatctggacagcgccacgcagggcgaattgatcgccacgacggcacggctaaacaacgcgttgcgccggctgggttcgggctgggcgctgttcgtggaagccgagcgccagtcggccgcggactatccgcattccgactttcccgaaccgctgtcctggctggtggacgaagaacgccgcgctgcctttgaggaatcggggaaccactacgaaagcagctatcacctgacgctagcctatctgccgccggaggaatcccgcgctcgtgcagccaagctgctctacgagcacgcgccgggcgatggtgtggactggcgcggtcggcttgacgccttcctggcagaaacggatcgggttttcgacctgctcgatggcgtgatgccagaaatcgtctggttggacgatgccgcgacgctgacttatcttcacgccacggtgtccacgcggcgctaccggctggccgtgcccgaggtgcctttccacctcgacgcactgctggccgattccgccctagtcggcggccttgcgcccatgctgggtgaccagcatctgcgcgtggtgtcggtgcggggctttccgacctcgacctggccgggcctgctggacgacctcaatcgcctgggctttgcctatcgctggagtacccggtttctctgcctcgataaagccgaggcggaaaaggagctgggccgcctgcgtcgccagtggtttgcgaaacggaagaatgtcattgcgctactgcgcgaaaccatcttccagcaggaatcgccgctggtggacacggatgccagcaacaaggcggccgacgcggatgccgccttgcaagagcttggcagcgatcaagtcgccttcggctacctcaccgccacggtgacggtgttcgatgacgaccctgccgtagccgacgaaaagctgcgcatggtggaacgtgtcatccaaggacgtggcttcgtcaccatccccgaaaccttaaatgcagtcgatgcgtggctgtcgtccataccaggcaatgcctatgccaacgtgcgccagcccatcgtctcgacgctgaatctggcgcacatgatgccggtgtccgccgtgtgggctgggccggagaaaaacgcccatctcgacggcccgccgctgatcgtcacgcgcacggatggcgcgacgccgttccggctggtgacgcacatcggcgacgtggggcatacgctggtcgcggggccgacgggcatgggaaaatctgtcctgctggcgatgctcgccttgcagttccgccgctatggcggctcgcgcatcttcgccttcgacatggggcgatccatgcgggcgacggtgctgggcctgggcggcgaacactacgacctcggcgcggacggcgccattgcctttcagcccttggcccgtatcgacagcgaaggctatcgcacctgggccgccgagtggatcgaaggccgcctgctgcatgaaggcgtgaccgtcggccccgacgagaaagccgccatttggtcggcgctcggcagcctcgctggtgcgccggtggagcagcgcacgatgaccgggctttcggtgctgctgcaatcgaacgcgctgcggcaggcattgtcgccgtatgtgctgggcggcgcgcacggcaagctactggatgccgaccgcgaccggctcggcagcggcgacgtgcagggctttgagatggaagagctaatgcacagccccgccgccgtgcaagcggtgctgcgctacttgttcgcccgcttcgatgcacgtttcgacggtgctcccacgctgctgattctcgatgaagcctggctattccttgatgaaccgtccttcgcggcacgcatccggcaatggttgaaaactctgcgcaagaaaaacgtgtcggtgatcttcgccacgcagtcgcttgccgacatcaaggattcgaccatcgcgcccgcgatcatcgaaagctgcgcgagccggattttcttgcccaacccgcaggcgaccgagccgcagattcgcacggtctacgagggctttggcctcaacagtcggcaaatcgaaatcgtcgccaccgcgcagcccaagcgcgactactactaccaatcgcgcctgggcaatcgtctgttcgacctcgacctggggccagccgcgctcgccttctcgggcgcatccacaccgcaagaccaacgcgacattgaccgagtgctgacgcaggccggcgctcccggcttcgccggtgcgtggctacgccatcgcggcctcgattgggccgccgacctgctgccgtcctcgccgtcggcggcttctttcctcgctactcaacccctggagatttcgccatga

SEQ ID NO: 199337 - DNA, 738 bp, Klebsiella oxytoca
atgaagacccgtgtactttccgtttcgctcgccgccgcgctggccggctcgctgatgctcgctcagccagcggcggcgctcactttcgttgatcccgtcaacttggtgcagaacacgctgactgccatccgcacgctggagcagatcaacaaccagatcaaccagctccagaacgaagcgcagatgttgatgaaccaggcgcgcaacctggcgaatctcgacttcaacatcgtcaaccggctgcgctcgacgctcgccacgactgaacgcctgattgccgaggcgcaagggctggcctacgacgtgcagagcatggatgccacgttctcgcgcctgtacccggagcagtacgccgccaccatcagcggcgaccgcatggcacaggacgcacgcgaacgctggaagaacacgctcgacggcctgcacaccgcgatgcggatgcaggcgcaggtgtcgcagaacctgacgcaagacgaaagcgcgctggccgacctcgtgagccaaagccaatcggccacgggtgcgctgcaagcgatgcaggcaacgaaccagcttctcgccttgcaggccaagcagtccatccaggcccagcagctccagatcacacaagacagggcggcctcgctggagctggcgcggcaggcagcggccaccgagcgcgcccgcgaagtgcggcggcgcttcctgggcaccggcacgccgtacacaccgcagtccgtcaacttctacaacaactga

SEQ ID NO: 199338 - DNA, 327 bp, Klebsiella oxytoca; identical to SEQ ID NO: 158945

SEQ ID NO: 199339 - DNA, 1365 bp, Klebsiella oxytoca
atgaacgacgtaacgatcatcgacagattcctcgataccttctcgcgctacatcgactccggtttcggtctgctgcaaggcgaagtcgcgttcctgacggccactctcattgtcatcgacatgaccattgccggtctgtattgggccatgagccatgcgaccggccagggcgaggacgtgatcgccaagctgctgcgcaaggtgctttacgtcggtgccttcgcctacatcatcggtaacttcaattggctgtcgagcatcgtgttccgctcgttcgccgggctaggcatcaccgccactggctcggccataacgatggagaacttcttgcagccgggtcggcttgccaagaccggcatcgacgccgctgcgccgatcctcgaccagatcggtgacatggccggcttccccgaagtgttcgtgaacctcgaccccatcgtggtgctgttcatcgcttggctggtggtgatcctctgtttcttcgtgctcgcggttcagcttttcatcacgttgatcgagttcaagctgaccacgcttgccggcttcgtcttgatcccgtttgcgctctggaacaaaacctcgttcctcgcggaaaaggtgctcggcaatgtggtttcgtcaggcatcaaggtcttggtgctggcggtaatcgtcggcatcggctcgggcctgttcgcggagttccaggttcatcccgacgagccttccatcgaccatgcgcttgtcgtgatgctggcttcgcttgccttgctggcgctgggcatcttcggccccggcatcgccacgggccttgtgtccggtgcgccgcagctcggcgcgggtgcgatggcgggcgctgccgtcggcgcggtaggcacgggtgttgccatcggtgccgccgcgaccggcgtgggcggtgccgtcatggcgggcgcacgcatggccccggccgccgcaaagctggccgggagcggcgcacgcgccgccacgtcggcggccagcagcgccaagtccgcattccaggccggttccgccgctgcgggcggcggggctaaaggcgcggctgcgggcctcggcaatgtcgccaagaccggcgcgcaagcggcaggccgccgagctgcatcgggcgcttccgctgccggtcagaaggtggccgactccttccgggcaggatggaacggtgcggatgtcggcgctgccggttccggccaggccgccgcaggcgaaggcgcagccagcgcgccgaagcaagagcaacccgcctgggcaaagcggatgcaccgccgccagcagatcacccatgccgcaaccaccgcagcccacacgctgcgcagtggcgacggcggcggctcagggcaaggcccaagcctgcgccccgatgcgtga

SEQ ID NO: 199340 - DNA, 705 bp, Klebsiella oxytoca; identical to SEQ ID NO: 158943

SEQ ID NO: 199341 - DNA, 993 bp, Klebsiella oxytoca; identical to SEQ ID NO: 158942

SEQ ID NO: 199342 - DNA, 1281 bp, Klebsiella oxytoca; identical to SEQ ID NO: 158941

SEQ ID NO: 199343 - DNA, 243 bp, Klebsiella oxytoca; identical to SEQ ID NO: 158940

SEQ ID NO: 199344 - DNA, 393 bp, Klebsiella oxytoca; identical to SEQ ID NO: 144518

SEQ ID NO: 199345 - DNA, 273 bp, Klebsiella oxytoca; identical to SEQ ID NO: 144519

SEQ ID NO: 199346 - DNA, 159 bp, Klebsiella oxytoca; identical to SEQ ID NO: 144520

SEQ ID NO: 199347 - DNA, 327 bp, Klebsiella oxytoca; identical to SEQ ID NO: 144521

SEQ ID NO: 199348 - DNA, 516 bp, Klebsiella oxytoca; identical to SEQ ID NO: 144522

SEQ ID NO: 199349 - DNA, 882 bp, Klebsiella oxytoca
atgtctagtaataacaacaagttatctcttgtcattgaagagtccctaaaagattccggggaagttatccaactgcttcccacgctaagacagaccattcagccgaaagttttactccgtctgggtgtgtttgtgccaacactgaaatccacggataagggtggccggaagagtcaccgtatcgatgccactgaacccctttcgagattatccattgtggagggtgaaggctacagccagatacaaatttatggtccccgcctcgacatggactctgacttcaaatcatggtgtgggatcgtttatgcattgtctaaccgtccgctcgactcggaaggtcagctggagctgaatttcccggagtttgctaagttctgcggttttgacaccaagcgcattgataaacaactgaaagagcgttttgatgcttcattgacgcgtattgcccgaaccagtatctcgttcattaagaaaatacccggtacagacgatcagataacgataaacatgcacctcgtggaatccacgtactacgacagttccaccgggaaaatcgtcatcaagccaaattcgaagctcaatactctgtatcgcgtcgacggtaaaacccgactctacctgaagacgttgcagaaactggcccgtaaggagtccgcacaggccctgtatctgtatctggctgagttaccgagcaccttttaccgtatcggatttgaccggctgcgtgaacgcctgcaactgtcctcacatcttggcaaccagaatgccacagttaaaaaggcgctgggccagcttaaagagatcggttttctggaatactccatagacaaagaaaacggcgattatgtactgaatattctgaaaagaaacatgaagccatga

SEQ ID NO: 199350 - DNA, 2421 bp, Klebsiella oxytoca
atgaaatatcagactataactttggctatggttttgctcggcgtctcagttccggtaacagctcagatttatgaatccagctttacagataccaatggcattgaagtacacgcgccttcaacccggatgctactcaatccggcttctaccgtaacgctgacgcttatttctggattggatcgctttgtaaacgttaaagtgacccgggaaaccggggcgcagttgtacaataccaccactacccgtaccggtgtggctgatcggctaaaagcagccgacggcagtgaattttacgggaagaaagtaactttacccgctctcggggaaggaaaactgatcgtccaggtcaacattttggatctgaatcagtcagtggtagctacgtataactacaactggacaatagacaccacacctccggctgcaaatgcccttacagcaaccacatcactgggcactggaactggagcggtatttaaattaggtcttgaagctgtggcgcaatacagctttttatcaacgggcatcgctgatgcggttggaatagataaaggcatatttgaaatctatcgcgctaatggaacccttttcagctcaacgccaatgaaatacaacgtcggtgacaagacgatgtacctgccctacaccttcgcaagtgtgaagcaaccgggcatccctgatagcaaccttgacgaagaatttcaggcaaaagccaaaatttacgacaccgccgggaatatccgcacgttaccgacccaaaaatttcggtttgataatacaattggtgagatatcccttttcgctgttcatgatccaaatgatgcaaccagcgtcgttcccggcgtgaaaaactacccggcctataaagccggtatggtggttaacgaaaaccctatcaggctggtgtataaaatcccgagatctaactaccgggcatatgcagagggtggactggaatttattaacctttattcggctgcaaaagaaatcgcttctgatgccacctacagctatgtcgaaatgacgctgccatttggtgccttcaatggggatatggctcgtatggccaactttggacagtgggcaggatacttcccgacctacacgatgacgctcaacccgaacgcaaacaagacgcctgcttttactggcacctgggaggattttcaggatagcaatggcacctggtataagtcgaaggacttcgagacagttctgtcttccagattgccgattaaaatcgtccgggcaagatttaatgtagaagccagaccgtttgagcaggaagttgggggacgcctaacctgccgcattccggttggccagacaagttgcgaagctcctgagaattttgatatggcggtagggactcagggttataaccgtacactttattatgtacgcagtgtcgcgaaccctattcttcgttccgagcagtgggttatgacacgctggaacaatcaaatcgtcccagaaattggtgagatcacctacagcccgacatctaagatactgactgttgaagctcatctcaacagagataatgattggttcgacggattcagactcctcggattctatcttactgataagaactccaaacagcgcatgacgcctgtgggagtcgaaaagtccagaaacgcgggtaactacacgattgagtatgacctttcccggcagtctgaagggcaatacaacgttgaagtgaatattcaggatcgtttcggtaaccagacaaacaaaacctatggcgtgatagctctcgatgccacacccccaacggttgctattaccttcgaagggaagccggtaaaggatgacaccgtcgtctatggtctggaaaatctgcgcattgcactgagcgataacctgaccacacctcgcattactcgtctccagctaactggcggaccgacatcagacaatgttgaactcagttggtcacctgctggtaaagacatatactcgccggaatatccgcgcatattcccgaatttcgagccctctgaaaactatgctctcagtgtgacagtgtcggacagccagtccaacacaaaaacttacacacagaagttcagttatctcccgaacaacttggtacagctgcataaccttcgaacccttgcagtaaagtcggcgctcaaaacctctgataacgtgccacttgcctatctgtctacaaacatgctccgcaagactaacggtgaaatagccaaaggcttacagaacgcgaccctctcagtacgtaaggatgccaacttcgggatagtgtttaatggagcggaggcagctcctggggagtctgtaaatgttaatatcgacatgggtatgggtgataatcttctcatgccggtttatccatcagagaacggcaagaccggagccgctgagtttatgatccaaattgatgagctgaagtaa

SEQ ID NO: 199351 - DNA, 468 bp, Klebsiella oxytoca; identical to SEQ ID NO: 144525

SEQ ID NO: 199352 - DNA, 387 bp, Klebsiella oxytoca
atggatgaagccggaaacagcaccacaaagagcagccggttccgctacgtaccgaacaacctgattgaatttaataccatcaagacgctggctgtgggcgtggggctgaagacatcagataaccagccactggcgtatctgcggaccaacagcatccggaagaaagatggttcgctgatcacaggagtgcagaccggcacgctgacggtccgtaaagatgcggcctttgcggtcagtatgaatggggcgactgtcattcccggagattcgaaagacatcacaatagacttcggtcaaggggatggcatcctgatcccgatcttcccggccaccagcggcaaagttggcgaatccagcttcatgatcgagctgccgcaaatccaataa

SEQ ID NO: 199353 - DNA, 699 bp, Klebsiella oxytoca; identical to SEQ ID NO: 144527

SEQ ID NO: 199354 - DNA, 330 bp, Klebsiella oxytoca; identical to SEQ ID NO: 144528

SEQ ID NO: 199355 - DNA, 255 bp, Klebsiella oxytoca; identical to SEQ ID NO: 144529

SEQ ID NO: 199356 - DNA, 264 bp, Klebsiella oxytoca; identical to SEQ ID NO: 144530

SEQ ID NO: 199357 - DNA, 141 bp, Klebsiella oxytoca; identical to SEQ ID NO: 144531

SEQ ID NO: 199358 - DNA, 777 bp, Klebsiella oxytoca; identical to SEQ ID NO: 144532

SEQ ID NO: 199359 - DNA, 777 bp, Klebsiella oxytoca; identical to SEQ ID NO: 144533

SEQ ID NO: 199360 - DNA, 468 bp, Klebsiella oxytoca; identical to SEQ ID NO: 144534

SEQ ID NO: 199361 - DNA, 297 bp, Klebsiella oxytoca; identical to SEQ ID NO: 144535

SEQ ID NO: 199362 - DNA, 1182 bp, Klebsiella oxytoca
atgaaacttttcggtattttatccagggatgcaggcacggatgcgatgttttatattcaggccagcactaaacaacaggcaagcttcatatttgatgcccttgtcccccggctgaatgcgcattgccaactgatcgacccactgaatgaaacaattataccttcactaagccggacgacactttctttacagccctggtcccagaatacccagacacggacgagtgagctgaagatgacgacgcacggtctgactctctccggggcagtgatggtggaacactcccggcagatcgtcgacttctgcgataacctgggcctgcgcctcgatgcacccaccgggaaacccagctggacagaactgatcaatgctgaccttgagcagcttaattccccgcgtttgttccccgtccttacccaatctggcacggaaggacagtttcagatctatgtcccggcaccggctgtcattgacgccgacgtagtcattgctagcgtgatcggcgagtgttttagcggcgttaccccgtactgcgtgaacggcactccatatccgctgactgaaaagccgctgatccggatggaggcacacgttagtgacatgcatacacgggtttttgagctgacattcgtcagttataacctggcccttactgcgacggtatatgacaacaatctgcgccaggttctgatgctgtgtgaagattttggtgtcacccttcaggggcgagcgggtgcatcctgtcatgcctacatgcgtaacgaataccggcggcttgcacatgtaggtgtttgctcacgctccggggctgaagacgatgtccgcgcttacagctcatataaagaggaaaccctgatccggcagctgctgaatcaggcgacggcggacagcacattgatcccggcgcgacacggccagcaatttaacggtgtgctgatgaatgccaccccgtcatcagcaaccaccggatttatctacctgtcacaggaattcccgcaaggccagtttatgatgacggcggaagtggtgaatgccagcagcacgccacgggggatcagttacatcgaaacggtggacggttaccgttttattgtgactgcatacgacacgagagcgatgaattccctgaccgaatttcttgaagttaacgagacctattttaccccataccgctgggcgtag

SEQ ID NO: 199363 - DNA, 378 bp, Klebsiella oxytoca; identical to SEQ ID NO: 144537

SEQ ID NO: 199364 - DNA, 435 bp, Klebsiella oxytoca; identical to SEQ ID NO: 144538

SEQ ID NO: 199365 - DNA, 258 bp, Klebsiella oxytoca; identical to SEQ ID NO: 144539

SEQ ID NO: 199366 - DNA, 636 bp, Klebsiella oxytoca
atgaaaagtaaatttgctgagctgccggtgaaaaacgggaaatccggtaactggacgctggactcctttgtgattacgccagaaaaagcgcagaccctgaagcttcgcgccgaatatacaaaggatcaggatgaatatatcccggcaggcgtctaccggcgtttgtcctgtgataacgaagtggtgatgtccaatacgccgatggagatccgtacctgtgaagctttcattgagcgagcaactggacgcatcctgattaacggactggggctgggaatggtgctgcacgccattcttcagaagcctgacgtgacccacgtgaccgtcattgagaagtctcaggatgtgatgaacctggtttccaaagcatttgctcacgatccccgcgttgaaattatccttgcggatgctctggaatactgcccaccggcaggcgttaccttcaatgtgtgctggcatgatatctggccagatttttcgagatcaaatcttgatgaaatggaagcgctcgaacgcaaatatctccacctgtgcgactggcaggactcgtggggtaaagagcagtgtgaagctgccctgattcgtttcgcggcgctggaatcgtcactggagtccctgatgcagaaagggaagtga

SEQ ID NO: 199367 - DNA, 612 bp, Klebsiella oxytoca
atgaagagttgcttttctaatttacctgttaaagatggaacatccggtgcctggacactggacagcttcgaaatctccaaagataaggcggttagccttttcctccgtgccgctacggaggatatcgacgcggttttacagcccggtaactatcgccgcctttcaaatggcagaaatgtggtgatgaccaatttgccatacgaaatccaactctgtcaggagttcataaagcgagcgacagggcacgtcctgatcaacggactggggctggggatggtgctgcacgccattcttcagaagccggaagttaacaacgtgactgtcattgagaagtcgcaggatgtgattaacctggttgccgaggcctttgcccacgatccccgtgttgaaatcatccatgcggatgctctggaatactgcccaccggcaggcgttacttacgatgtgtgctggcacgacgtctgggcgggattatcgagttcaaatctcgatgaaatggaagcactcgaacgcaaatatctccacctgtgcgactggcaggactcgtggggtaaagagcagtgtgaagccgccctggtccgtttttcaaggatggctgatgagcaaccttaa

SEQ ID NO: 199368 - DNA, 1269 bp, Klebsiella oxytoca
atgagcaaccttaacagcgatttgattgcgcggatctatgccgcgtcagacaccccgttaacgaacgaagagctgtatcgcgaggtacaacgcgaaacggggatgtcggatgcagaactacagaaaatgaaggcgttcggctcggacaaaatgcgaaccagcggcgtcaagcatcaggttcgctggtatcagcagacgctgcggcaggccggggtgatcgagcgtgtcccggaaaagcggggcgtctggcgctatgccttcaaaaatgacaagaagctgcatgagtcctgggacaaactgtgtgtcgttggcttctcaacttcgctcggggcatcggtcttcgggaatgcgtacgcgttcttcagcaacatcaatgagcaaatccatctctgccttacgtcgcccccgttcctgctgcgtaatgcccgaaattacgggcacggcggcggacgcggtgagcaggcgtatattgactggctgctgcggattcttgagcctatcgtgaagcagctcgtgccggggggcagcgtggcgctcaatgtgacgcaggacagctttaatccaggcaggccatcgcgctctctgtatctggaaagactgacactggcgctgtgcgataagctgggtcttgagctgatggacagactgaactgggtgaaccgagcgaaacccccgtcgccgactcactgggcgtgtaaacagcgtgttcagctctgttcgtcttacgagccggtgctgtggtttactaatgacgcgcaaaaggttcgttcgaacaacatgcgcgttctccagcctcattcagagcagcatcagaaattgcaggcgtccggcggcgaaaaccgcactacattttacggggatggcgcttaccagcttaaaaatggcgccttcggcaataagacagaagggactatccccaaaaatacgcttatgtttggcaatgcctgcccggatacgcggctctgccatcgcatcgcccgcgaactggggtttccgctgcacggtgcaacgtcacccactcgactcgccgcattcctgatcgagttcctcaccaggcctggtgatctggtagttgagccatttgccggtctgcacaaagtaccggttgccgctgagcggctcggcagacgttggtatgcaacggacaaaataatggaatggctcgggatctcgcgcagcctgtttacagaaatgccgggataccagagcagcccgatactcgatgacctggttgccctttaccgtgatgaactgcgggaagggggatga

SEQ ID NO: 199369 - DNA, 309 bp, Klebsiella oxytoca; identical to SEQ ID NO: 144543

SEQ ID NO: 199370 - DNA, 447 bp, Klebsiella oxytoca; identical to SEQ ID NO: 144544

SEQ ID NO: 199371 - DNA, 438 bp, Klebsiella oxytoca
gtgatcctgtatcggatgaccaagacccgctatattacgactgcatggtcgggattaggtgcgaaagaagcgggaggccgctggaacagtgtcggcacagcacttgtctatctgtccgagacggcctctctgaccatgctggagacgctggtgcatatcaatgccccgcagcttctggacgcttacacgctgctgagcattgatgtcccggatgaccagatccaggcctttgacttgaacctgctgccgccgggctgggcaagtgaagatgcgcccgcagaacttgccctgtatggcgataactgggctgaaagtggctcttctgttgccctgcgtattcccagtgcattatctccggtggagtttaactaccttttaaatccggctcatccggcgatttttgatctgatgaaaaccgtccagaaaattccttactag

SEQ ID NO: 199372 - DNA, 231 bp, Klebsiella oxytoca
atgatgacaagcgaaaaaatctttaaaatcagtgtatcgctcgttgtgttattttctttcgtttactgggggcttgatcccgaatttatctgtaaatttgccagtgacccatccagtacctgtgattattctgagcgtattccattgcttaactttatttcttcagtatgggcattgatgctgactgcgactctggctggcattctcgttaagtgggtcagaaaaaattag

SEQ ID NO: 199373 - DNA, 333 bp, Klebsiella oxytoca; identical to SEQ ID NO: 144547

SEQ ID NO: 199374 - DNA, 261 bp, Klebsiella oxytoca
atgattaacaaacagggcaacgctgtaaatcccccggacttaagccgactgtatattatctcaggccgcatgatgtttgatgatgaggaagaagtgatgctggttgaagccgactcctccggtgaagcagaagcggcattccggcgacatatcgccgacggagaggcacacattgaaaaggcacttgtcatttcgtcggcgtcccttcaatcactgttaccagaccggatcattgtttccgccctgacacataccttataa

SEQ ID NO: 199375 - DNA, 807 bp, Klebsiella oxytoca; identical to SEQ ID NO: 144549

SEQ ID NO: 199376 - DNA, 447 bp, Klebsiella oxytoca; identical to SEQ ID NO: 144550

SEQ ID NO: 199377 - DNA, 2382 bp, Klebsiella oxytoca
atgtatatcgaaataaaagaaacattccttgaattaccctcagaaattcaattttctgaggcggctaacgctgccattctgacgcaggataaatggggcgatgtctggcaaacactgaagaccgatgcggatctgaattataccgatgccggtgagccggtcagtctcgcatcgcgcgtgacgacggcaaccagtgccatttatcatgcgattaccgaaggctggaccatgtgcgtcggctacagcggcgggaaagactcccactcgctactgcacctgttcctcatggccctgatccgtgccgtacggaacgggtcgaacgtcagccagcaccacttcattcagatctccaacaccctgattgaaaaccctgagatgcatcatcagtccacgcaggttctcagccagctccgagcctttattgccgaacagcaactgcccgtgaccgtcctggtggcccacccgtccatgacccagagctgggtcggacgcattctgaccgggcgcggacttccgacctggacaaattccaatacgcgtcaatgctctacagatctcaaacgctctccactgcgccaggccaaagcccgttatttaaaaaatgcaccagcttccgtccgcaacaaagtgtgcctgatgctgggttcccgcgatgatgagagcgcccgtcgggcaggcaacatcctcagaatgggcgggcagtcggacagcgtctcgctcacggagctcggcggcgaactgtacccggtgaaagagtggcggacacaggatatctggtcatttctgatggcctgtggttcgctggcgcgatttccgctgccaagctttttgccggacaacttcagcctcgccacgctttacaaagacgcgaccggggaatgtatctggacgccggagaaatacacggcccggtcttctgcctgcggcgctcgctatggatgctcgctatgctgcgccgtcggcattgaccactcgatggaaaccttactccgcactgatcctgagaagtacggctaccaggctggtctaaaccgccttcagcgtttcctgaccaaaatccagtacgactggagccttcgggattatatcggccgcaaagtgtttgagggcgggtatgtgcgtcttcagcccaatgttttctcgtcgtccctgaccgaacgactgttccatatctgttgcagcctcgattacgtggaggcccagcgggccgcagcggtgcgggaaaagttactttctggcgaggtcgaagatacggcgcataaccgccgcatggcggagccgcagtttcgactggtgcaggaagccaacgtgctgcatatcgactttctctggtcactgcattgctttaacccgcgaccatttcgcgccatcgaactttaccgccaggtgtgggaagggggggcactggatctgctcgacgatgagccagctatgcaacccgtaccccgcacgccgatgccagcaccacgctggatgaagttgccggaaggccgtatcgggacgtcatttgacgggctgtctgatccgtctgccgaaatggcctattttgacggtcgggaggatgaccgtgcttcccgcagcctgctgagcagcggggaaagcctgaacatcgttgcattcgaagaagaggatgagctgacggtcgatgaagacactgcgtcctggattatctggcatgaatatgacggattacgccagcgtgtgtctgacggtgagtttacccccgtggcggcggcacagtacctgcttagatacggcgccgtccgaatttcccgggggaaaggtgcggtgtaccaccgcctcgctcaacgcgggcaggccttttcacgtcttggcattaacgaccagacgccgctgccgtccctgctcgtcagccaccgtttcaagatcctgaccgactgcgattaccgcctgctcgttgcccgtaaactgcgggggcagcggcagaaactgcgcttctggtgctgtgttgcggcctgtgtggcgctgcacacccacaaccgaacgcctcttggggcatggatcacgacgcaactggagaacgaacgccagcaacatctggcccggacgggtgacgaactgaaagccggtctgctcgacgctgtactgactctctgtaacctgcggattaagcctcaatcaatgcaaccggaggaacggttgtattaccgggctgtcagaaaacgctttctgacgacgttagccaggtgtatttcccaggagtacgacgaaaccttacgggaggttatttgggcgctgaggatgctgtccggtccccagtcttcgaaaaagacgggattccggcatgtggatgattgccgggagagtactgcggcactgttaaggcctctgctgaatcgtctggtccgcctgctggcgtga

SEQ ID NO: 199378 - DNA, 495 bp, Klebsiella oxytoca
atgaccgataaagaggataaaaaaaggaacttaaggaagataaggggcatttcaatcaactgggaatttaataagcccactggtaaggaacacctgctattaattattgccatagtggcatgtattttccctggtcagatttttttcaattcctctctatggagcggcttcctgtatttaatttgtgttgcgggtagttatgcatacctggctatacctcattttaaacatcgtaaggaaatctggaagggatggcttgaccagtcgctgaaagagtaccagccgcttgatctgcaagcttgggaggtttttaaggcccgcgttagtgaggaaggcatgacttatgttgcttttgaatcatggatgaatactgaggctagtgctttatataaagaacccaaacaagaatggtcatttgtcgacaaaacaccggtcggagaaaatgatcagtcagaacctgttcaacagatttcagtaagtaataaaaaagaatag

SEQ ID NO: 199379 - DNA, 225 bp, Klebsiella oxytoca; identical to SEQ ID NO: 144553

SEQ ID NO: 199380 - DNA, 699 bp, Klebsiella oxytoca; identical to SEQ ID NO: 144554

SEQ ID NO: 199381 - DNA, 309 bp, Klebsiella oxytoca; identical to SEQ ID NO: 144555

SEQ ID NO: 199382 - DNA, 525 bp, Klebsiella oxytoca
gtgaaagttctaaataacaaaggctcagtaatcgaattacccaatttttcagaactcctcccgaaggttaaatctgatgatgggcgattttcaaagcccaaaaataaaatatccaaagagcaacgagccgaactgcgtttgaaatttggtggtcggtgtgcctattgcggctgtactctgccggaaaaaggctggcatgccgatcatgttgaaccggtgaggcgggattttgaaatggtcagagcccccgctggaagtcgagtgacacaccaggctcgaagtaccggtaaggtcatgcatcctgaactgcatgcaatcgaaaatctttttccggcttgcgccccctgcaatctctttaaaggtgcattgagtgttgaaggaatgcggaaagaaataagccgccaggtagaacgcgccagggcatacagcgtcaacttcaggaccgcagagcgatttggattaattgaagtcacggagaagccgattgtcttctggttcgaaatgtatcaagcgacaccgaaataa

SEQ ID NO: 199383 - DNA, 609 bp, Klebsiella oxytoca; identical to SEQ ID NO: 144493

SEQ ID NO: 199384 - DNA, 237 bp, Klebsiella oxytoca
atggatgaatatctggcgctggacaaggcactcatcgaagttctaaccccggttcctaagccgttcgcgacattatttgccggagaaatcaaagcagagtgtcacaggattgctgctagggaaagcaatccgcaaccattgcggattcttgaccgccgtttgcaatcgctaattaaggacggtcgcatttcttatacaaccggaaaaggttggcttaaatgtggtggcaccgtataa

SEQ ID NO: 199385 - DNA, 249 bp, Klebsiella oxytoca
atgaccagcaatcgctcccgtgaaatcaaaacaccgcctgtgcatattattgcggattacgttcttcgcttcatgaagaacaataaagaagcgaaattgtacgaagcaatgagccgtcttgaaagtaaaatcaaactctttattgctgacggccatgatgagcagcatatccggacacagttaaatcaggccacacaatgtcataccaaagaaacactgaaacgggcctgtgaacggatttgtatttaa

SEQ ID NO: 199386 - DNA, 381 bp, Klebsiella oxytoca
atgaaatttatcctgttgtttttcattttagtcattctgatctgggggtttacaggtctggcttttaaagaagccattatatttacgtccgtcggactgagcatttcggttgtggctttgtctgctctccttgtggtagttctgacatttgtaatggctgcaatgtatgcaactcaggaactgggtgcgctgggaaaaatgattatcgctcaggttgtactgaccggattatggaacctggctttttctattatcccggacggaaagttactttcttttttcggcgtaaatatctggcaatccggctcatacctggtttacttcatggcagtgttgatagctgttttcgcgacgttcgtcgcgttccagaagcagcagtag

SEQ ID NO: 199387 - DNA, 312 bp, Klebsiella oxytoca; identical to SEQ ID NO: 144489

SEQ ID NO: 199388 - DNA, 492 bp, Klebsiella oxytoca
atgagcagattaacattcgagatttcaggggtaaaaaaactgcttaaagaaatccagtcagcggagcaattccttgcaaccgttgatcagctttttgagccaacaaattatccggggggggtgcctcttaacgaagctggtaagacggaaaaagaagcttgcctggcaggggaagttttctggccatcgccaaagcatatggttcagacccgtctgacccctcagattactctggtaaaaggccatggcgtctgtctgattaccaatgcttctctggatggaagtcctgtctcccgagatacagctatctatgcccgtggaatgaatccgtcgcttgatgaagattggaattatgagtctgatcagattatgggaggagatgatagtacagttactgtaccgcttgagtggtttgaactcgcaatcgaaaagaaacttaaggcttttagtctcaaagtatcccctacaaaaataacgctggtgaatggataa

SEQ ID NO: 199389 - DNA, 294 bp, Klebsiella oxytoca
atggctgacacaaagcgacctatttccccgcttacacaggcccaaatctatgtgttgcatcgtctggcaagcggaacgaagtatgagatctgcggtgaatttcgtcgggcccgggaatgccggatgtataggggggcatcggatgatgtgcgatgccgtagcaccccggtcctctttcggcttgggttggttgagctggttaatccgtcccagcggcctttaccgggaagttattatcaggtcaagctgagcgccactgggagtgatctcctgaggtccatcgaacgcgactaa

SEQ ID NO: 199390 - DNA, 204 bp, Klebsiella oxytoca; identical to SEQ ID NO: 144486

SEQ ID NO: 199391 - DNA, 225 bp, Klebsiella oxytoca; identical to SEQ ID NO: 144485

SEQ ID NO: 199392 - DNA, 252 bp, Klebsiella oxytoca; identical to SEQ ID NO: 144484

SEQ ID NO: 199393 - DNA, 354 bp, Klebsiella oxytoca
atgaataagtctctggtcagctttgcggaattatccggcgatgctattaatcttgcgcgacagtcggttatcgagatggaaatgaccgctgcccgggaaaagattggaaaggctcgttcgttattccgctcaggtattcatcgtgctgttaatggatatccgctgattcagtcggcggctaaccagatgagcgtcattaaacgactccagagcgacacagaatatctcgatgcctgtattactgagaatctttgtatgttctcgacagagggttatctgtacctgtttatgcaacgccgcttcattaatgaacccgtgtctgaaggccgggaactgaacaatatttccatttaa

SEQ ID NO: 199394 - DNA, 126 bp, Klebsiella oxytoca
atgctgctgcgaaaccgctttaccgccgcagccagcgtaaggctgagcgtcagcgtcagcgtgcgactattacccgcacactggccgaatcacgatagccgtaaggactgctcatgcctgggctga

SEQ ID NO: 199395 - DNA, 282 bp, Klebsiella oxytoca; identical to SEQ ID NO: 144482

SEQ ID NO: 199396 - DNA, 606 bp, Klebsiella oxytoca; identical to SEQ ID NO: 144481

SEQ ID NO: 199397 - DNA, 216 bp, Klebsiella oxytoca
atgctagtcacattaaaggttagcctcttacctgcaaaaatgcaaggagaagaagccatgaaactgccgaaccaacccgttgttttgtgcgtattgatagtatgtcttacgctgttgatattcacctggcttacgcgcaattcgctctgcgaactgcggctgaaagacggtacgcgggaagtgtcggctgtgatggactacgaatccggtaagtag

SEQ ID NO: 199398 - DNA, 207 bp, Klebsiella oxytoca; identical to SEQ ID NO: 144479

SEQ ID NO: 199399 - DNA, 363 bp, Klebsiella oxytoca; identical to SEQ ID NO: 144478

SEQ ID NO: 199400 - DNA, 570 bp, Klebsiella oxytoca; identical to SEQ ID NO: 144477

SEQ ID NO: 199401 - DNA, 333 bp, Klebsiella oxytoca
atgaaactttcccgccagaccacgaacgacactgctgtaatcgaaggtacccgcagccacttctggggtcgctcgctctacttcatcattgagaatgcgcccagggcacacctcgtcgctattgatgaattgctggatgcagcgggttgggaaagcgatcactgtccaaactacgaagatgacgatgcgtttgggcatgccggttacagctgcgggtacatgattgagatcgatgacgtggcacgcttcagggctgactataagcgcctcaaaaagcagattgccgcccatatcgccgcccagcgtaaagccgcagccaaacagacggcatga

SEQ ID NO: 199402 - DNA, 312 bp, Klebsiella oxytoca; identical to SEQ ID NO: 144475

SEQ ID NO: 199403 - DNA, 408 bp, Klebsiella oxytoca
atgattaagtctactatcagcaacgatgcgcttcgcacccgtattcaggcgctgcgtaaaaccagtgcaaacacccttgtcagcacggcgaaattcgacgctgatgcgctggaggacctcctgcgcctgcgtaccgcagtgaagctgagacgagtacacgtggtccagagtggcacctgcgactgcgaggagccctgtgaatgcatgcccgggctgtatgtaaccgtcgactccggcgtgggtcacggccaggcggtctggacttaccgggacgacggaaaatccggtctggcgtactggtgcgaatttatgggactcgctccattctgggccgaagaccagatgcatgccgccgaactgcttcgcgagaaactggcccctgacccgacggtttcaacagcgacatga

SEQ ID NO: 199404 - DNA, 255 bp, Klebsiella oxytoca
atgagcaaagagactctgtcactggcaacccgttacgcgggcaactcctctgtgatttcggaaatgcagacagcgctggacgtaatgccgctggtgacggaagccgttcagagcgtgtgcgaacgggttgaatgtgagcccactgaatttctggacgcgatggcgcttgtaaaacgtttcctgctggcaaaacaagatgaactccgtgcggaaagcgtttcaatccgcaagcagctgggtgagatgggggaataa

SEQ ID NO: 199405 - DNA, 195 bp, Klebsiella oxytoca; identical to SEQ ID NO: 144468

SEQ ID NO: 199406 - DNA, 1206 bp, Klebsiella oxytoca
atgtccactatcgaaaatgatgtaaaaaccgctaacaacgatatcagcctgcgcacttacctggagcgttccggtaacggcgcacgcaaaagcaatggtctggtcatcaacccggcagtggtcgaagaggaagaaggttttaacacccgtaccgctggcatgggagaaagctactactccttaccccacgtggtagcccacctgaacagtcttaaagagtcctataagtctgagcctttaagcgtaccagctatcgtcgtgcaggttctgaatggtcgtcctgttctgcgtcagggggcatgtcgtatccgcgccgccgctatggcaaacatcgagctggcagaggaagggcgtgaactgatttcgttaattcgctgcgaggagtttcgcggtagccgcgccagtgccgaacagtttacgctggacggtaactctaatctggctctgtctgtcgtggctgaggcgctctccatcaaacggatggtcgaagatgctgaagaacctaaaacgttcgcagaactggccaagcgtcgcggtaaaacagaacagcacctgcgtcagatggttcgcgtcctggacctgcctgaagccctccaggttatgctggtgacaggggaagtgagcatgtatgtcgcgctggatgaatatctctacagcggcgataaggccgtgaataatatcaccaaagccatcgacgtctatggcaaggcgacggccaaaacccttaaattcgtcaaagctggcaaaattgatgcagccatgcagccgaaagcgccggtcgtgcaggaaacgaacgcaaacacccctgaaaccaccgtgacggaacaaacatccgtcgaaggtactacggatgagaccaccccgccgcagctggtggacgggaatgttgggaccaacccggagccaactccggaaaacaccccggagccgaaggcgaaagatccgatcaaaacgccagagcctaaaactgtatcggtctccagcgtactcaacaaaaagaccgtgacgacgattgcggacacggcaatcccgcttttttcgcgtattgcggaagaagcagaacaacgtgccgctaagaacctcagcgacgatacgtacaccttagtgctgaccaatgatgagatgaatgccatctgtgaagcccacggcaatctcacgcagtacctgcgtaagcatgccgaaaagcagcaacagggccaggcatga

SEQ ID NO: 199407 - DNA, 282 bp, Klebsiella oxytoca; identical to SEQ ID NO: 144466

SEQ ID NO: 199408 - DNA, 297 bp, Klebsiella oxytoca
atgaaaaccagtctggcttacgcatctaattgttccgactctctctattcctttatttacaaggcactgcaacaacgctcaggtgccgaaaatgaaagtctctatcagcaggctatttcagcgtgccgtactccgaagcaaaaaaagaaaatggccggttactacgccggtccgtggcagatgctgtttaacgcctggtgttacaaccgcctacccaacattgccgtactgcccgtgttggcacagcagtgcttatcctttttgcagtgcgaagaactgatcgccgactggcactaa

SEQ ID NO: 199409 - DNA, 438 bp, Klebsiella oxytoca
atgtacagatatgacaggaaccggcagtcgttcaacctggtcaatgcgcttcagccggtctatcgcaacaacggtggcggtttgtttgagttcgaccgcaggaagcaacatgaaacggctgatctcatcttcgaggcactgacgttttcccaggcgcccgaactggagctggcgaaatttgtccgtcttaaatctgtgcgccgaattgcacagtttgacgacggtgaagtgcgctatggcgttcacgttgaactggccgacgctgttgataataattccttcagaattttcaaagatgataatacaggtggatttgatttttatttattttctacttcaaataatgaagtagagcttgtccgctttaatctggatgtctgtggtattcatttacaggacatttttgaacggtcaaccggcttgtgtctgtcgtactga

SEQ ID NO: 199410 - DNA, 546 bp, Klebsiella oxytoca
atgaaaaatcttaatattcagattaacgacatcgcagcaattaacacacttggtggatcaatgctggcggatatcatcgccacccaatataaagtaattggtgataacaaagacactgcggaaatgcctatgccgtgtattgcttacgggcagacccctgcaaatatcgacccaggcgtcttcatcaaccgtgtgtactgcttggacagtcaatcgctaagtgccagcctgcgttacgagctgtttaacggacttgcgaaccaggcgtttaccttcttctgccagtcgggctggtacggtgcattccgggtggtgtctttccgtgataacggacctgccggactccttaatatcggcattgtccatgagaaggtgttaaacgaattttgcgccgattttccccgggctaatgtcagcgaaaccggctttaactgcggcatgacgtttgaccagatccggatgtttatttcagaccgggcctatcagatgccgctctacaacaaccaagatcacttcgttaaactcgcgaaacgccttgtggcctga

SEQ ID NO: 199411 - DNA, 237 bp, Klebsiella oxytoca; identical to SEQ ID NO: 144462

SEQ ID NO: 199412 - DNA, 315 bp, Klebsiella oxytoca; identical to SEQ ID NO: 144461

SEQ ID NO: 199413 - DNA, 372 bp, Klebsiella oxytoca
atgaagcaaggtttgcaattaaggctaagccaacagcttgccatgacgccacaactgcagcaggcgattcgtctactgcagctgtccacgttagaactccagcaagaactccagcaggcgctggacagcaacccgttgctggagcaaaccgatcttcacgatgaggtagaaaccaaagaggccgaagatcgtgagtctctggataccgtcgacgcccttgagcagaaagacatgcccgaagagctgccgcttgatgccagctgggatgagatttacaccgccggaacgccgtcagggaacggcgttgattaccaggatgatgaactcccgtctaccagggcgagaccacgcaaagcctgcaggattatctga

SEQ ID NO: 199414 - DNA, 252 bp, Klebsiella oxytoca
atgaccggcagcctattttcaaagctgaagtttgctctgatgactctggctgccgttcttttcgtgcttgtcggtgcttatacgatgggaggtcgtgcggctcggcaagcaatcgaagagaaggcccgacaggaagacagaaagaggcttcaaagtacagtggacgtcaaaaatgaaacacttgatgaggtgcggcggaaagatgcttctgctgttcatcgcgagctgcatgataagtggctgcgtgattaa

SEQ ID NO: 199415 - DNA, 195 bp, Klebsiella oxytoca
atgggcggaaaagacaccagttatcagatcgtctacagaggcgagacacttaaacattcaaacctggccagtgcgtctttttccagcgagagagagtatggtggcggctattggttgggcaagactcatgtggacggttttgagtgcctgcaacgattaacatcattggtaatcacggaaagtaagatgtcttaa

SEQ ID NO: 199416 - DNA, 573 bp, Klebsiella oxytoca
atgtgcgaaaaatgcaaaaaaactaatgccaaagttgaaagcgtgattaaaaaagttggtgcggccgaactggttgagatcatgggtcttgtggttggtcacgaagacgacgcctcccctatcgaccgccttttcagcgttctcaagttctcaagcatgattgatgatccgattgaaattgtgatgctggcgcgtcatttcggcgaagcgtatctggaagagaaagaacgcgccgacaaacttcaggcaactctggaaatggtaagcaagccgaagtgctcaccggattcagtcaaggcagatgaaaccaacgccagcaaagatcgcgaaatcgccggactgaagtcttctctggcgatgttgctggccgccttcaaactgatgtcttcccaggctgggttcaaaatgcctgatctgaacagcgacgatccgatggccgttcgccagctgctgggggcaatggccgaccagcttgacgacaccaagagccgtcttgaagacatgatgcgcgagctgacccatcgccacgacctgaacaaacagccgcacaaaacgcagcacgtacaccactaa

SEQ ID NO: 199417 - DNA, 843 bp, Klebsiella oxytoca
atgtttgagatgactactttatcgattcccggtgtgctcccggacagaccattgatgtcctcaaaagaaatctcaaagctgaccggtaaacgacacagcgacattcttcgcgacatccgtagcgtgctgaatgagctgtatgccgacgattaccataacgcaaaattgcgttatgagaaaaatcagttgcttacaattgttgaaggcattgttgtcaacatcgattaccggggaatggaaggcgagtacatgctcgaccgaaagcataccgatgttctcattaccggctactcgttgaagtaccgcgctgctgtcattgagcgctggcatgagctggaaatgagtgtttcaagcggggcgctttacggtgcctaccccagcatcccggaaaccttttcagaagcacttcgactggcagccgatcttgaagaacagcgtgctgatcttgagcgcaagctgtcggtggcaaggccaaaagccattctcatggacaccatttgcggcactgctgatgagctttatgggctgaatgaagctggtcgcattctcggaacgtccggggctgttctgggtgcgctgatggactcgctgggtgatgtgtacgttaagcgcaaatacaccactgttaaccgccagttcctcaagatcttcattgaccgcggatatggcaaaaacgttgtcatcggaaacggacgcaaccaggccaagttcacctttaaaggactttgctttgctgccgtgaagctaattgctgccgggaaaattaccgccagcgccattgagtatgagccgtgtcgtgagcatgtcgaacgtgaaatggaggaatccaaacgtcttcattaa

SEQ ID NO: 199418 - DNA, 189 bp, Klebsiella oxytoca
atgaaatggaccttccggaaagtcaccgcgatgattgttggcctcgccatttttctacttggtggctggatcatgaatctagtgaaactcgtgaacggtggtgatcttcagtttgatgccggaatgacacttgcgcgtgtcgtgggaattttcgttgttccggtgggcagcattctcgggttcttttga

SEQ ID NO: 199419 - DNA, 1683 bp, Klebsiella oxytoca
atggcaaagcaatttatgttgatggaaccaaaaaatgagaattttaatgaattaattggtggtccaaacaaatatattgtacccaggttccagcgagactacgcatgggatgtggggcaatgggaggacttgtggggggatataaatgcacttgatgatgaagggttccattatatgggctacattgtccttcagcaaaaagaacagtatcaacatgaaattatcgatgggcaacaacgtttagttacgttatcgattatagttctggctgcaatgaaagctatcaaaaccttaattgataatggagaggatgtagagggaaacactgagcgactcaatggtataactcaaaactttgtaggaagtaagaacttcgttacgctcaaagtgattaataaattagaactaaatagaaacaataaaagttattttcaaagaatgtcatcgcatttagagactcaaaatcctcgaggtataacatcgactaataaattgataagaaaatgttttgatttttttactaagaaagattttggtagaacaggtgctgatattgctcagttcattgcagatttttcttcgagcatggttttcacaaagataatagtgcaagatgatcttaatgcttataaagtttttgaaactttgaatgcgagaggtgttcaactttccaccccagatctacttaagaactatttattctcaattgtgacaaaagatgatcaaatcggagaagatgaactcaatgatttggacgagcaatggtcagaaatgatcgtccaacttggcgaaagcaatgtttctgattacattagatatcactataactcgcagagaaaaatggtcactaagaacaacctgttttcctctatgagaaagatattaacgaaaccggaagaagcgtatcagtatttaaaatcattaattgactactcacctatctatgcatcattgattaaccctaatgatgcatggtggggagatcaagatgagaaatacagaaatgttttgcattatcttaatggaataaggttattcaatatcaagcaaccacttacgatattccttgctgccttcggtaacttttctcctgaagagtttgttaaactcgtaagatatttatacgtattatctattcgttataacgttatttgccacttatcgcccagcgagcaagagaatatttacaatcaaattgctaacaaagtttataatcgagagtttttaagagctagtcatgtaaaaaatagtgaagaatttaaacgcttgtatcctgatgataattcattctttaatgcttttgagtttcataggatgccaagtaggcaaacggcaaaaaaaatacggtttttactttctgagattgaggggcatttaggtaatcaatgtgattatgaaaaaaccacattagaacatatttgtccttatcaccccgaaaaagaatggtgcgattcttttggtgaaggaattaatgatgtaaaagataggcttggaaacatgattttaatggataaagataacttaaagcgctcatcatttgaagataagaaaaaagaatatacaaaatctggatattttctggcttcaaaagtcactgaatatgcagagtggaatttagaaactgtcaatgattttcagaaatggatgtcaaagcaagctgtcaacgtttggaaggttgattaa

SEQ ID NO: 199420 - DNA, 558 bp, Klebsiella oxytoca
atgctgattggctacgcgcgggtgtctaccggcgatcaaaacctcgatttacagaaaaacgcgctggttcgcgcagaatgtgaactaattttcgaagataccgccagcgggaaaaatgcgaagcggcccggattaaggaaagctattcgccgtcttcgacctggtgattcactggtggtctggaagttggatcgcctcggtcgcagcgtgcgcgaccttattacgttggtatctgaactgcaggagggagggatacactttcgcagcttgaccgattctatcgacacttcgacacctgctggccgcttcttcttccatgtcatgagcgcccttgcggagatggaaagggaattgattattgagcggacgcgtgcaggactggctgctgcacgggctaaaggcagaattggagggcgtaaacgagtgatgaccgaggaggcagtgggaagagcccagagaatgctcgcgaacggggcttcccgccaacagattgcagagatttataacgttggggttaagaccatctacaagtatcttccagtggcccctaagttgtaa

SEQ ID NO: 199421 - DNA, 1245 bp, Klebsiella oxytoca
atgattaacgataatgatgttaaagtctttgcaaaagaaaaggaagaaatgctgatcagcaagctttcttctggcagagagcattctccgtcgagtgcagatacaaggcaaagaaacgaatttgagcgagactatgcgcgcattctttactcttcttcgttccggcggttacagggaaagatgcagctgtttgaagtcgatcctcaaaaatttaaccgtaacagactgactcatagcctggaagtcgcccagattgcccgaagcatcgcatccgaacttgaacttgaacatcacgttgtagccgaactggctgcgcttgcgcacgatattggcaatcctccgttcggccactccggcgaaaaacaacttaacaagattgctaaggacttcggcggctacgagggcaatgcgcaggcactcagaatactcagaagtcttgagataaagcatccatattgccccggcctcaacctcacccaccgcgccattctctctgtggttaaatatccctttaaaaatgaaaatggcaacaaaaaatttctttatgataatgactacaaatacttcacagacttagtaaataaatatgaattagatttgcagccaggtgaaaaaactattgatgcgcagataatggatctgtcagacgaaattgcatatgccgcgcatgaccttgaagatgcactaagccgtagtatggtcagcattgaggatatcgtttatgagtttggaagatccgattacaaagattcaattggtttattaaatgaaataattgaaaattcaaaagccacagcttcgaaagcattcagactaaattcatccgaagagttcgccattatattcagaaaagaattgacatccaatattgttaatgtgcttgttaatgatattactgtcactcagggtgaaaatagcttcaggcaacttgggtttggcactaaaaaaaatctgtcttccggtcttaaagatatcgtatttaaagtcatcatgcgcaaaagagacattaaaagctatgagcacaaagggaacatgattatcacagatttatttaatttctataattctgacaataacatagaatttatatcaccccaactgtatcggacgcttccggaagaaaaaattaacaatgaaataaatcctctttatcaaaaagataaagaacgggcaattgtcgactacatctctggcatgatggacacgtttgccatccgcgagtgggaaacgcattgcagaaaatga

SEQ ID NO: 199422 - DNA, 780 bp, Klebsiella oxytoca
atgcttggtgcatccttccagcaattcacaacagaggcattactggcaagcgcttcgctacgtggaggattaacggctctaaataagtgcaagtatcacgataaaggaagcttttataacgctttcttccaactatcaacggggctggagcgattctttaaaattatatatgtagtgcagtttatgattgaaaatgaatttcataaaccatcatataagcaactgagggagaaaggtcatgatatattggccttacatgagacggccgtggctattgctgaaaattataataatagaaacaacaatgaatggaaactcaacgatgagcaggaattaattctgacaatgctatcagagtttggtaaggaaaccagatactacaaccttaacacgattgttgaagataaaaaaaagataaataatccgcttgaacagtggaacgagatactcaatgcctgctactggaaacacatatcagcaaacaagagggaaaagcttcaaactgaaattattgaatgggctgataaaaataggctttatggatacacctatgattttggactagacggacatattatgactcatattgatcagcgtatgctaaactggaaaattataaaagtttcaccctgcattgcgtctgaaataatatgtatgttgcagccgtactatttttattggtatctctcaggaatgctgtggaactcagagagattcaaaatggtatcaatgaaccgcaagttccatactttcacgaaatattcccgtacttccttctag

SEQ ID NO: 199423 - DNA, 498 bp, Klebsiella oxytoca
atgactgatatcaccgaactggcgctgaaagagaaattcgaagcgtgggcacgtagccagcaactcagtattgcttatggcgactgtggttacgttttttcctcaacagagatggcctggcgtgcatggaaagcagctagcgctgagctggtagaggcgctggagaaggcgcagcaggagcgggaaaactggcgcaccagctttgataacgaacgattccgcgctgataagctcaaagcacacatcgatgagatgaccgaagaacgaaccgccagcatcaatgaattaagccggattattcagaaagaggtgaaagcgaaacgcgaagcagagaaacgcatcgccgagctggagtcccgcaccgtgaaactgccgaagcctattagcgttttgtatcgcagagatagcactgatgcgcatcgcgcaatatacgcatacccggaagcagaagttaacgcagcactggatgaatcaggcatcaaatgggaggctgagtag

SEQ ID NO: 199424 - DNA, 474 bp, Klebsiella oxytoca
atgtcccgacatgacttgatatttgatattcattattcgcattacctcgaaaagatgtttgcgacattgactggccgcatcgaccggttgatgactttcctaattattttgtcgggatgtggtgtttttgtttctatcactggctacgtttggttcggcgcatttatcgctgccttatcggttagccaagttgtttatcaattctcccgctcttcaggtattgcaactgaacaagctcgcttatatctggaactaatcaccgacgaaccttctcttacggatgaggaattactcgcgcgttttaaacatttgcaaaacgccgattcaaaaccctggggttgcttagaattaccagctcagaaaagagcaacgattgttcttggcctaactgatacaaccagggaactcagcaagcaagaggtgtttgccgcaaggttggctggagatctaccgaggaaaaatcccgatggttga

SEQ ID NO: 199425 - DNA, 342 bp, Klebsiella oxytoca
atgaagcatgtaacgctaaaagaagcaaacaaatctcttcgcattattgtgaaagataccggatatgaactccatagcggagccggattcgcagaatacgatgcatttggatgtcgcgggaaggttaatggcatccctgaattctttccggatcgaattgcaattgatggtgctgttaacctgagctctcccgtatgtgacggaagagagctggttatcaagctttccctcgatactgcaccttgccttgaacaaatcgaagctatcaaaaaagctgttgaagaggccgctggtcgcaattcccgaaaggtgctcagatctcttaacaaagggttgatttga

SEQ ID NO: 199426 - DNA, 2085 bp, Klebsiella oxytoca
atggccgacaacgaaaagcttggctcgacatcaccacaggtgttgctgaagaacgcgattaacctggataaattagtcaatgaccgagaatcggagtcattaccggatcgtttcgctgtacttcgccgcacatggttcggcatggagaaggcccatgatcgccagatgcagagtcaggaaaatcgttttgatacattcattgcgagctctggttatgaggtaattggtgattacatcgccggcccgttgacgatcactgagtataaccagctcattcgctataacaacgagctgtataaactcaccgcagcgacagatatcccgtttactacggctggtaatactgacgaaatatggaccagtatcgacgctgcgcattttgtatctgtcggtgatgcagcgcttcgccaaaacctgggttcaagcgaagagggccagggagcgtggctgattgcctatcttgccggtgattctgctgtagccagaacagtcgcggccaggttacgtgattttgttagcctgcatgattactggtccccgaccgatggcactgattatgctccggcactgaacaaagcgctgtctgtttctccgcatgttctgatcccaccaggaaagcattatttaaaatcgaccgtttcccttatctctggcaccaggcttatcggccttgggccgaactgtattttgtcatctccggatgcggtttcggcaagtggggcggaaatgcttaccgtgctcagaactacaggtgcgtctgatattgttctgcgggatttggtaatagaaggtggctgtaacgccggtgtgacgtcaaagcgggctatccgtggagtacggtttattaattgcactgatataaggatgattaactgtgaggtaagtcgtaccggcgactgggctacttcattcgaaaaatgtacagacgtgagcgtggttaattatcggcacagaaaaagcggtggcacgctatacggtggccgggacggtattcatttccttgattgcgtgaattttacactaaatggcgctgacattgagtctggtgacgatatggttgggtgcacgactgagacgcgagatcagaggaatgccgtgatacgaaacgtcattggctattccatgctcgcatctggcgttatcttcaatgaggagggagccacaaccttttcaaccgtagatattctggttgatggtgtcacgattaaatccgggaatgtcgtccgtgacgtcgtgcgcgtacaggggattaatgacgccacaaacgtcacaggagtaacggttcaaaatgtcaaaggaacgggctattcacatggtgttttcatatcaggtaaaaaactgacgcgagtaagcgtgtctgatatagatgtcgtttcaactcagtctcacggggtctatattaacggtgcccagaacatgagagcatctggtatgggcgtcagtcaggccgcagcttttgacggctggaacataacgaattgcagctactttgatgcatcgccccgctctttaagctctcaggggtggggagttcaggttctgaactgcgccaactttacactcaatggcaactgctataataacggagccggcctttttgcagcagccaacggaggaaacgggcgcataaacggatgttcaaattacaatgcaactggcgtttatgtcggcggcagtacaacatcttactatggccttttcaatgatgagacccctactggtcgtgttgaccctgctacagtttgcaatggatacataccaagaaacaggccaagaaatctaaatgctttaagggatgcatatgctgcatgttctttcggtcaaactgtaagcgggtctatttcattgcagggtgttgttaactgctcagtagagcttgtttctgatggcagatacaggattaattttaccacgccctttgaatccacattttacaggccggaaattgttgcacaggcaatgaatcaggatctgatcgtccgcccgattgcgaaagacggcagctactacatgtttgaggttcgtaactcatcgggtgtggcactggcaaacttcattttatgtgaattcaaaaaggcgatttaa

SEQ ID NO: 199427 - DNA, 1593 bp, Klebsiella oxytoca
ttggatgataaaggcaatcaaaaggataagatcaaacgcggccttcgcctggtgctgccggagtatatggttcccacagagttggtctttgtggataagctgcctaccacgcctagcgggaaaatcgatcgtaaagcgttgcttaaggtggatattattgttgaatcatcaacgcagatgccagagcggtctctgacgaaaactcaggagcaggtcagggcgctatgggaaacattatttccgggacgtcacatcgcactgcacgatgattttttcgccattggtgggcattctttgttggccacacagctggtttttctgctgcgtaaggcgttcgattgcgatattcctctacgtttgttatttaatcacccaaccttgtcggctatggctgagtccatcgacggctatattgccagtgaaaaggggcgcgtcgatgccgttgatcgttcctttgttcaggatggatatgaacgtatacattggcaggggtgtgtgtgttcaacccctgggctgacgctgcttaccggggcgacaggatttttgggcatctacctgctgcgttcattgctattggccgggactcaatccgtgctctgcatggtaagagccaggacgcatgagcacgcattggctcgtttgcgtgaaaatgcgttgcgttacggaatcgccgatgagattgatttttcccgggttgaagtttgcctcggcgatgttggccagcgcaatttagggttaagctctgaagcgtatagccgtttggcagagcgagtggacacggtattccatgcggccgcacagattaattttttgctctcttattcttcggtaaaacagtcaaatgtgcagggtacgctgaatattttagctttctgcggttgtggcggacgaaaaacgctgcactatttatccactatcgccgtattttctccacgctatcctgaatcgcctatcgtggaacattgtgtaccggggcatccggaagcactgtcgataggttacacgcaaagtaagtgggtggctgaacgctatgttatacaggccagagaacaaggacttgacgctaacgtatttcgcataggacgtattggcggagatagccgaagtggggcctgccagagcgatgattttttatggcgacagataaaaagctttatccagatgggattggcgccggatccgtcttcactatcaacggacctgctgcctgtcgactttgtcgctgaagcgatagttgccttagcgcgttcagaggctacgcgacaggaaaacttccatattttccatcctcagagcactcggtttgatccggtgtatcgagcgattcgttctctgggttatccgttggaaacgacttctgagggcgagtggttgcaacaacttgagctgtgtgtcacccaggggcgcgaggttgcgctggggccggtcattcatctctttaaagagaatttgttggatactggcgacaacgcttacggtaatccagagacgactaagcgtattgcacaattgggtttgcgctttcctgaactgtcggaggagacattcaaacgtatgatcgtttatttccagcggcagaaagaaatcgtctaa

SEQ ID NO: 199428 - DNA, 558 bp, Klebsiella oxytoca
gtgaacgcatccgcttcgaccgcccacacccccaaagcaagtgcgcccacggctgcgccgccgccggcgccttcgacactcgccggccaggccggcaacgtgccgctgacgcgcgtggcgctggcctacatcgaaccgcgcttcaagctctacctgcgcttcggcgaaccggcgcgcacgctccagctcgaccgctggcggcgctgcgccgtgttcctgccgaacgcggttctgtgccgcatccgttggcaggccaacgactacggcacgatccgctggcagctcatggtgatgcagaccgccacgccgctggacgccgtgcagcgcatccccggcgtgcagccgggcgcgcgtctgctgctgcacgccgaaggcgatgccaacgtgcgcgccgtgctggaacgcatcgacggcatcgaggcgctgggcatcgcagccgcagacacatcgcccgcgtactggcgcacgctcgcgaaccggctcgcagcgcgctcggcgctacccacatacaccgcagaacggcacgccgcctggctggccgggagggcattgccatga

SEQ ID NO: 199429 - DNA, 588 bp, Klebsiella oxytoca
atgaccacgatttccacgaccggccccgtgccgcatcctcgctcgcgcctgcgcgctcgcctcgtgctggcaggcttcgccaccgtcggcctcgctgcgctggcctgggcggcgttcgtgcagcccctgccgcgaatggcctacaacccgtccgacagcgtggcggtcggttggtatcgcatcgaaccgttcgacccgcgcaccgcctcgcggccacgtccgctgtccgtggacagcatcgtgctgatgccgctgcccgacagggccgccatgctggctgcgcagcgcggctacctgccgacccgcgttccgctgctcaaacgtgtgggcgcagtcgcgccacaacacgtttgcatcgtcgccggccaggttcgcatcgacggcgtgccggtggccgccgccctgcctgccgaccggctgggccggccgctgccatccttgcagctttgccgccgtctccaaccgggcgaactgttcctgttgagcgcgaccaacccggcgtcgttcgacagccgctatttcgggccggtcagcgcgttcgccgtgatcggcgttgcgcatccgatctggctggagacacgtccatga

SEQ ID NO: 199430 - DNA, 2004 bp, Klebsiella oxytoca
atgaccgaccgcggcgaccatgatttctgggtgcgccctggcgcgccgaagaaccgaggcaaaggccagggccagagcttcgtttccaaggtgctcaagcaggctggcaaggccagcggcggcaagtcggcggtgcgccgtcctaccgctggcgggagcggccagcacgccggccagcggcccggctcacggcttggacgcggccatacggcggcgcgcttcgcaggcgcaaagctgacccctatgtcacggcgcgtgaccatcaagacgctgctggtcaaccagcgcaacgccagtccgcagtcgctcgccaagcacctgcgctacatcgagcgcgacggtgccggccggaacggcgagccgggccgtgcctacgggccgcagaccgacgaagccgacctcgatgccttcaaggaacgctgccaggacgaccgacatcatttccgcttcatcgtctcacctgaagacagtgcggagctggacgacctgcgcacctacacccggcacctgatgaaccggatggaggccgacctggggacgcggctggattgggtggcggtcgatcactggaacaccgacaacccgcacacgcacctgatcgtgcgcggacgcgacgataccggcaaagacctcatcatcgcgggcgactacatcgcccacggcttccgccatcgcgccgccgagctggcgacggaatggctggggccgcgcaccgaactggagatccagcagaccttgcagcgcgaggtggagcaagagcggtggacgagcctcgaccgcacgttgcagcgcgaggccggcgaggatggccgggtgcagatcgaacgcttcaacgaaccccggctgcaacgccagcgcctgctgctgatcggccgcctgcaacacttgcagcgcctgggcctggccgacgaggtgcagcccggcacctgggccgtccatgcggacgcggagaagaccttgcgtgccctgggcgagcgtggcgacatcatccgaacgatgcagcgggccatgagcggcaagcctcgcgagctggcggtgttcgagccgggcgacgacggccgcactatcgtcggtcgcgtggctgctaagggtctggccgacgagctgcacgaccgcggctatctggtcatcgacgggttggacggcaaagcccactacgtcgcgttggacgcccgcgacgagctggcgaactatcccatcggcgcggtggtggaggtacgcggttccgccgaggtgcgggcggccgacaagaacatcgccacgctggcgagcaatggcctgtaccgcaccgatcaccacctggcgatcgagcaaggccgagccaagcccggccgcgacccgcaagaggctgtggcggcccatatccgccggctggaagccctacggcgggccggcatcgtggagcgcgtggccgaggggttatggaaggtgccggacgacttggccgagcgtggccgccagtacgacgcgcagcggctgggcggcgtggcggtcgaactgaaatcgcatctgccgattgaacggcaggcccgcgtcatcggcgcgacctggctggatcagcagttgatcggcggcggcaagggactgggcgacctgggctttggcggcgatgctaggcaagccttgcagcagcgcgccgacttcctcgaagaacaggggctggcccagcggcgcgggcagcggctgattctctcccggaatctgctggaaacgctgcgcaatcgggagctggcgcaggccgcccagcacattgccgccgatagcggattggagcatcggcacgtcacagacgggcagcgcgtagccggcatctaccggcgctcggtcatgctcgccagcggtcgctatgcgctgctcgatgacggcatgggattcagtctggtgccttggcggccgataatcgagccacgactggggcagcagatcgccgcgactgtacgcggcggcggtgtgtcatgggaggttggacggcaaagaggtcctgggattggatcggggccgtag

SEQ ID NO: 199431 - DNA, 696 bp, Klebsiella oxytoca
gtgaacacttccgccaggatgattcccgtcgctgccgtgactatgacgctagtactcggcttgtccgcgtgcagtgtgcttcccaaagcagctccaatggtcacctacaaattgcccgactatcacatcgcccaggcggagagtacgccgcgcgccgttccgggacccggggcgctgcgcgtctacgcccctgagagtagtcgcgtcctggattcggagcggctgttcattgcgcagcccgatggtcgcttgtcggcttggcaaggagtgcgttgggccgaccccgcaccggtgctgctgcgtgaccgaatcgtcgaagccttcatgcgcgatgggcggtcgacttccgtgattaccgatagcaccccaatgagcgccgatatggagttgcgcagtacgctgcgggcgttccagctcgaataccgcggcactgaagcgatcgccgcggttcggctcgatgtgcaactggtcgatccggccaaacggactgctattgccagtagacgcttcgaagcaatccaagccacaggcagcaagcgagaggccgatgtggtgagcgcgttcggtgtcgccacggatatattggccgggcagatcgttgaatgggcagttcaggtcggggcagcgcgtttgcgagttgcaccggaattggcaagcaaccatgcacccacagcgtcgtcgataagcacagactag

SEQ ID NO: 199432 - DNA, 930 bp, Klebsiella oxytoca
atggaaccacgtgcccatcatgtattcattggtctgttcgtcgtgctgctcggtgcgattggtattggcttcgcgctttggctcagcgacacacgttccgaccacgattaccagtattaccggattatgttcgatgagccagtgaccgggcttacgcccggcagccaggttcagtacagcggaatcacgattggcgaagtcgttgcactttctctttcaccgcgagacccaaggcgggcgatagcgcgcgtacgcatcaatgccaccatcccggtccggcaggatacccgcgctgaattggtcatcacgggaattaccggcaacgcggtgatcgagttgagcgacggtgggccaaacgtgccattgctggatcggagagaggacgaggaaccgttgatcctcgcaccacgttcggcgatggcatccctggtctccggtgaggggaacagcatgacgacactcaacggcatcttgctgcgcacgcaggagttactgtcgaaggagaatttggctcttgtgcaccgcagtctggtgaatcttgaacagaccacgggcgcggtcgctgaccagagggccgagatcgcgacgttaatcagcaatctgaccgaagcaagcagagaatcgacagctgccgtgcgccaagcaaatagcactcttcgcgatgccaacctgctactaaataacgatggtaagcaaatcatggtgaacacgcgtgatgcaacggcatccctcgaacgcgccgctttcagggttgagacgctactgcaaaacaatcaggaatcgctgaaccagggcttggccgccacaggtcctgccatgcacgaactccagcaggcgctggccaatctaaacaccgtgctgcgccgactggatcgcaatccggcgcaatacctgctcggtggagagaacattgaggaaaccaagccgtga

SEQ ID NO: 199433 - DNA, 822 bp, Klebsiella oxytoca
gtgagcgcggtgaagcaagacaccgacaacggtgtgcgacacgctattgaagtgcgcggcctggacaacaggtttggaacccagcaggtccatcaggacctagacctggacgtgcggcgcggggaaatccttggcgtggtgggagggtcaggcaccgggaaatccgtgctcttgcgtagcgtcgtcgggctgcagaagccgcattcgggcgtggtccgtatcggggggcgcgacctactgcgagcccaatggcttgcgcgcgcgcgtatggagcgaaggttcggcattctgttccagaagggcgcgttgtattcatcgctgaccgtcttggagaacgtcgctcttcctttgatcgagcatgtcggtctggcgcggcctcttgccgagcgtttggcaagaagcaagctgggcttggtggggttgcctgccggagcgggagacaagtatccggcctcgttgtccggaggcatggtgaaacgagcagcactggcgagagccttggcgcttgatgcgaacatcctgtttcttgacgaacccaccgcaggactggatccaatcggggctgcatctttcgaccaattgattctgaccctgcgcaatgcactgggcctcacggtgtttctggtaacccacgacctcgatacgctgtacaccatatgcgaccgtgtcgcggtcctggcgaaccagaaggtactcatcaacgacggcatcgaggcagtcgagcgcttcaagcacccgtggatacaggaatactttcacggcccccgtggccgtgcggccgcacaggccactggtgcttccagccaagagacgcagccatga

SEQ ID NO: 199434 - DNA, 1158 bp, Klebsiella oxytoca
atgagcaacgcttcacaggcttggctccggcaggatgccatggtcggcggtgatcacaaatggctggcgggtggcgactggacgatagagcactacgccagtctggcaaaatccgtgtccgccgcccgcatcagtcatgccgaggggtacgccactcccttactcgactggacgcaagtccagagactggacaccgccggcgcggctctgctggtggaaattctcgggccagactcgatactcgaccggccggaggcagctccaaatctgtcctcggatcgcctcgccctaatgagagcgctggccgccgctgctaccgatcagcagaagacggagaaagcagcggtgagcgggaatcctctgctccgcggtctgggacgcataggcctgaccttggaacagggctgtcgtgcgtgtcttggtctggccgggttcgtgggccagatcatcgaaacatggagccgtaccgttcgtcacccgcgtcgctggcgcgcgacctcggtgatcgctcaaatccagcgatcagcggtggacgccattcccatcgtggcgctactgagcttcatggtaggaatggtggtggcgttcctgggagcaacggtgctggccaacttcggtgcgagcatcttctcggtgcatctggtcgccttctcgttcatgcgcgagttcggagtgctgctcccggccatattgattgcaggccgtaccgcaagcgcgtacaccgcccaaatcggttcgatgaaggcaaatgaagagatcgatgcgcttcgctccaacgcgctcgaccccatcgagttactggtgctgccacgcgtgctggcgcttcttgtgtccttgccactgctcaccttagtaggcatcttggctggcattgcgggcggcgccaccgtatgcgcactgagcttggaaattcctcccgcacagttccttgccatcgtgcaggaaaaaatcgaggtgcgccattttcttgtcggaatgagcaagtccccgctcttcgcggtgatgatcgccgctatcggctgccatgaagggttcaaggtcgccggtagcgctgagtcggtaggcgaccacacgacgtctagtgtcgtgcaatcaatcttcatggtgatcctgatagacgccatcgctgcactgttcttcatggagatgggctggtga

SEQ ID NO: 199435 - DNA, 621 bp, Klebsiella oxytoca
atgaagagcaaaactgcattgatccgcggcggcatctttttttgcgtagcaggcgcgctctctggatgcgcgaccaacagcatgacgcgctccggatttctcggcgactacgagaagttatcgccgacacgatacgagaacgtactgatgtaccgcgcagcgggattcgagcccaagcgttatgccgctgtcgtggtggaagaagcgcagatcaagaccgcctcgggtcgcatcgatgggctcgatgacgcgcagcagcgcgaagtgctagaccatgtgacgagcgaactgaaacgccaggaaggcaaaagtcccgcccccccaggtggcgcgggacaggttcgggtgcgtgtagcggtcaccgaactgcagacaccgaatcgggcagtcaatgcaatgacgaccctgctggttggacccgtgacgacgggtggtgccagcctagagttcgaagcagtcgatttaaggacgggacgccgggttgctgccgccagttgcttcgagcgcggcaacgtcattaaagagttcgccggttcgtacacattgctgggtcatgccaaagcggcgatcacgaactgcatcgagcgcatcgacagcgcttggcgggacacgcagccatga

SEQ ID NO: 199436 - DNA, 348 bp, Klebsiella oxytoca
atgccgccccgcgcgaaaacaaagttgccccccccgtccactgcccatagcagcgccgatgcgcagcccggcctccagcaaggagcccagcgaactcgcgaccgcatcctgcaggccgcccgcgaactggtgctggaggaaggtgccagtcgcttgacactggacgccgtcgttgtgcgggccgggttgagcaaaggggcgtttctctatcacttcaagaccaaacgcgatttgttcgtgacactgatcgacgagatgatccgggcgttcgacgcggctatccactgggcctgcgggccatcacggcgggcggtccgatgcgctgggtcggcctctgtgtggcagtga

SEQ ID NO: 199437 - DNA, 1404 bp, Klebsiella oxytoca
atgtctcaaattcttgaacgctatcgcctcattgccatgatttctccgctactgcttcttgcggcctgcagccatgccccgcactctgccgatccacctcgcctggatgtaccggcccatttctcaaatgaagagggaggtgaaggcatcttggacaaatcgtcccgccgtactcttcccgtcgattggtggacggcctacggcgatccgcacctcaatgccttggtccgggcggcgctggagcgcaataccgaactgacgattgcgcgagcgcgcgtggacgaggcatcggccgccacgcggcgagcacgggcctccctgctcccctcgttgtccgcgggcacgcaggcaactcgaggacgcgactattcagagaacgttgcaatcggcaatgatggccgcgccacgttgtccgcatcgtgggaggcagacctgtcgggacggctttcgcaggcagcagaaggtgcgcgcctggatgcggtggcagccgaacaagcgtgggttgccacgcggtggcaggtcgcgtttgaaacagtgtcggcggctgtgcagcagcgccaagccagtgagctcgaagcgctagccgcggcgcggctggcatccgcagaacgactcgtcttgctgatgcaacggaagttcgaggccggacaagctaccggcttcgacatcgagcgtacccgcgccggcgtcgtcgcactgcgcgtggagcaagagcaactgcggcgtgcgcgcggcgaggcgacgcatgcactcgatgtactagtgggacaaacgcccggagcgcctgcagcttccccaactcttgcgtcgctcgccgtcccggactggacaccgacacgcatacctgcggacctgctgagtgagcggcccgacgtgcgcgccgccgaagcgaagttcgccgccgaaaccgcgcgctggaacgcagccgaaggcgaacgcttccccaggctggtgttggacctgagcggcggacggcagcgcgtagagagtgtgggaacccgcatcactggaaacattttttcacttggggccggggtgtcgttgccgatcttcgatggtggcgcgatccgtgccggcatcgagaccggagaggcgcgcagccgagctgcccgtgcggagttcgagcgcactttgttgagtgctttgcaggacgtagagaacgcatatctcggttggcatacgcagcacgcagcactggagcatcaggccgagggtgtcgcagtcgcggagcgtcagctcgatcgcagccgacgtctgttcgaggcgggacaagtggacgccacggtggtggccgaggctgaggccggggtgctgtcagcgcaggcttcgctgatccgcacgcgggccgagacagccatgcaatggggcgtcctggcaaaagcattatccggctctcctgtttga

SEQ ID NO: 199438 - DNA, 921 bp, Klebsiella oxytoca
atgaggaatgcgaacatggaaattcgacacctgcgctactttctggcggtggcagaggagctgcactttgcccgagccgcagagcgcctccacatagagacatcgccgctgtcgcgcgccatcaaggaacttgaggaagagttgggcgtagcgctatttgcgagaaccactcggagcacccgcttgactcgtgcgggcaggctcttctttgagagcgtgccgcgtgtcttcgcagctttgcagcaggcgcgcgacagtgtgaacgccgcagccaatggctttcattgccagctccgtattgcattgtctgatggaatcacgccatcgcgcctgcctgcgttgttggcgctctgccggcaggaagagccggaagtggaagttcgcttcttcgaggtgcctttggcacagcaaatcaagggattgtgtggcgaactgtacgatctcggcttcgctcaatcggatgaagtcggcgaaggcatcatcgccgtgccggtgtggagtgaccctctgatggtagctgtgcccgcacggcaccccttgctatcccacaaacagattcccctagaagagctgttgcggtatccgctggtgctctgcgacgcggtggcgtgtgagggccatgctcggcaagttgaacgggtgctacgtcgcgtggacatagagccactgattgccgaacgcgtgacttccagcgatctaatgatggtcctggtttcggcgggacttgcactaggcctcacaggaggcgcgcatatcacagccagcagggaacagggggtggtcgcacggccgctgactggacgttcgccaatgctcacgacctatctactacggccggccagcgagccgtcagaaatgctgactcgcttcatggaacgcgttcattcgatcaaatctccagatgccaaaggtcggcggtaa

SEQ ID NO: 199439 - DNA, 318 bp, Klebsiella oxytoca
atgggttggatctatcttgttttggctggattgtttgaaatcggatggccggtcgggctgaaaatggcgcaagagccaacatcgcgttggagtggggtcgcagtagccgtctctttcatgacaattagcggcgccttcctatggcttgctcagcgtcagataccgattgggactgcttatgcggtgtggacgggtatcggagcggcgggaactttcttagtcggaattcatttctatggcgacccaacctccctgatgcgataccttggcgtggcgttgatcatcctgggcgttatcacgctcaagttatcgagttga

SEQ ID NO: 199440 - DNA, 237 bp, Klebsiella oxytoca; identical to SEQ ID NO: 149275

SEQ ID NO: 199441 - DNA, 531 bp, Klebsiella oxytoca
atgagcaagcaacagaacgccatcctctggcccgaaggctacacgccgggctttactgagaatttcgcctccaatgagatcatcgccgccggcttgagcgcggccgacgtatggcctctactcgtcacaccatcgctgtggccaagctactacgccaactcggctaacgtgtgctttcatgacggcaaaggcccggtactggccgacggcgatcggttttacttcgagaccttcggcttcccggtagaggggcagtgcaacgaatacgtgccacctgcggatgggcaacccggccgcgtggcctggcacggctggtccggcgaggaaggcacagatacgcgcctggatgtgcatcacgcctggctggttgagaacctggacggcaggcgcgtgcgcatcctcacgcaggaaactcagaagggcaaaccggccgaggagctgcacaacgccaaacccaacccgatgatcaacggccatcaggactggctcgacagcttggtcgaggcagcgcgcaaagccaagcaggcgtag

SEQ ID NO: 199442 - DNA, 906 bp, Klebsiella oxytoca
atgaaaaatatcaagagtatggatctcaacttgctcaaggcgctggacgcattgttagacgaacgcaatgtgacacgggcggcggcccgtctgggactaacccagccggccttgagtggcatgctgacgcggttgcgcgagagcttcggtgacccgcttttcgcgcgctcgcagcggggtatcgttccaacgcagcgggcgctggatctagggatgcctgtcaagcaggtgctcgccgaaatcgacgcgctgctccagccaccttccttcaatccggccaccgcacaactgaccttctccatcgccgcgacggactatgcgctgcgtgccgttgctgtcccatttctatcggcacttaaacggcacgcaccgcgtgtacgagtctcattagtgccagtcgagagcgggcagctacagaaccagcttgagcgcggtcagatcgatttagccctcctgacgccagagatcactccgccaaatctgcatgcccgagagctgttcaaggaacactatgtgtgtgtcctgcgggaagaccatcctgcggctatggggcgcaagctgaccgttaaacagttctgtgctctcgaccatgcgcttgtttcctacgatggtggaggtttccgcggcgtcaccgacgatgcgctagaacagttgggcaaacgacgcagcgtcacactgtcggtcaagagctttctgatcttgccagacatcctgcgtgccagtgacatggttgcgatcttgccgagccgcttggtcgccggtatggacaagctggctatctccctgccgccggtgaagataccggggttcaccaagacggctgcttggcacgaacgcacccatcacgatccagcacatcgctggatacgagcactgctgttcacttcctgtgctaacaacaagtag

SEQ ID NO: 199443 - DNA, 1998 bp, Klebsiella oxytoca
atgcaagggacgaacgttctgttcggccagatcgctgtggtaatcggcatcgtgatcgccggcgtctggggcgccacacaatggacagcagcgacccttggctatcaagtacgcctcggatcgccctggttcgatcttctaggtgtaccggtttatcacccgtggcgcttgttcgaatggtggttcttctttgatgcctacgcgccgcacgtcttcgacacaggcggtgcgattgcgggtggtagcggtttgttcgctttactcgtcgccatcgccatgtcggtatggcgttctcggcagtcgcggctggttacgacttatggttcggcacgctgggccgatgccgtcgacatccgcaaagctggactgaccctcccggcgggcgtcttcctcggccaacacgacgaccaatacctccgacatgaggggccggaacatgtcctgagcttcgcacccacgcgctcgggcaagggcgtgggcttggtggtgcctacgttgctttcgtggccggcgtccgccgtcattcacgacattaagggagagaactggaagatcacggcgggctggcgttcgcgcttttcgcactgcctgcttttcaaccccaccgataggcagtcggccgcctacaacccgctgcttgaagtccggcgcggcgcacatgaagtgcgcgacgtgcagaacatcgccgacattctggttgaccctgaaggtgcgttagagaagcgcaatcattgggagaagaccagccacgcgctactggtcggtgcaatcttgcatgttctgtacgcaggcgaggacaagacgctgcgcggcgtcgccaacttcctcagcgacccggcgtgtccgttcgagctgacgctgcaccggatgatgacgacgaagcacctgggcgatgcgcctcacccggttgtcgcatccgctgcccgcgaagtgctcaacaagtcggacaacgagcgatcgggcgtgctctccaccgccatgtcgtttctcggcctgtaccgcgacccgaccgtggccgaagtcacatcgcgctgcgattggcgcatcgccgacctgatttccgccgagcacccggtatcgctctatctggtggtgccgccctccgacataagccgcaccaagccgctgatccggctcatcttgaaccagatcgggcggcggctgaccgaatcgctcgacggcagcgatggcatcgcgcgccggcacaagctgctgctgatgctggacgagtttccggcgctgggtcgcctcgattttttcgagtccgcgcttgccttcatggccggctacggcatccgcagctttctcatcgctcaaagcctgaaccagatcgacaaggcgtatgggcagaaccattccatcctcgacaactgccatgtccgggtgactttcgccaccaacgacgaaaggacggcgaaaaggatttccgaaaccctcggcaccgccaccgagcttcgcgcgcagcgcaactacgcgggccaccgcctcgctccgtggctggggcacctgatggtgtcgcgtcaggaaactgcacgtccgctgctgacgcccggcgaggtgatgcagcttccacctgaggacgccgtagtcatggtgtccagcgttgccccgatccgcgcgaagaagctgcgttactacgtcgacgccaatttcaaggatcgcgtcctgccaccgcccgtgctcgcagtcgggaggtacgccgacgcgccgccagcccgccccgacgactggagcggcttggcgatcccggccgtacctacggcgccgacctcggtatccgccgatggtccgggcggcaccgatgacggcggcccgcgccgccagctcgaactctccgaaaccgtcgcctacgagcccgagttggacgcgtgtgcgaacgacctggagctgctcgatgacgacgacctggcgctcccgcttcccggccagctcgacccggccatgcagcgcacggcccggctggcttctctcgaccccaacgacggaatcgacctatga

SEQ ID NO: 199444 - DNA, 477 bp, Klebsiella oxytoca
atgagccaataccgcctcaatcttttcatccagcccgagcacgccaagcgcctggatgaacttgccgccaagaaaggcgtgtccaagtcctccatcgtcgcagcggccttggcgtcctggctgtcacccgatgcgggcgaccagcgtgaggccgccattgccaagcggctggatcgactgtcgcggcagaccgaacgcatggagcgcgaccagaacatccagatcgaaacgctggcgctgttcatccgctatttcttgaccatcagcacgccggtgccagaagcccacaaggacgcggcccgcgcccagggcaaagcgcgcttcgagcagttcgtcgagcagttgggtcgccacctgctgcgtggccgcagtctggtgcgcgacgtggtggaggaactgcaccccgatccgatgcggatggatgacgcagcagcgatggcgtccgccgatgagcgagctgcagagcgtgcgtcatga

SEQ ID NO: 199445 - DNA, 1071 bp, Klebsiella oxytoca
atgagtgccgttccgcagattccgcctgaatctcgctcatccgccgcggcgtcccaggatcgccgcatccagatgctgcgcacggcgatggggccgctgatcgccgctgcgctcgaagatccggatgttgtggaaatcatgctcaaccccgatcgcaccctgtgggtggatcggctgtcgtcgggtcgctcgccgctgggcgtggagatgcccgaggccgatggtgaacgcatcatccgcctggtcgccgcgcatgtcggcgcggaggtgcatcgcggccagccgctcttgaccgccgagttgccggaaaccggcgagcgtttcgagggcatcctgcctccggccgccccggggccagccttcgcgctacgcaagcgggccgtgagcatcatcggcctggatcgctacgtggccgacggcatcctgaccgccgggcaggccgagttcctgcgccgcgccgtgcgcgagcggcagaacatcctgatcgccggcggcaccagcaccggcaagaccacgctggcgaacgcgctgctggccgagatcgccgccacaggcgaccgcgtgctggtgctcgaagacaccatcgagctgcaatgcgcggcccgcgaccatgtgccgctgcgcacccgcgccggcgtcgtcacaatgaccgagctggtgcgggccacgatgcgcctgcggcctgaccgcgtgatcgtcggcgaagtgcgtggcggcgaagccctggacttggtgaaggtctggggcaccggccaccccggcggcattgccaccatccatgccggctccgccttgggcgcactgctgcgtctggagcaactgatcctcgaagtggcagtgaatccgccccgcgccctgatcgccgaggcggtcaacgtggtgattcacatcgcaggccgtggccgcaaacgtcacgtcgaaaccatctcccgtgtcgtcggcttcgacggtgcgggctatcgcctgacagatgcgctggaaacgccgtttcccgagctgccgccggttcctcttgcagccgctgccgctgcgccttcctcgacccctgaccaacctggagaactgccatga

SEQ ID NO: 199446 - DNA, 387 bp, Klebsiella oxytoca; identical to SEQ ID NO: 117516

SEQ ID NO: 199447 - DNA, 270 bp, Klebsiella oxytoca; identical to SEQ ID NO: 117517

SEQ ID NO: 199448 - DNA, 2451 bp, Klebsiella oxytoca
atgctgaaccttgccgaatatcgtcagcgcccggccttgcttgccgactggctgccctgggccgggctggtcgcgccgggcgttgtgctgaacaaagatggttcgtttcaacgcacgttccagtttcgcggccccgacttggacagtgcgacacagggcgagctgattgccacgtcggcgcggcagaacaacgcgcttcgccgtaccgggtctggctgggccttctatatcgaggccgagcggatgcgggcatcgagctatccgcaatcctcctttcccgaaccactgtcctggctggtggatgaggagcgacgcgcggcgttcgaggagtcggatggccatttcgagagcgtctatcacttcacgttgcaacacctaccgccgcaagagtctcgcgcccgtgcggctgggatgctgtacgagaaccggcccactgagggtgtggactggcgtggtcggcttgattccttcgtggcagagaccgatcgcgtgttcgacctgctcgatggtgtgatgccggagattgcctggctggacgatagccagacgctgacctacctgcatgccacagtctccacgcggcgctatcgcgtcggcgtgcccgacgtgccgttccatatcgacgcactgctggccgatgccgcgctggtcggcggcctggcgcccatgctgggcgatcagcacctgcgcgtggtgtcggtacgaggcttcccgacctcgacctggccggggatcttggacgacctcaaccgcctgggctttgcgtatcgctggagtacgcgcttcctgtgcctggacaaagccgaggcggaacgggaattggggcgcttgcggcgccaatggttcgccaagcgcaagaacgtcatcgcgctgctgcgcgaaacgatctttcagcaggaaagcccgctggtcgataccgatgccagcaacaaggccgccgacgccgatgccgccttgcaggagctgggcagcgatcaagtcgccttcggctacctcaccgccacggtgacggtgctcgacgccgacccggccgtggccgacgagaagctgcgcatggtggagcgcgtcatccagggccggggtttcgtgaccatccccgaaaccctcaacgcagtcgatgcctggctgtcgtccgtccccggcaacgcatacgcgaacgtgcgtcagcccatcgtttcgacgctgaacctggcgcacatgatgccgatgtcagcggtatgggctgggccggagaagaacgaacacctcgatggcccgccgctgatcgtcacccgcaccgatggcgcgacgccgttccggctggtgacgcacatcggcgacgtggggcacacccttgtcgccgggccgaccggcatgggcaagtcggtgctgctcgccatattggccatgcagttccggcgctacttcggctcgcggatcttcgccttcgacatggggcgctcgatgcgcgccaccatcctcggccttggcggtgagcactacgacctcggtgccgatggcggcatcgccttccagccactcgcgcgaatagcccacgagggctaccgcacctgggccgccgaatgggtggagggccggctgctgcacgaaggcgtgacggtcggcccggacgagaaggctgccatttggtcggcgctgcgaagccttgccggtgcgccagtggagcagcgcaccatgaccggcttgtcggtgttattgcagtccaacgcgctgcgccaagcgctcgcgccctatgtgttgggcggcgcccacggcaagctgctggacgctgaccacgaccggctgggcatggccgacgtgcagggctttgagatggaagaactgatgcacagccccgccgccgtgcaagcagtgctgcgctacctgttcgcccgcttcgacgaacgttttgacggcgcgcccacgctgctgatcctcgatgaagcgtggctgttcctcgatgagccgtccttcgcggcccgcatccggcaatggctcaagacgctcagaaaaaagaacgtcagcgtcatctttgccacgcagtcgctggccgacatcaaggactcgaccatcgcgccagccatcatcgaaagctgcgcgagcaggatcttcttacctaacccgcaggccaccgagccgcagattcgcacgatctacgaaggcttcggcttgaacagccgccagattgagatcgtggcgaccgcacagcccaagcgcgattactactaccagtcgcgcctcggcaatcgcctgttcgacctcgacctggggcctgtcgcgctcgcattcgcgggcgcatccacccctcaagaccaacgcgatattgaccgcgtgctgacgcaggccggcgctcccggcttcgccggcgcgtggctgcgccatcgcggcctcggctgggccgccgacctgctgccgtccgctccggcggcagcttcctttctcgcttctcaaccgctggaggtttcaccatga

SEQ ID NO: 199449 - DNA, 744 bp, Klebsiella oxytoca
atgaagaccaagccccgtttgctctctgtctcactcgctgccgtgctgtcggtatcgctgctggccgtgcagcccgcatccgcgctgacggtgttcgacccgtccaacttcgtgcagaacacgctgaccgccgtgcgcacgctggaacagatcaacaaccagatcaaccagcttcagaacgaggcgcagatgttgatgaaccaggccaggaacctggcaaatctcgacttcaacatcgtcaaccgcctgcgctcgacgctcgccaccaccgagcgcctgatcgccgaggcgcgcggcttggcctacgacgtgcagagcatggatgccacgttcgcccgcctgtacccggaacagtacgccgccaccatcagcggcgaccgcatggcacaggacgcccgcgaacgctggcagaacaccttgaacggcttgcacaccgcgatgcggatgcaggcgcaggtgtcgcagaacctcgcccaagacgaaagcgcgctggccgatctcgtgagccagagccagtcggccaccggcgcgctgcaagcgatgcaggcgacgaaccagctcctggctttgcaggccaagcagtcgatccaggcgcagcagctccagatcacgcaagaccgggccgcttcactggaactggcgcggcaagcggcggctatggagcgcgcccgcgaagtgcggcggcgctttctgggcaccggcacgccgtacacgccgcagtccgtcaacttctataacaactga

SEQ ID NO: 199450 - DNA, 327 bp, Klebsiella oxytoca
atgcgatgcgcttccgtcctgatggccgtgctgctgaccgcgtgcggccagcagccggccgagaacctggccgacgccctggccgcagatccggtgcggctcaaggcgttgcgcgggcaatgcgcggccgaccggcaggccgtgggcgaggatgcctgccgcgccgccgctgaagccttccggcggcgcttcttcgccggccataccgggccggatgaatacaactcgctggctgaactcccgccgattccgccgagcttcgatacgcccgcagatgaattgccagagggcgccgttccgctcactccgcccgaggattcgccatga

SEQ ID NO: 199451 - DNA, 1368 bp, Klebsiella oxytoca
atgaacgacgtgaccatcatcgaccgtttcctcgatacgttctcgcgctacatcgactcgggcttcggcttattgcagggcgaagtggcatttctcaccgccacgctcatcgtcatcgacatgacgatcgctggcctgtattgggccatgagccacgccaccggccagggcgacgacgtgatcgccaagctgctgcgcaaggtgctctgtgtcggcgcgttcgcctacatcatcggcaacttcaactggctggcgagcatcgtgttccgctcgttcgccggcttgggaattaccgctaccggctcggccatcacgatggagaacttccttcagccgggccggctggcgaagaccggcatcgacgcagccgcgccgattctggaacagatcggggacatggctgggttccccgaggtgttcgtgaacatcgaccctatcgtggttctgttcatcgcctggctggtggtgatcctctgcttcttcgtgctggccgtacagcttttcatcacgctgatcgagttcaaactgactacgctcgccggcttcgtcttgatcccgtttgcactctggaacaagacctcgttcctcgcggaaaaggtgctaggcaacgtggtgtcgtcaggcatcaaggtcttggtgctggccgtcatcgtcggcatcggttcaggcctgttcgccgagttccaggtgcatcccgacgaaccatccatcgaccacgcgctggtcgtgatgctggcctcgctcgcgctgctggcgctgggcattttcggccccggtatcgccaccggcctggtgtccggtgcgccacagcttggtgcgggcgcgatggctggtgctgcggtcggggctgtcggcaccggcgttgccatcggcgccgccgtaacgggcgtgggcggcgccgtcatggccggggcacgaatggccccggcggccgcaaagctggccggtgccggtgcgcgtgccgcgacttcggcggccggcagtgcccgatcggcgttccaggccggttccgctgcggccggcggcggtgccaagggcgcggcggctggcctcggcaatgtcgccaagactggcgcacaagccgcaggccgcagcgtcacctctggtgcttccgctgttgggcagaaggtggccgactccttccgcgctggctggaacggcacagaagccggcagcgacggtgctggccccggccagaccgcagacggcaccgcaggctcgcagaagcaacagcaaccggcctgggccaagcggatgcaccgccgccagcaggctacccatgccgcgaccactgccgcccacacgctgcgcggcggcgacggcggcggctccgggcaaggcccgagcctgcgggattccgatacctaa

SEQ ID NO: 199452 - DNA, 705 bp, Klebsiella oxytoca
atgcgattcaaacgaccgcaggtgcgctacgccgatacgccgcagcctgccaccccgtatcaagccgccgcccaggtgtgggacgaccgtatcggctccgcccgcgtgcaggcgaagaattggcgcctgatggccttcggctgcctagtgctcgcgctgttgatggccggcggcctggtgtggcgctcggcgcagtccatcgtgacgccctatgtcatcgaggtcgatcaagccgggcaggtgcgcgccgtgggagaggccgccacgccgtaccggcccggcgacgcgcagatcgcgcaccacctggcgcgcttcgtgacgctggttcgctcgctgtccatcgaccccatcgtggtgcggcagaactggctcgatgcctacgactacaccaccgacaagggcgcggcggtgctcaacgactacgcccgcaccaatgacccattcgcccgcatcggcaaggaatcggtaacggtgcaaatcaccagcgtggttcgcgcgagcgacacgtctttcaacgtgcgctggacagagcagcgctatgtcaacggtgcgcccgccggcaccgaacgctggaacgccgtgctttcgaccgtcctgcaaaccccgcgtactgaacagcgcctgctcaagaacccattgggtatctacgtcaacggcctgtcatggagccgcgaactggattcttccgaaggagccaaaccatga

SEQ ID NO: 199453 - DNA, 993 bp, Klebsiella oxytoca
atgaaacttcgtttccgcctttacgttgttcctttgacgctgctggccctcgcgggctgcgcctcgcaggggaagccgccgccatccatctcgctcgacgagacggtgctggcccagccgttgcccgaaccgcccaagcccgtcgaagtcgtcgccgtccctgaaccgctggcgctgccggcgcagttgaagcccctgccggaactcgatgaggcccccgttgcgccggagccggccgacgaaaaggtgcgcgtttcccgtgccaatgcagaagcgcgtatcgcgcctacccgtgagggctacgtcaacgcgattcaggtgtggccgttcaccgatggcgcgctttatcaggtctatgcgtcgccggggcgcgtgacggtggtttcgcttcaaccgggcgaggaactggtaacggtcgccgccggcgataccgtgcgctggatcgtgggcgaaacgtccagcggcggcggggccgatctgcgcgtcaatgtgctggtcaagcctatccgctccggtctgaaaaccaatctcgtcatcaccaccagtcggcgcacctacctgctggagctgacctcgaccgagagggcatggatggcgtcggtgtcctgggactatccgaaagaccgaatgctcgcgttgcagcgccaggcgcaggcagcgcaggcaacaacgcctgtcgatacgggcctgtcgctggacaagatccgcttccgctacgcggtatcgggcagcaacccgccgtggaagcctctgcgcgccttcgatgatggagagaaggtctatatccagttcccgccgggcatcgcccagggcgagctgccgccgctgtttgtcatcggcgcgcagggcgacgggcaactggtgaactaccgttttcgctcgccgtactacgtcgtggatcgcctgttcggcgcggccgaactgcggctgggcggcgatggcggcgacgtggtgcggatcgagcgcaccgatggtgttgcacggaggaactga

SEQ ID NO: 199454 - DNA, 1281 bp, Klebsiella oxytoca
atgagccaggatgacactcccgaccttgccgcgccgcaggcggacaaggtggcgccggaggcagtggcgctgcgcgcccagccgcgtccagtcacacgcctgaaccggcgctcgctggccatccttgccggcgtcctagcggtcgccgtgctcggcgcgatgatgtggtcgctgcaacctcatcgacgcagcacaggcgagcagaccgagctttacaacgtcgatcgcgtgtcaaagtcggaaggactggatgcgctgccgacggactattccaagctgccgccggcgttgctgcctgccgttcccgaactagggccaccgctgccgggcgatcttggcccggctatcgtgaagtcgcagcaaccggcgacggctgcctacgcggcccccggtcacgacccgaacgatgccctgcgaaaagaagccgaggcggccgcggcctcgtccgtgttcttccgctcgggtgggcagaatgcggcgccggtagcgcagacacaggtggccgctgcgccgggcttcgccgccaatgcggcgtttgacccgctggcggccgggccggcctccacggcggcccaacctgctgacccgacagcggtgcaaaaccggcaagaccagaaagaggctttcatgaaagctggccccactgaaacccgtaattccggcaatctgactctgccaatttcgccgtatcaggttatggccggaacagtggtcgcaggtgccttggtgacgggcatcaagtcggacttgcccggcgacgtgatcgccacggtgacggagccggtctatgacacagccaccgggcgcttcctgctgattccgcagggttcgcgcatcctgggcaaatacaacagccaggtcagctacgggcagagccgcgttcaagtcgtctggaaccggatcatcctgccggacacgtcttcgctcacgctcgacaacctggccggcaccgacccagccggctatgccgggctggaggacgatgtggactaccactggggccgcatctttgccggtgcggcactcaccacgctgctgggcgtcggtgccgagctggccgcgccggagaaccggcaggatggtgatcgcgtcatcatcgctgggcgcgacagcgcgcaggacagcatcaatcaggtcggccaggagatgacccggcgcaacctcaacatccagccgaccttaacgcaacggccgggcctgccggttcgcatcatcgtcaaccgggatctggtgctgcggccgtaccagccgctgttcttcaaccgggggacttcacgatga

SEQ ID NO: 199455 - DNA, 246 bp, Klebsiella oxytoca
atgagcacgaccaagaagctgcggctcggcccgctgccgaagaccgagagcaccaagctgactttcgtttgcccgaccagcttgaaagtcgacctcgaccgctacgccgcgctacacgcgcaggcgtatggcgaggccgttgatgcggcgacgctgatcccgcatatgctggaagcgttcatggcgggggatcgaggattcaggaagggcacggcgacccgcagcacaccaccgaagccgccatga

SEQ ID NO: 199456 - DNA, 1182 bp, Klebsiella oxytoca
atgaatagccagccagtaaccagacggtttgcagacaacgatctccatcaacaattgtctacggttaaagttaatgacaagcaactgatgcgcctcatccgctatttttctcacctgaaataccatacggctaagacgtatctccattggctgcgttcctggaatgagtggtatcaggcaaatgcaggaaaggaggtgaacgaagattggcccgccagctctctcccggtgactgaaactccactgctggcctatttagaccatcttcagaagtcactgtcacgaagcagtattaaagggtgcctgcatgccctgaacagtatccaaaggaaagcactcgatcagcctgggatcatcacatctgaagtgggttatattcttgcggccctcgaacaggctgaagcccgaaagcagaaagttacccgccaggctacgccattcatggtgacggatctaaaggcattgattaaagcacacagtacgacgcagtcggtgcgcaaactccgcgacctttgcctaatttggacagggtttgaaacactgcttcgctcagcggagatcaggcgaattcggatggaagaccttgtgctggatgaaaagaccggcagctttaccttgacggtataccggacaaaatccactgtcagtaccctgctcacctatcatctgacccctaacctcacagccacactgagaaggctgatgggtatggtcggaagggatcaatacagccatccgaaggactatctctttcaggccgttaactttcaggataacggatatatgccacctgaatggggtttacgaagccagggtaacgaaatcaatgcgctgctgagaaaccataacatgccctatctgcctacccgaaccccgctcgggggaaatggcgaacccattcccgtcgaggatgagggtatgcttagtaagaacacgctactccgggcctttgaagcgctttgggaagagcttcatccgcaggaaacgggcacccgatgctggaccggtcacagcgtccgcgtaggcggtgccatcgaacttgctcatgccgggtatacgctcttgcagatcatggagatgggtaactggagcaacgcggagatggtttcacgctatatccgtaacattgaagctggtaaaaaagcgatgacgcaattcatgcgcggagcgctggatgagtag

SEQ ID NO: 199457 - DNA, 330 bp, Klebsiella oxytoca; identical to SEQ ID NO: 144578

SEQ ID NO: 199458 - DNA, 909 bp, Klebsiella oxytoca
atgcaatggatctccactaccagccagaagctcgatgagagactttatcgtgtctgtgtctgggtgaaaaaataccacgaggacgctattaaccgtgttgtattgacggtggatctcagtaaagcccgacatgacccgggagaggataaggtacggtccgagttactgtgtggccattactttctcatgaggaaggaaaacaatgcgaaatcggcgccagcggatcaaaactttgaatttttacctgacggccgcaacctgagctggcagacgtcgaccccggggcttcagcagcttctgctgaacaataatgtaccggagtccctcaggaccctggctgattatattcacatgcgtctgaccaaactgacaatggtcccgatgtcgggaaccataatgaaagctgcacaggaagacagtatcagctgggtgaaagtggatctgcgatatttctggcagtatgaactggttgattcccatctgggacctgtccaggtgtctcataaggcgcttgtgcgttttggccgtctggctaaacacgatgaaaatgccagcgctattcgtatgcttcgccagcggttgtcatcaccatttattcaggaatatgagatgcctgaggaggagctgaagcgtaagcaacagatcatgaataccgccgatgtgaaaatgctttttcatgctcattatccggggcagaaattgctgttggcccggtatgccaatggctgggtgctggtggattgtttcctgttccaccatatcaaacccaaaaagaaggcgaaaaacaaaaccaaagcaggcaaatcagaaacacaaaatataaaaacgacggggagtgaggatcatggaactgggcattatggtgtgcatcgtgttgttactctcactggcagcggtgtggatcagtaa

SEQ ID NO: 199459 - DNA, 960 bp, Klebsiella oxytoca
atgtccagtgaaaatttacctttctaccgtgatcggattctggagcgaattgaacagctcagagcctttctgaataaccatcagccggtgatggcggaactgatgactgtgggggccgtcacgcgccacgaagagcggctgaaagaggttaccccaattgaggtgagtactatttctgatgcctctgtagatgacattatccgtgtatttcaggatttttgtatcgatgacatcgatgtactcagcaggaattcaacgaaagtaacgaccaaatatccggggctgattattgttcctgagggtgccgaactgctgagcagaattattcgcgatatcaacgacgccaaaactgactttgcctcagctatgaaaagggtaaatgatgagaaacacatccgctttgaggaagttcaccgtaaacttcccggccttgtgacagtggcgtctactcgcaaaattatgtttgtggaggcacggcttaaaaaagttactttttgctggcgactaaaccggaaccaggtaaaaaccaacgccagtgagctcatcgcgatgctggataagcgtcgtacggcagcggtcaaatcgccagcgaccactgacctgacagtggttgcgaacatcgatagggcgaaggcattacttgaaagaaaggtcctacaagacggggatgcgttacgtctttgtcggaccaataccttcccggttccgatcgcgcatctgttctcataccgtcctgaaggcacggagcgtggaagtagcaaatacgccgagacggattacaaggtggtgaaagcctcactgcccattttcgctgttggacaaaagccagcatttaaaggtcttcagaactgggtgcctgcgtcggatgacgcaccgtcaaatgcacgaaggatcaaccatagctacacggagcttgtacccggtgcggatcttggcattttcattatgagtaaggtctga

SEQ ID NO: 199460 - DNA, 609 bp, Klebsiella oxytoca; identical to SEQ ID NO: 144575

SEQ ID NO: 199461 - DNA, 447 bp, Klebsiella oxytoca; identical to SEQ ID NO: 144574

SEQ ID NO: 199462 - DNA, 537 bp, Klebsiella oxytoca; identical to SEQ ID NO: 144573

SEQ ID NO: 199463 - DNA, 258 bp, Klebsiella oxytoca; identical to SEQ ID NO: 144572

SEQ ID NO: 199464 - DNA, 672 bp, Klebsiella oxytoca
atggctgtatgggacacgattgctgagggctttataaaggcaggcgtccgattttataacaatacgagacacaagcacctaatgatgactgaatcgttctatgactgggttgtgtactgcatcacgggcgtaataatggcgtcggcgctcctcgaaggaaaaagaacccgtttcccggctgcatttttttacggaagcattgtgcttctggttgttttgattgtggccggtggcctgaactggtggttttaccggtcaaaattcggctcagtcgtcgttatttttgctgctacaacactgttaatgacccgattcaggatggtcatttatgcgctcaggtttcggtcgctggttgcaggtctgcaatcacacgttaacaaggggttcaggataatcctcgttttacccgaaaatgaggacgagaagatcgtattaatgagcatgttgtctaaaaaaatacccgcaggcgcgttgttttatacccaaactgctctgggtccatattcaggggatctactgcatgcattgggacaaaagcatcttatgggcgaaggttacctgcttctctgtgagcaacaacttcctgcccgaacctggctaagcactgtggaaaacggtgaaccagagacgtctcttgcagtcaattttcattcgatccctgatatggagtga

SEQ ID NO: 199465 - DNA, 270 bp, Klebsiella oxytoca; identical to SEQ ID NO: 144570

SEQ ID NO: 199466 - DNA, 957 bp, Klebsiella oxytoca; identical to SEQ ID NO: 144569

SEQ ID NO: 199467 - DNA, 936 bp, Klebsiella oxytoca; identical to SEQ ID NO: 144568

SEQ ID NO: 199468 - DNA, 921 bp, Klebsiella oxytoca; identical to SEQ ID NO: 144567

SEQ ID NO: 199469 - DNA, 936 bp, Klebsiella oxytoca
atgaaaattatcgagaaaatcattaatgcatttctgatgtcacgcaatcacgctgtgaaggtcagcaatgttatctgcttaactggttgtgacggtaaatttactggtatacgttgtgacgccgatgtttcatttgattttcttcattcgtatgctaacgcatacagttcaatatttttagatatcccgttccctgggttcgaagaccagaacattacggattgtgttaaacgtcagttagatgtagtgaaaaataaacagaatcggtctttctttattgaccatattagattcccggttactgtcaaggaaggattcactctacagcgcggtggtagttacgacgtgactgatagtgaatataacaagcaacgattgctgcatttaactcgacatggacgttttggtgaagactatctcacgtacaaagaaggactgagtcccttcttttcatttgtgaatgtagaattacatgaaactatgaaggaaggtattcgtttagcacttgatgttttaaataagataacaactgaccaacctgaccgtcttataaaggactttaaatatcatgactgttacaatagttataatgttcaaatattttgtaaggggttgccagttgatattctggaaacgatgatcgcacctgactttttgtcatctgacatgtctggtagtcgtcagatcatcaaaaatgcacgccgctatcttaaaggctttgcccacagtaatcgtgtttacatgaagtacggttggcgcttagcggatatcgacacgtctgattatgctaaagtcatgtcagataaagaaatgcatgccagagatgatcttaaaatgttttgcggtgtctttgttaaagagtgcttcgcatccggaaaagatgaatacgaagcctaccttcaagaaagacaacacgctattcgttacgggtattaa

SEQ ID NO: 199470 - DNA, 879 bp, Klebsiella oxytoca; identical to SEQ ID NO: 144565

SEQ ID NO: 199471 - DNA, 525 bp, Klebsiella oxytoca
atgaaaactgaaaatcaagacttatttaataagtttgctgctgtgatttcatctcgtatcgttgagcaaccatcatcatgctattatcttcatgatagtgaagttgaccttacgattttaaaacacagcataatagataaggacaaaaacctgttgtatgtaattcgcccttcaggtacatgtttgttacgctgtgataaatatttttttccgaattactatcttacttgtcgtggagattataaagcattcatttatgtgcattttaatcttgctacaggaaaagcggaagatatcacgtggcaacaagctttagaagttttgtccaaaccgggaaggcccccattgagaggttctcttggaagatttgattatttaaaacttgtggttgatgatcttcgtacccgtggttatgccgattttctaccggcatataatctggatggacttcgtcattttgcagtaaaggatgagcgaccatctcttgtcagttatatcgacaatgtcatggctctttgcgcataa

SEQ ID NO: 199472 - DNA, 1332 bp, Klebsiella oxytoca; identical to SEQ ID NO: 144563

SEQ ID NO: 199473 - DNA, 222 bp, Klebsiella oxytoca; identical to SEQ ID NO: 144562

SEQ ID NO: 199474 - DNA, 2013 bp, Klebsiella oxytoca
atgaaatttgatttgaaatcttcaccccgccatattcaacgcctgacgaatatagccagcgtgataagcggtataagtggtcttaatgttgtaatagacaataaggtacatacaccttatttcaacagcgaaaagaatgtttgtgtattacctaatggtgattatagcgatgagaaattcgtcaagctaattgaagggtttatatgtcatgaagctggacacggtcgctatacagaacatgaagtataccgtgaagcttttgttggggaactgattaatgcagatggcttcatcagtatagatgataagctgaacgctgaatttcaaacccttaaacaaaagaaaatcgcatatgcccgggcttaccgtctacatggacttattaatctctttgatgatgtccagatggaagagaaaacgggtattgactatcaggaggcaaaaaagcgcctcgcggtaagttatgccttgatggttgaagctgggcgaatgacggttgatgtttcttcaagccctcaaaaccctgttcagtttattgaaatgttcctgcttaatacattgcgggttaacgttctccagcaagaagggcataaagaaacgcttgatccatttttcgattatgcaaagaaaatccttgagcctgtaattttagaagttgatgagattattcatcaggctctaagttgcaaaagtacgcaaaattgcgattctctggcgcgtaaaaccttggctcttttagagcgtttacgggatgaagccaaagagaaacagcaagaagaggatcagaataaagacccgcaaaacgacacagacaattcatctggctctgagaatgaacctgattccgaaaccaatggtgacaaccagggtgaaggggatggagattccgaagagcaagacgatgatgctggtaatggtaaagcacctatggaagataatgagccgtcagagcaatctaaaggggatgaagaaagtgctgagagcggtaacggtgaacctgatggagagcccgaaaccgatgaatcggctaaccctgactcgtatgatgctgacggaactccttcccaaatcgacagttccaatggaaatccttccgatggggaaagtaacttttctcctgagcagtggagtatccttgccaaattgctggatgattttcttaacagcgatgaggaaagtgaagattttcatgaggctcttgcaaatgaaatctccgtaattgctgccagtgtgtcggatgaggttaaagctgaatttggtgcaaatgagtgggatcttccagatttgcttattgatctgaatgtctacaatgaagcattaaatatcagtcagactcttggggcagacttatctgttttacagcaggtaaaaatgcgtggtcaatttaaaacccgtgatagaggcttgtcattcgacattaatcgattgatccagtctccgatgggtgtgagggatgtattccggtcgcaaagcgaatctaaaaaccggggccacgtcggcttggttattgttcgtgatatttcaggttctatgattctggatcaccgttatatccacgcaattaagactgaccttgcattaactttggcgattgaagctaattcaaaaatgcacgttgctaatgtgatttatccgtttgtcgacaaagactttgaagttatcaaaacgtttgatgaaaacgcggaagagacgctttcaaaattttcactcggctgtaaagggaataataccccaacgggttccgccttaatggctgctgtagaattgttacttgaaagccagtttgacaggaaaattgttttccttattactgatggttatccgacagagtctgattacaccattagtgatgttcttacggtagctgaaagtaacggtattgaaatcgctggtgtaggcattaaaactgatgagttaattggttttgatgagggcaccttcgtaaatgttgatgatatttctttactgccgaatgtggtcagtaaattagtacatcaaattctatctaattaa

SEQ ID NO: 199475 - DNA, 1128 bp, Klebsiella oxytoca; identical to SEQ ID NO: 144560

SEQ ID NO: 199476 - DNA, 1053 bp, Klebsiella oxytoca; identical to SEQ ID NO: 144559

SEQ ID NO: 199477 - DNA, 1251 bp, Klebsiella oxytoca
atgactgcagagatcatagtaaaaaatcctgtagcttgcgcattagctgcagactcggcaatgactatgacaggtggcaatagtggcactgtaaaaatatttaataatgcagaaaaaatctatcaattatcaaaaaattacccagttggtttgatggtttataacaatgcagacttttgcggcacaccatgggagctttcgattagaagttttagaaaacttcatgggcatgaagaacacggcacaatcaaagagtatttaacatcttttcttaatttcttgagctctgcttataatattacatctctcgataaaagagaggcgcgacttaaggaaatgtttagaagatatgttaaaaatacttatgatgacttaagccaaaaaacacttcaccttaatttaccggaatcagatgacgtagctcttgcagttatacatcaaagattaactgattattatttatcagaaaatgaagctttggaaagcaatttattcttcgagggttttgaatcatcagatttaatcgatgcaagagcatttgcgaatattcattatcttcaaatcgcaatcgatatcttgcccaacaaaggtgatttaccagatgctctaaaataccagttattagagttctttgcatatataatttgcaaagagaatgtaacatcaatgtatagtggccttgtttttgctgggtttggtgctgatgagtactatgcttccatcgttactatacaaatatatggtagcttcaacaacaaaataatgtacaaaatagtacatgggaaatgttcagcgtctgacccagataactcagcaatcattccgttcgcatcagaggacgaggtttttacttttgttagaggatttaataactcaataattaatttcatggggaataccgtgtctcaattatcgaacgttattcttgaaaatcttagagaaaaaggaacaaacgatgcgatatctgaacagaaattaaatactttaaaagatgatattatagaccgcgtacaaaaatattgtgatgaaaactttacccaaaaagtcactaacatgttgacttcattatcaaaaaaagacctctcatacatggcagagtctttagtaaatcttagtgcatttaagttaaaaatatcagattcttatgagaccgtcggcgggcctatagatgtagctataatttcaaaaaccgatggttttgtatggattaaaagaaagctttacttcgataaaaaacttaacaataattga

SEQ ID NO: 199478 - DNA, 816 bp, Klebsiella oxytoca
atggtgggctgggcgggggtccgaaaggacgccggtatccgtttaggccggtacgccaactccgttcagttcaccaccagtaattggcgttgcggtggtgataactctactaagcggggtatcacaatgaacaccaaaccttccattttcaacttcgaatccgattcagctattcgcgccattatgattgacggcagcccttggtttttcgcctccgatgtatgccgagcaataggcatcgcaaaccatcgtgatgcagttcgtaaacttgatgacgacgagaagggagtcggctcaaccgacacccttggcggcgagcaggaatcagtaatcatttccgagtctggcctctacacccttatcctccgctgccgcgatgcggtgacgcctggtaccatcccttaccgcttccgcaaatgggtaaccagcgaggtgctgccgcagatccgcaagaccgggcgctacgttcgcgaagaactatccccggcggataaagcgcgcatgctggcgcaggagatgaccagcaatatgatgccggccatcatggatgcgctgcagattgagcagaagcactataactacccgctgaagtcaacctatcgcgatcatatccattcaccagaaggcgtgatgggactgacgcagaactcaatgctgatgaagctactgcggcaactggacgctgacgggcatgacgtatcaggtgcggcggcagaggtgactaccatgtttagttatattgtcggtgtcggtacttgtctgcgagatatcgagacgcacgcgcagtatgtgatgacgagagcgaagggtttctga

SEQ ID NO: 199479 - DNA, 459 bp, Klebsiella oxytoca
atgcatcaaacaaaaaaagctggccctaaatttatgccagttaagtactttaagactaatgttccgcttcagacccatgtcactaataatgggacttacatcattattcatagcggtgtagcgagtgaagataaagtagaggcattaaaaagacgttacatttctcacgccccgatggctatgcatgattataacggcattcataaatgccatgtaatttataatcttggagattacacagcgacctcttcgcttgaagaggaaataagaaaaatggctccttacagtttaaagatactggagtctgttgaataccagcgtgaacctgcccatcaagcgactatgtttatgcgagaagtcccgaagatgtcgatagagcagtctcacgccctgtctcgcaggatgtttgcccgtaccgccgaagacatggctcaggaactctacgacgatgcagaatag

SEQ ID NO: 199480 - DNA, 501 bp, Klebsiella oxytoca
atgcagaatagataccagggattggttcaccctggtatcttcaggaaggaccctgacttaatccccatcaaagatgctttcatagaccactggcgatatgggcatcacaagcaattcggtaaagacgtcctgtttttggatcccgaagatgcgcttaaatatcatctgcgccatgtccatcttgatatcggtaactacactgaaaaattcggcgaaagcggaactaaggaatgctggaccaattgggcatcaggcaaaaaagacaagaccacgggtaagcgtaagaagacgcctaccagcgatgtctatgttgtctaccttgtgacgtcggaacgtcacgcattcctcattgattattgggacgagcccgcccacaagaaggctgatatggacgcagaaatgataaaaatcatagatgaatgcgatcgtatcttacgccttaagaaactggaatcgatgccccgcgatgctaacctttgggatcctgaattccttgtttag

SEQ ID NO: 199481 - DNA, 852 bp, Klebsiella oxytoca
atggaaaaaataaaactgttttttggtattgtgctttcaatggttgctgtaaatgttactgctgccagctcatcacaatgcaacaaaaataactttgatatgtgcaaaaattgcgagcaattatcaagggctatcgacttaaaaaatcctaaccacggtgaatattatcgaggagctttatggaatggtctttatgcctcctacgtaattaactgcccttctgtcgctgaaaagttgttgagtcatggtgctatcccatcctatggtggatacatgggtgcaatgggtccagtgcttacggggaaatggccacataataatgaggctataaatctctcatgggctgatttgcttataaaacatggtattgatgttaatcagcatacaggggattataaatcagctactgaagtatgggctttaaatgaaaaacaaatcgaatataagtcagtgtttgaccggctaatacaatccagtgaggtaaagccactcgatccttcaagaaatttagaatggtgtgcatctgaagggtatagatcagttgtcgtttattcccttaatttatgcataaaaaactccataaaacgcttggatgatggcgtttcttcagcgtcggatatttcttccgcagccctaacctcatgtgctagtgaagtagaaaatttcaagaaacatgttgcatgtaaatcagctgttaaagagacttcggataaggagagaagcgacgtttaccatctattgaccagtgatagtcaaatgaacaaaaatgttattgatatgttgaaagaaagaaatattgaaaaagttcttgagttcagagctgaaaataggtcaacgaaaaactcacagtga

SEQ ID NO: 199482 - DNA, 3390 bp, Klebsiella oxytoca
atgccgacgtatgaacaggatccgaaagagttgcttggcgagaatattcagcagatagcagcgccagacgacagcaatttctatatggaaacgccttctttgctttccgccgtaaacccctttaccagcgatcagcgcgttcagcaatccaggcaagcggctttccgcatagataactccttgggtagttttatcgccagcgcgccattcagccagtttgacagggttgaggggtataacccatacgataacgatgcggcagatattaaaggctatgaggactttgctgattcgtttatcaacgctggatcaccagaagaaacgcttgcaattaagcatcgaatcgaccagcaaataagtgacagggaatatctatctgaagttggtggggccgggactatatcgagccttgctatgggcatgatagatccggtgaacgtggcggccatgttcattcctgcgggggcggtagcgcgtggcggaagtattgcggagacggctgggcgctttgctctggctaatgcggccggcggcgttgcctcagaggcgtcactgcaggccactcaggagacgcgctcaccgatggagagtgtgtccaacgtcgctgttgatgctctcgttggcggtattcttggcgctggcgcgcaggttctcgccgggcccgggcggcgcgctgccgtggttaacgccgtcggtgaaaatttgcggggtatggatgcccctcaaagcattggtgccgctaaggtttttaatactacgcttgatcaggaacaactggccggactcggccttgctaacaaaactctcagtgttaccccggccggtcgccttgcacaatcaccatctcttgtctcccgccagattaaccagcaactggcggagaacaactatttcttcgctaaaaatgatgtggggctggctacgtttacggcagccgagacgaagattaagcagtacgacgccatgctctacaagcagatggaaactacccgcgacgcttatcagcagtacagcaaatctgtcagcgccagcggcgcgaagcggataaactttgttgattttaatgaagctgtgggtatggcgatgcgccgcggcgatcaaagcgatattcctgaagtagcacaggctgcagccagaatacgccctatcttcgagacaacaaaagtccgcatgcaggagcttgggatcctgcctgaggatgtcgatgtcgtgacagcgcaaagttatctgccccgtatttataaattcgacaaaatcctttccgacagaacggagttcaggtcgaaaattgctaactggatgcagagtattagcgctaaggccgccgggaaggccgaagagcgcatcgaaaagataaatgcaggtctgaaggccgcagaggaatcagcgccacgcgcagaggccctggctggagaaattgccgaagccgagaagtggtcgggcaaaaaaatactcctgatggaagagcttgataagcgcaataaagcgatcgcctcggaagcggaaacgcaggcgcgccttgacaggatggaaagagagcttacgcgcactacatccgaaatgatccaggccagaatgatgaaagagagttctgaccttaaaactcgccttgacgagatagcgcaggcgaaacaggaacttcctgcctatcagcgccacatggagttgctggataatccacggaaatatcgctcggagcttcgccggctgcaaaagcgggcaaattcaaccacaaggctaaatgccagccgcgagcgggcattgaaggagatggagccgctttccagagaagaggcagaggacgccgccgacgagatcgtgaataaaatagtcggtgctccatccggccttgttccttctgacatcataccagaaaggctcgttgggcgtgctggcttcacaaaaagccgaacgctgcttattcctgatgagcgcatagaagattttctggagtcagatgttaaccacatcatggaaagctacctcaggcaggtggcgccggaaatcgagctgactgcgcagtttggccgcaaggatatgggggatcaggtacgtcaggttagcgaagaatatacgcggctaatcaaagaggcgaaaactcctaagcagcgtgctgcgctcgaaaaacaacgtgaagcagatatcagggatataactgcaatgcgcgaccgccttctcggtacctacggcgccccgcaggatcctcgcagtttcttcgttcgggccgggcgggttgccaggaatgttaacttccttcgcctgcttggcggcatgaccgtcgccgcggcaactgacctgatgcgaccgatgatgcagcatggcctgcgtaagtctctcgcgccaatggccagcatgctcagaaatatggatgccgtaaagatagccacaaaggacctgcgtgaaatgtcggtaggcctcgagtacgttctttctacgagaaccaaagccattgccgacctcaccgatccctacagccggagaactgcagctgaacgaggcctgaactggatgacgcagaaattcggcaactggacgctgatgaaccagtggaatagcgcgcttaaatcctggtcagggatgatagtgcaatcccggatccttgacgcttctcgtcaggtttctgccggcggcacgcttgctaaagatgaaatgcgtaagatggcccaggtcggtatcaatgaggatatgctgcgccgcatcggtgagcagttcggtaagcacggcgaggatatggatggacttctaaccggccacagccacttgtgggacgatcgtcacgttagggagatattccaggccgcggtgctgaaggatgtcgattcggtgattgtaacccctggcgtgggcgatacgccgctgttcttcagtaaagaggggtggaaactgatcacccagttcaaaacgtttatctttgctcagcataacagggttctggtatctggtattcagcagggcgatgcttcattctatcttggtgctcttggcactgttgcgctgggctcaatggtctatatgatgaagcaaaagcttagcggtcgcgacatcgattacagctggaataaccttgtgaaagaggggatcgacaggggcggcatgctgggatggctgtcagagccgctgaacacccttgaaaatgtaagcggcggcaggtttggtcttggcgcgatgtttggggcgccgccggtatccaggttccagagccgtaatgctattggcgctttgctcgggccaacgttcgatctgggcggtgatgctgctacggtggcgaatggcgttcttaatggggagtttgacagtacacaggtgcacgcagcacgaaaaatgctaatgtatcagaacctgtgggctatcgccccattacttaacgaagtcgaagagcagatgaaatag

SEQ ID NO: 199483 - DNA, 2745 bp, Klebsiella oxytoca
atgccaacagtaccgcagtatcaacgccagagccagacgcagaccgcgccggtgatgaccagcaatcttcgtgtcccggagaatccgctggtgcagggcatccagcaggccgccgacacgtcgatcaacatgatggccgatgctaagcgcaaggccgacgtcgcactcagccaggacgctctgctgcagtttaatcagttcggtgatgaccagttcaacaatcctgacaatggtctgataacgaagcagggaaaggctgcgctcgggcaaagcgacgtcgtcatgcagaacatgcagcagaaagcgcaggacctgctggggacggttccggatggcgaggcccgccagcagttatcttttcagttgcagcagtcgatgcagtcctaccacaaccaggcccgccggtatgaagtagggcagttccagcagtttcaggatcaggcgtttacttctgggaactccctggccgtaactcagtccaccggtctttataacgataacccggccttcgtggttcttgccaaacagcgttttgatgccattgatcagtatgctgatgctcatggcatgcctgatgaatggcgcgtgcagcagaaaacgcagctgaaggagcagatggggcaatcggcctgggtcggaaatattgctcaaaaatacagcgaactacttcaaacaaacggcgaaccaggcgatcttgatggtgttggccgcgttgtggctcacgataactctggcgcagccaggggcctgaggaataacaaccccggtaatattgaagcaggttcaaacccctgggaggggcagacggggagtgatggccgttttgctacttttgcgacgcccgagcatgggatccgcgcgctggggaaaaacctgctgtcgtaccagcgccagggatacgacaccgtgagcgagatcgttaatcgatatgctccttccagcgatggcaataacaccgaagcttatatcaaggcgctgtgcagcgctcttggtgtgggagctaatgacccgcttgatgtgtccaaccctaaaacccttgcagctttgtgtgccggtattgttaagcatgaaaatggcagtgtcccatacagtgctgaccagcttgaaactggcgtgtcggctgcgctcgggttaactaaccttaagtcgccaaagcgctatacgggcaatgctgcctttgacgctatgagtcctcagatgcaaatgcaggcattgaggcaggctaacgagctgaataaccagtatcggcagcagtatgcgcaacagcttagctctgtagtgaaggacgcgtattccgctttagatgaaggattaagtccggcacagctaccgtctgaggctgactttatccgggcgaatggaccgcgtgtcggcgccatgaaatggcaagatatgcaggctcagatacaatatggcggcgtcattggtgccgcaaaagacctcaccccagaaggccggcaagacattcttgagcgacttcgccctcaggatccaaacgctcctggctttgcatctaaccagcagcgctgggagaaaatggagggcaaatttaagcaaatggatacagagtggcaggcgcagcagggacgcaaccgcttagtttcatccatgcaaaataacttcccactggacccgaacgacaaaaataatcaggcagcggtagaccgttactttgctaaggatgttgcgccgtcgttttcgatatctgatccacagagcatcaatgcgctggccaccgtcacaactaaaagcggcatgataccaacgcaggttaaaaccatgcttaacagcggagcaacctcaagagatcccgcgctggttgtcccgatggcaaaattctacggccagttgttcgataataacccggcggccgcggcaacccttgataaggggacgatggcattttacggcaaggtttacgattattcccgtgcgggcgtgccggaggataaggctgtggacatggcatttagccaggtattccagcaggatgaccggatgaaacagatgctttccactgccatgcgagacaaaaaatatgtcgcagcacggacaaccgctgcacaaaataacgccagcagcctgacctcctttggttcgtggtctccggatattaccgatcccggaaaatcaaatgcggcctatcagcgtgattaccagacaatttacgatgcaaactttgcacagactggcggcgatgcagaccaggctgagaaaatgaccaacgccatgatcagaaccacatggggcgtttctactattaatggtagtgcagaggttatgaaatatgccccagaagcgctttatggggtgaacagtggatccggtaactggatagaaggtcaatggtatcaggagaaaaacgagcttaaagctaaagcttttggtggtgctcgtagcgatactgatttggttatcgttcctgatggtgtcacgccaagagataaaagctatgcggtcatggtgagacagaaaaatcaggacggttacgatgatgtccatccatattacggtgaaaatggtctcccagttcgttttaaaccagatcagcagacttcaccgatgtacaaacagaccatgcagtatcagcagcagagagtcgatgaggccagagagaagagagaaggcaacccgttgccacagttcagcaacaacgaagggtatacgccgccagatctgactaagccctttggctatggttcagctaataaccttccaagcaatatttacgcagggggcaaataa

SEQ ID NO: 199484 - DNA, 561 bp, Klebsiella oxytoca
atgtgtgaaccagctaccgcagcactagccgtaaccgcagttgctggcggtctcagcgcttacagtcagattcagacaggccgcgctaatgccgcgctggcgaacgctaacgccgacgctcaggagcaggccgcccgcgacactatcaatacagccaatgaccaggcataccagcagcgacagcaggcccggcgggttgccggtcaacagactaccgctctggcggctaacggcgccgacctgacaagcggtaacgcattggacctgacaactgaaaccatgcagcagggcgctctcgatgcgctgaccaccatcaataacggccagcggcaggcggcgggactccagtttcaggccgataccagccgcgcgcaggggaaaatggagaagcaggccggggttatgggagcaggtgcgacgctgcttaactctgcgctaaccggcgccagtgcctataaaacgttgggtggaaccagcctgagcggctcgctgatgaagaaatcgacctctaccggtggattcggttctgcctggaataactatctcaccggttcgctgtaa

SEQ ID NO: 199485 - DNA, 471 bp, Klebsiella oxytoca
atgcgcaaggttgagatactccgcgttactgacgagcatatcagcgccatccttccccatgtccgccaggctgatcatgatgagtttatggctgcagccggtatgactccggcggaagtcatctctcgcgccatgaaaagcgcctcggtcgccgcagccgggcttattaacggacaggtggtaaccatcttcggtatatctccggcatcgatcatcaccgggcgcggtattccgtggctggttagcaccgacttgatggagcagcaaccgctgacattcctccgccattgccgcccggtattgcgtgacatgtcacgcggatatcgcgtgcttgaaaattacgtcgatgcccgcaaccacgcagcaaaatcatggcttcactggatggggttcaccctggcagatcctgagccatacggattgatgagaatgcctttccaccatttcattaaggaaatagcccatgtgtga

SEQ ID NO: 199486 - DNA, 2478 bp, Klebsiella oxytoca
atggcctattcactgattcaaccctcgctcgccggcggtgaaatatctccctctttgtacgggcgcatcgatctggaaaagtatcagacatcactgcgccgctgccgaaatttcatcgttcgtcagtcaggcggccttgataaccgcccgggatttcggtttctcggtagcgcaaaatatgcagatcgatactgtcgactgatcccgtttcagttcagcgtcagccagacttatgctctcgagcttggcgactactattttcgtgtctggtctgatggcgcgcttgtaactgatggcggttcccctgtcgaagttgccacgccgtggcctgttagcgtcatatctgagctgaagttcacacagtcagctgacgtgatgacggtatgtcacaacgattatccaccactcgagatccgccgctatggtgaggcagactggcgcaccgccgcggtgaccacaaccagcggaccattccaggacctgaacacggacgactcggtcaccgtgtatgcttccggtcgcaccggtaccataacattgaccgccagcagctccattttcaaaagccaacatgttggcaaactgttctacatggagcagaaggcggtagatagcgtgggccgctgggaaacggataaggatatcggaacgggagatgagtgccgatatcaggagaattattatcgctgcgttgatggcggagctaacggaactaccggcacggtagcgccgacgcatactaccggcgactcatgggatggatggggttatggtggccgcaatggtgtgctgtggcgctatctgcatagtggttttggcgtgtgtcgtattactgctgtcgctggggatggattaactgcaacagccgacgtcgtgccgcgtcaggatggtgagatcgagctaccggcgcaggtagttggcagcacttttgcaacctacaaatgggcgcattatgcttggaacgacacagacggctatcccggcaccgtaacctattatcaacagcggcttatcttcggcggaagcagggcgttcccgcagactatctggtgcagccgtaccggtgattatcacaacttctaccgcagcaacccgaaggttgatgatgatgcgatcacctataactacgccgggcgccagctgaacaaaatcctgcacctcctcgatgtaggccagcttatcgtgttgaccagcggcggtgaatttaaggtgacgggcgacagtaacggtaacctgacaggtacgggtggctttgcgatgtccggtcagtcattcaacggcagcagcgatctggctccgataaatgtcggcagcgtggcgctgtacgttcagcagaaaggctccatcatccgtgatctgttctactcattcgatcaggacagttatcaatcaagtgacctgacactgctggcaaatcacctttttaacggatacagcatccgggactgggctttgtctgtgcagccgttcagcgttgcatggtgtgcgagaagtgacggcatgctgcttggcctgacttatcttcgtgagcagcaggtatatgcctggcatcctcaccctatgacaaacggctatgttgagtcgatctgcagcatcagcgaagggcaggaggatgcggtatatacactcatccgccgttcggtgaatggatcgacagttcgttatgttgaacgtctcaacagtcggcaatttaccgatcagcaggatgcattcttcgttgattccgggctgtcatatagcggagaaaataccgactctttgcgcacaatgacgatcagtaccgctggtggatgggcatatcaggatgagctgaccctgacctgcagcactgcaattttcgattcctccagtaccagccaggaaattcacattccgtatacagaggacggaatcagtaagtcgatgcgcataagcattgcagaggttgtgtcctcaactgtagctaccgttatggttaaccgcgatgtaccggcagcgctgcgcaatagcgcgcaatccacctggtcagtcgcgcgcaagacgttcgccgggctctctcatcttgaggggcagatggtaggcattctggccgacgggaatgttgagccgcagcaggtggtttctggcggagaagtaacgatagaaaatcatgcctctgtagtgcatatcggattaccagtagccgcaattctcgaaacgcttgatgtgaatgtcgctggccagtcaacgctgttggataagaccaagctcatcaatcaactttgcgtgatgctgaacaacggccgctcagtgtgggccgggacagacgaggagcacctgctggagtatacgcaacgcgagtgggaattctacgatgatcctgtagggctgaaaaccggcatcattgatatgaatctcgacgcaaactgggaacgaaacgggcgcgtcgttatccgtcatgatgatccgcttcctcttggcattcttgccatcatcccgcgtgtaacggtaggggggtga

SEQ ID NO: 199487 - DNA, 612 bp, Klebsiella oxytoca
atggcatcagtgatcaacatctgcaatattgcgctggcgcgcataggcaatagccggacgattaatagcctcaccgaaaggactaaagaggcttatacctgcaaccttttttacgaatcaatgcgtgatgcggtgctggctgacaacgactggaattttgccatgtctcgcgtcgtcctagccgaccttggcgatccggcgcctggctggttgtttcgttatcaatacccgactgactgcgcgcgcatctccgccatattgccgaagtggtttacgggctcttttattgcactcaaggataagcctgtttttgaggtcggtagcaatgaagatggaacctcccgcgtcattcataccaatgaatcacaggctactctgctttacgttcgcagcattactgatccaatgatgtttgatgcgctttttgctgatgcgctttcgtggcgcatggcagctgaaattgccatgccaatagcggcaaatgccagccttggacagcaggcgatggctaactatcagcaggtgctcacagcagcaatgcagcgctcgcttgatgaagcgcacgaaccagaacagccgatatcagaactcgccagcgtgaggatctgctga

SEQ ID NO: 199488 - DNA, 279 bp, Klebsiella oxytoca
atgcctgagtataaagtcgctaagcggtcattcatcaatggccgcctgcatgaaccgggtgacatcattacctttgacggtgagccgggcagcaacctggtatccgttgatgcctccctgagtgaaaaggttgtgacacccagcgctgaagaactaaccgagctggaggatttgcgcaaacagtatgaggagatgttcggtgaagcaccgcatttcaatactaaagcggaaaccctgaaggcgaagatagcagagcggcgaaaagaactcggggtgtaa

SEQ ID NO: 199489 - DNA, 393 bp, Klebsiella oxytoca
atgctgctcgaccagcaagcgcttttttccgcagctcaggccattacggccacggctgcatcgaccaacgtcattgataccggcagcgcaaaagatgtcggtaaatatggcgatatcccgctgctgatccaggttgttgaagcgttcaacaacctgaccagcctgaccgtcaccgtgcaaaccgatgacaactcggcattcagttctgccgcggacgtgctgaccatgacgatcccgctggcgtccctggtgttgggatacaaatcgcctgttatcacgttaccgatgaagatggagcgctatatccgtctgaactacacggtaacgggtactgcgccgaccaccggcaaggttaccgcgggcatcactggaggcgtgcaaaccaatgcctga

SEQ ID NO: 199490 - DNA, 1008 bp, Klebsiella oxytoca
atggctttaattggtcagacgctgccttctcttcttgacgtgtacggacgtaccgacaagaacgggcggatcgctaaaatcgtcgagcaactggcgaaaagcaacgatgtcattactgatgcgatctacgtaccgtgtaatgatggctctaaacacaaaaccaccatccgcgccggcatccccgagccggtatggcgccgctataaccagggcgtgcagcccaccaaaactcagactgtgccggtaaccgataccaccggtatgctgtatgacctggggtatgtggataaagacctggctgatcgttctgccaatgctgaatcattccgggtatcggaaaacatgggcaagctgcagggcttcaacaacaaggtttcccgctacaccttttacggcaacaccgacgctgaaccggaagcatttatgggtctggctccgcgcttcaacaccctgagcacttccaaagcggccagcgcagagaacgtattcagtgctggcggcgcgggttctaccaatacatccatctggttcatgtcatggggtgagaacaccgcgcacatgatctacccggaaggtatggttgctggcttccagcatgaagacctcggggctgacctggtcagcgatggaaacggcggccagttccgcgcgtaccgcgatgagtttaaatggcatctcggcctgtcagttcgagactggcgctcaatctcgcgcatctgcaacatcgatgtcactaccctgaccaaagatgccgcaacaggcgccgacctcatcagcatgatggtcgatgcgtactatgcgcgtgacgtagcgatgctgggcgatggcaaagaggttatctactgcaataagaccattcatgcctggctgcacaagcaggccatgaatgcgaagaacgttaacctgacgatcgacgaatatgctggtaagaaaatcgtttctttcctgggcattccgatccgtcgcgctgacgccatcctgaatactgaatcagccgtaacggcgtaa

SEQ ID NO: 199491 - DNA, 441 bp, Klebsiella oxytoca
atggccccggaaggtacggaactggactcgaaagccgttgagctcttcgagccggtggcgcgtgaacttggcctgtccaacgaccaggcgcagaaacttgccggcctgtggccgcaattgcaggagcagatgcagcagcggcaggcagagtcatggggccagcaggtagaaaaatgggccgctgacaccaaggccgacaaagaaattggtggcgaaaaactaacggtgtccgtaggtcatgcgcagaaagcgctggataccttcgcatctaaagaattccgcgaattccttgattcaacgggcctgggtaatcacccggaaatggtccgggcattcgcaaaggtaggcaagttgatgagtgaagacagtttcgtcactggccagggtaacggatcgccgaaaaacgatctggtcgaagcgttttatccaagcaaaaaatag

SEQ ID NO: 199492 - DNA, 183 bp, Klebsiella oxytoca
atggtggagctgctccagcagcatctgaaccttccccggcccctgcggctgcgcaatctgaaccggcgcaacaaccagcagcagatccagaaccatcgccagctgatggtgataaaccagatccgactggcgataagcctgaaccggaagctaaatccgaggttcctgagaaatacgaactaa

SEQ ID NO: 199493 - DNA, 306 bp, Klebsiella oxytoca
atgactgattacctgagcgatgaagagcaggaagcgctgctggcagaagaggccaaaaagcagaatttgcgacgtgataacgagcttaacgacctgcgcctcatctgtgagacagagcatggacgccgctttatctggcgtctgatcgagcagtctggagtatggcgaacaacttataccggtgaggcgctatctgcagcgttcgccgaaggaaaacgtaacacggggctaaaagtcttttccgacgtaatggaggcatgtcccgatcagtatctggtaatggctaacgaagccagcgaggaataa

SEQ ID NO: 199494 - DNA, 1680 bp, Klebsiella oxytoca
atggctgacctctctccgaagcagcattacctcaagcaccttgggcagctcaaaaacgagcgaaccagcttcgaggaacactggcgcgaactggcggaatttatcgatccgcgtagcacgcgctttctgacgtcggagagaaataacggcagcaaacgcaatacccgtattgttgaccctacggcatcaaaagccgcccgcacactgcaatctggcatgctttccggcattaccagcccaacccgcccatggttcaaactggcaacaccagatccagacatgatgaagttcggaccggttaaacgctggcttgatgtcgttatgacgcgcatgaatgacgtcatgaaccggtcaaacgtctatcagtcgctgccgattatatatcgccacctgggagttttcggtactgccgcaatggccgtgctcgaggatgacgaagatgtgatccgtacccacccattgccgattggcagttactacctgtcgaactctaaccgcctgtctgttgataccacatatcgtgttttctccatgactgcccgacagattgttatgcagtttggcctggacaacgtcagcaatgcggttcgcggcgcctgggataatgcgaactatgagtcgtggttcgatatcgtccatctgacagaaccgaacataaatcgcgacagcggcaagctgaatgctcgcaataagcgcttcaaatctgcgtacttcgagctggcaggcgatggtgacaagatgctcagtgagtcaggatttgatgagtcaccaattctttccccacgctgggagatcaacggtgaggatgtttacggcagcaattgccctggaatgatggcgctcggcacaggtaaagcgctgcagcttgagcaaatccgcaaggctaacgcgatcgacaagctggttaacccgccaatggttgccccgacagggctcaaaaaaaagctgatcaaccttgctcccggcggtgtgacctatgtcgatgaggtggatgccaacaagctggtaagaccggcttatgcagtcagcccacaacttggcgacatgctcgccagcatcgccgacgaccgacagatgattgaggcgtgcttcttctctgacctgttcaatatgttcagcaccattaatacccgcagtatgcctatcgaggctgttgccgcaatgcaggatgaaaagcttctgcaacttggaccggtgcttgagcgcctgaacgatgagtttctggatccgtttgttgaccgcacattcaacatcatggcgcgccgtaacctctttcctgagccgccggaagagctacagggtgcaccgctgaaagtcgaatacgtttccattctcgcccaggcgcagaaatcaatcggcatcaacagtgttgagcgctttgttgggttcgtcggcaacctggcgaaagttaatcaggatgcgctcgacaagctcaactttgatcaggctatcgacagttacggcgatatgttgggcgtcccggcgacgatcgttaattccgatgacgaagtccaggcgtcgcgtgagcagcgcgcccagcagatgcaacagcagcaaatgatggcgatggctcagcaggctggcgcaacagccaagaccctgagcgacaccaacactgctgacccaagtctcctgaaaaatctttctgacgctgcgcagcagcaggcggtggcgcaatga

SEQ ID NO: 199495 - DNA, 204 bp, Klebsiella oxytoca
atgtgcatcagcaaacctaaagtgagttctccgcaggttcaggccgcaccgcaggtttctgattccgctgttcagaatgccgctgatagcgatcgccgtcgccgcgcagctgccggtggccagaagtcgacaatcctgacatcaagccagggggttacccagccttccggcggtacccagggtaagaccctgctcggggcgtaa

SEQ ID NO: 199496 - DNA, 258 bp, Klebsiella oxytoca
atgaatgaatgttcattagaaatgccgaaataccagtgccataaaaaagtatgggcgctaaagattcagcaggtttattcggttggcactcaaaacttcatcgtgccagccgattacggatacgatgattttcctgtttctcaggaatacattgataagcacaaaccacaggaaggcggttattacgttcagtatgaaggcggctacgaatcatatagcccagcggaagcatttgaatctggttatacgcgcatttag

SEQ ID NO: 199497 - DNA, 591 bp, Klebsiella oxytoca
atgccaaaggaccccaaacgcaaatccacgcagtacaagccgctgacggcaatgcaggaagcttacgcccaggaatacacgaaatgccctgagaatcagactcaggcagcgattaacgccgggttttcgcctaatacagcagccgtcaaagccagcgttatgatgcgcgatgagcgcattcagaaacggatagctgagctcatggaagagcgcaataagcgcctgcgcgtcagcgctgattacgtgctgctgcgcctggtggaaatcgaccagatggatgtgatcgacattctcgacgatgaaggcggactgaagcctattagccagtggcctaaagtctggagaacgtcgatcagcgcagtggatataaaccgcatcaagatggcgatgaaggatgaagaggaagatattgagtccacgctgcaaaaaataaaatggcccgacaaggtgaagaacctcgagctgattggtaagcacgtcgacgtaaatgcgttcaaggagcgcctggaggtttccggcacagtcacgattgccgaccgtatggccgccgcccggcgccgcgtcaaagaacaggctggtggtgaagaatga

SEQ ID NO: 199498 - DNA, 783 bp, Klebsiella oxytoca
atgaccagcaaattaaccagagagaaggcgcaatggcttcatgacgcgtgcgaggaagctgctgacgctggcattaaattaaccatgaatccgaacgagttgctgatgtttaccagttacgcgctggccgcaatggacagcgagccggtggcgtggacggatgaagaagagttgcgtgatttacgaaagagcggtttttgcgagatgttttcagttgagccgatcagcaaagatgccgatatgtaccgtgttatcccgctctatcgccacgcacagcagccggtagtgccgccagaactcactcgcgaaaaatatctggaatttttcatgagagacgactggagggatgatttccgcacagggtgggaggcctgccgcgccgccatgctccaggctggcaactctccggtaattccagaggggtacgtgatggtgcctaaggagccgacgaaagcgatgattttgtcagcgatgcgagacaacgaaacgggagaagtagcggaaatttatgatttgatgctcgcagccgcccatcaaccacaaaacgcaccacaaaatattcctgaaattattccgggatggattccggtaagcgagaagctacctgaagagggtggtcgttactggtgctatgttgaagagcaaaccgacttgggaaaatcacactatcaatggaactgttcatggaatggagagcggtggtgggttgaaggcgaagatggcgggattgtcactcactggatgcggctgccagccgccccgcaggaggtgaaaggtgagtaa

SEQ ID NO: 199499 - DNA, 543 bp, Klebsiella oxytoca
atgagcatcactatcgaaaaaatggatgttctgtctttcaccattaccggcgctgatcgcttagaccctgtgcgggtgatgattgaaaactatgagccaggaaagggaagaatcactgtcacctgctacggccaggcatggactggcgcatggtttgctatgggcggtgacactgttcaggcgttcattaagcgtgtcagcaatgactacctgatcgggtgtttagctccccggcttgaaagctcggttgacgatgataacgacgccaaccttgaattcgttaaatcgcaaatcatcaagcttcgccgcgaacatgaaattgataagggtgatgcccgtgaaatgtggacagaggccgaaaatgcggaggatgtgaaggcgaactgctgtgattttatcgttggggacaagcttttgaaattgtttggcgacgacccttggtatgccggatggccgtctgtacccaatccgaaatatcaatatctcgatcgcatcctgaatgcggttcgtgtcggcctagtagaaatggagcgtgcagcatga

SEQ ID NO: 199500 - DNA, 1461 bp, Klebsiella oxytoca
atgaaaaataatgacaaggctgaagttagcaaagatattttggggaaagtatccaataaggctgatgagctaattctgaatggtagttcccttgaattatcagaattcgtaaaagaattaaatgatagttctatgcattttgaaagtacactagatgaatctagatttttatatatagtagggaattgttatcaggctctttataagcatagagaaatggaatggtattctgacgatctcagtaaggccgtgatagcttttagaaaatctttaaatattgcaaacaaattaaagtacccaaacaaagaaatcctttattttaaaagttgtattgaaacaaaccttgcaaatttattaagtgctcaaggtcgagcattctgctgcattccattatgggataaagccatcagccaaaacaatcctattgcaatgatctgcaaggcacagaacgagctatatttagctaaggttttatatgacccaggtcatcaagaataccattactttgtcgcttacaaacttatcgttcagggtttgaaatacaaaaattatttatatgaagatcagcaaattgcttttcatgaagatggtgaccttatgaacttcaaatattggtttgaacgtaatttcactgaatcctctttttacgagttcgaacaacaaagttacgactttgactctagaaagcagaagcattatcttgcatggtgtggaaaaaacaaactttttatcaatgatttaaatgacgtgctttgttctgaagttgcttatcaagatataattacgcttcctagcttcagttataaattgaatcaatctttgtccatgcatgaaacgttaatgtatcatggtaattttgatgagttaaaaaacgatttttgttatgctcgttatctttactacacagcgttaaacattcctcaggatacaaaccatttttttaacgacacatatcctcatgttgaagacatgtcacactcattaaccaatttaaaagcaaatcattataaaagtgcatttaggactctgtattcgctatttgataaagtgtcttattttcttcacaggtttttagagcttaatgatatcaaagatgataacaaaatatcttttgatgcaatatttagagacatttcaaaaaagaaagtatgggtacctcacccacgattaaaagagagtaaaaatcagttcattcatgccttattttatattttaaaggatatcagagatgttaaagatgcaacccccacaacccgttggcttgaccccgatgcaaaatcattttctgatataagaaactctattgagcataggtcattgaaaatcatcgatgattttggatatacattaatgcaatcagataaagagagcacctcaactcaattaaaaaaatacatagacgaaaaggagcaatgtgaatcggaattaaaaaaattgcatcatgagaaaaagaacatctga

SEQ ID NO: 199501 - DNA, 720 bp, Klebsiella oxytoca; identical to SEQ ID NO: 144628

SEQ ID NO: 199502 - DNA, 201 bp, Klebsiella oxytoca; identical to SEQ ID NO: 144627

SEQ ID NO: 199503 - DNA, 1074 bp, Klebsiella oxytoca
atgaatcattgcgactatcagattattgaaatcagcccaaaagatcttattatcgagcctggatttaatccacgggaagcggtaatcggtgatctttgttacgaacaggagccagtaaaatcggcaattatttctctcaagcaagcctataaagaggggcgacgtgttgatttaattaaggtagtaaagaaggactccaagtacgttgtccggcaagggcattgtcgttacagagcattattgcttgctctcgcggaaggagctgacatccagctcttttcagtcgtacttatgcactacaaggataaaatcgaagaatacctagagaaccttgatgggaacaggaataacagtctcaatcccgttgcactagcttacgcactcgcagagaccctgaagcttggctctaccgttgaatcccttgctatgcgctatcagcggtctggcacagcgattcgcaatcagcttaaaatccttgatatgcctttagaactgcaacgtttaatcagcctaaaccttattaaaaaaacactcgcgattgaaatcatgttgaagtattccaatgatcatgcaaaagtccttgcacacttggagtcctgttcttttttagtgccatcttctggcgtacttgatttatcgaaaccaacaaccgttgaaacagcaacaaacagtgagccactcgaagaacaggaaaaacctcctgtacatattaaccctaaagacattaaaacaaagtctatcactcgcagttcgttaggtattaaacgtctttcacataaaaaaactgaacggttaaaaaatgaatttattggtttgattgataatgtagggtcaacaatgtcagacaataataaactgacagaattaattttagacggacagcattctaatttatttatgaacgtcagtaacactttaatcacaaaaacaaatgaaagtgtaaagatcactttagatgaagcaaaacttcaacttgtattaagtcttctaaatgatgaaaatactgcaatcatcattccaaaatctaaggttacagaactgaacgaaattcgtgaccttttgacaaatgagtag

SEQ ID NO: 199504 - DNA, 876 bp, Klebsiella oxytoca
atgagtgataacaatgagttagcacatccgtttgatgtgaccaacacggatacagggaggacttatcaactgagtccaaactcttcgaaatcggtccaacccattgctttactgcgcttaagtgtttttaccccggtgggaactaaagagaagcgattcagaaattttgaggttgatgcttctgatgagttgtcgagcatggaactggcccggtcagaaggatacgatgacatccggatcactggccttaagctttcgatgtccacggacttcaagtgttggcttgggtgcattatggcgttcagtaaatatggattcgcctccgagaaaataacattgtcgttcaatgagtttgcaaaaatgtgtggtatcagttctacaaatatcaacaagcgaacccgttcacgatttcaggaagcgctggcaaacctcgcgtccgttgttatttctttccgtgattctaaaactgaacgcttcactgtcacacaccttgtgcagaaagctatgattgaccctaagaaggacacagtagagctcgtgggtgatccctcgatgtgggagctttaccggtatgatcataaaaccctattaagcttacaggtactgtcggttctcgccaaaaaagaagctgcacagagcctgtacatctattttgaggcaatgcctgccggaacgttattcgttaacatgaagcgtttgcgtgagcggcttcttttgacgactccagtacgtactcaaaaccagatcatcagaaaggctatgttggagttaaaatcaataggataccttgaatatcaagaggttaagaaaggtagagatattcagttccagatttttaagagaagtccaaagcttgctctggcaaaacaaagctga

SEQ ID NO: 199505 - DNA, 528 bp, Klebsiella oxytoca
atgctttttagtgaaattcagctatcgaatcccattaagagaggtactttcagtccaaaggcaccttttcaggtcgattcatccaaatgctttccggtcaaagacaccgttacggcgccattcatgcaaatgcctgtcaaccaaaagcaccttttactatcccattcatgcaaatgcttttcgaccaatgccccgtttgctgcaccattcatgcaaatgcttttcgaccaatgccaccgtttgcggccccattcatgcaaatgctttcagctaaaggcacctttttactgtcccattcatgcaaatgcttttcagctaaaggcatcttcccgcctcattcatgccaggggtttccaacgtaggcaccttacacaaactcattcaagcaaatgcttttatacaaaaggcacttttctgtcgccattgaagcaagtgcttttcacaaaggtcacttttctccccccattgaagcaaatgcttttcaccaccactatgggatttttaaacgatttgcttttattttcatga

SEQ ID NO: 199506 - DNA, 354 bp, Klebsiella oxytoca; identical to SEQ ID NO: 144614

SEQ ID NO: 199507 - DNA, 318 bp, Klebsiella oxytoca; identical to SEQ ID NO: 144613

SEQ ID NO: 199508 - DNA, 786 bp, Klebsiella oxytoca
atgaaacttctcagcaagcttaaaattccattcattaaaagtgccagtaatggcgattttgataaaaaggacgagacttcgcaaaatggaggcgaagactcaaaaggacgctttcgggattctaaagctcgctttagtaaagagattgaagcttctgaaattggaattacttatagtgcattgattaaacgtgacgaaaaactcttacgtgtgaattcaattgctatattagtcatcgcagttttagtggtaaaaaatcaatttcttaccgatcctgtgactattgtgcttccgcctaatatgacggaagaagttaaagttgtgggaaataaagcctcagagtcatataaaactcaatgggccttattcttcagtactttaattgggaacataaacccaacaaacataggctttgtaacaacaaccatattggatgcgctttctccggatttacaggcgaaaacccgtgagtcattacagcagcagaccaatattatgcaagctcgtggtgttgaacagtcatttaaaccgatcgatatgtattatgacaccaaaaatgacatggtctatgtctggggaacgaaatcaacgcgtttgattaatgttccggacaaaacagaatcatcaaaatggacgtttgaatgggtgctgggtatgaaaaacggacgaccacgcatagcctatgtaaatcagtattctggtacaccaaatattaagaaaattacaatcaacggcaaagaacaactggcaacactcgataatcccccgccgtctacaggtaactaa

SEQ ID NO: 199509 - DNA, 1359 bp, Klebsiella oxytoca
atggacattaaaaatgcctgggaaaataaaactgtcagaatctcagtaattggtgctgcgttgattgtattgattatcgttattagtcaatcaattttttccactccggttaaaaaagagaagaaaacccagaaaaaagatatgcaaactgggttcctgattgatgattcacaaatgactaagctgagtaacgaggaaagccagaagacttataacgaaatggtcaggcagaaccgcattgatcagaatgcggcaaaggcagatcgtgataaagctgaaaaggcccagcaagaaagcaaagtacagattgccaaccttgcttcacaagtccagcagctctcgacgcagttgactgacatgcagacctcacgaaacggtaatcgtaatctcgacgcaggtgggtcacgcaaaaacgtcaatgagcaggccccagcaacgccataccagctaaatccaaatgctgcggtgaatggggctagttccggatacgctccgatcacaccgacccgaaatagcccaatgcggactatcacgcagagttcaattaagacaaatggttctgatggtgtcattcaggttatgccgatatccgaaagccggataagagaggggcgtgaggtcgttgctggcggtgacaaagccccgacacgaactattcgcggcgacgggaccgctcctgtagacagtaaagctcggcatgcggcacgtaaagacgaaatgtttctcccagcgacgtcaattatcacaggggtgctaattaatggtctggaagccccaacgagtctgtcgtctaaagctgaacccatgccagtcactatgcgtattaaaaaagacatcatcatgccaaacaatttcacgatggatttgcgggattgtaatttgttgggttcagctgtgggtgatctggcgtcacagcgagcatacattcgggcaacatcaatatcttgtgtgaactcgaaaggaaaagctttcgacgtcaaactggaagcatacgcagttagtgaaaatgacgggaaaaatggtattcgtggaaatctgataagtagaaatggaaatgcgatcgcaggttctgcttttgcaggaggcctgtcagcactggctggtagtctgagcccatctaaggtgtcttcgttaaatatcgatcctaactcaacggctgaataccaatcgccgaacatcggggcattaggagcgttggccggagccggagcagctcagggcggtctaaaccgtcttgtggactactacacatcaattgctgagcagcagtggccaatagtcgaagttagcccagggcgcccaattacgtttatcgttcaatcaggcgcaacaatacctacaaacctgacgagtcgctga

SEQ ID NO: 199510 - DNA, 507 bp, Klebsiella oxytoca; identical to SEQ ID NO: 144612

SEQ ID NO: 199511 - DNA, 825 bp, Klebsiella oxytoca; identical to SEQ ID NO: 144611

SEQ ID NO: 199512 - DNA, 951 bp, Klebsiella oxytoca; identical to SEQ ID NO: 144610

SEQ ID NO: 199513 - DNA, 2682 bp, Klebsiella oxytoca
atgaaatctgctaacatctataataaagaattaagtcgccaccagtttggtgggtttattcctgtatacgaccagattcctggcacgaattattttctaatagacggtaatcggcttgggtttatgtttatttgtaacccctcacctggtgtttttgataatcagcaggatgtgttagctgaattatttaaaatggattttcctactgacactatctgtcagacctcattaacagcactgccggacctgaccttgcatttaagtgcctggtcggcagttcgtggtggtcgaatggaaggacatgataagcttaagggggacttactcacggcctaccagctggattattatgatagaagtctaaatgaacccttaaaaccggatcatgataaattaatgcttcgtgactttcagatctggatgtcattttctattccgttgaaatctgcgcttcctactgaaattgaaattaatcgcatcgatgcactgtactctgacctaatcagtaagttgaacacactgggcctttttccacataaagttagcgccgaaaactggctttattgcatggataaattaatgcatccgggaaaaacatcacgttgggctgaaggtcatgttgaagtcaacactatgaggcgtcttaacgaacagctaaatgttccggggcgaaaatatacagtaactgaaaataatttttcatctacaacgcagagtactgatgtttctgaacatcgttatttcaaacaattatctgtggtcaagttcccagaacatgtaaattttggaagcatgtatgaacttgtagtgaattggatgaatgggcgtaaaactatatttagcccatttatgataactcaaacagtccatttcgccgatcccttaaaattagctagagataacgtcagatataaggcaattactaacaaacaagctagtatcccaaccgtcttaacgttttgtccaagactgaaggacatggataatgattacatggcggtaacacgtgaactggaagatggggcccgtcttttacacagttatctgacatttaccgtcatggggaattcagcattagatgtccagtctgccgcagaccagttaaaatcattttatctggaaagtcgcgttaaagtggctgatgattcatacatcatctttccatcttttgtctcttgccttccaatgtgtaatgaccccaagacgatactagatctggaccgttttgaggtagtcagtaatactggtgcagcgcatatgacccctctattcggcccatggaaaggtaatactgacagacctgtacttaacctcgtctcacgagagggccagctgttggggcttgatatcttcaagacttctgccagctataatatggttgttggggcgacttctggtgcaggcaaatcgttctgggttgcatacatcattaataactatcttggtgcagggccgcgttctaataatctgatccattatcgtgatacttttgaaggtttcaaaaacaatgcttatgatgcatttgaccctgatggagcccagatttttgtagttgacgttggtcgctcgtatcagggtatttcggagcaatatacaaatagtcagtttatagattttggtaaaaagcctgattttactctgaatccgttcgcatttttgaccgatgtcactgttgcagaccgagtttttgatgaagcgcctgttttcaatgacgactcaaataataacgatgaagaaaaggataaagttgcacagaccattatggtcctgaatcagttaaaaataatggcatctgaaaaaggaaatattgacgactttcaacaatcggtcatgcttcaactgattggtgatgaatataacgaatcacgtaaagtcggaagtacaggctctattacaggatttgcacgccgctgttctgcccatgaagataagcgtattaaagatatcggtgagcaattagggcaatggtgtgaaggaggcatttacggaaatcgatttaccgaaaagctcccgccaataaacttcggtagtcggtttatagttcttgagcttgaagagttgaagggtacccctcacctccagacagtcgtgctcatgtcgatcattcaagctgctcagcatgcaatgtttatcaaaaaggacggtcgccgccggttgttcatccttgatgaggcatgggagtatattcgcccggataatgcttcaggctccagtaatcagtcaaatcagtttttctcatctttccttgaagctgcctggcgccgattcaggaaaacgaactgtgctggtatttgtattacccagtcctttgaagattacttcacctcctcggtaggtcgagccctgacggccaactcgccgtggaagatcatcatgaagcaggaaaaggagagcatagaagccatgaaggctaataactacttctccacgactgatgctgaatatgagcgtatgaaaaacatacgaacgataaagcgtgcattttctgagatgctcgtccgattcgagaatttccaggagatatgtcgcctctatgtagacaggaaaatggagctttgttttacgactgacagtaccgaccgtggaaagctatgggaaatacaaagccgtcttgattgctcttacggcgaagcaattgagatactgtatgaacaggaagttgctagcaatgcagctgcataa

SEQ ID NO: 199514 - DNA, 549 bp, Klebsiella oxytoca
atgtggcaactaacgtcaattccccggtattcaaaagcatctctttttgggctggcgattaacggggttaaatgttccgacacccggacagcgtccctcccttggctggcgattaagggggttaaatgttccgacacccggacagcgtccctcccttggctggcgattaagggggttaaatgttcccgcacccaaacagcatcccgccctgggctggcgattaaggaggttgaatgctccggcacccggacagaattcggccttgagctggcgattaagagggttcaatgtaccgccgctccgacagtatcccgcgctgggctggcgattaaaggggttaaatgttccggcacctggacagtatccgccttgagctggcgattaagggggttaaatattcaggcacccgaacagtatcccgccctgagctggcgattaagggggttaaatatacaggcacccgaacagcatcccgccctgggctggcgattaagggggttaaatgtgttccggcacccggacagtatcccgcctagagctggcgattaa

SEQ ID NO: 199515 - DNA, 1254 bp, Klebsiella oxytoca
atgaatctaattgataagatcgcccttgtcggtcaacgaatgaagagcgagcagatttccctgaaggagtcattattggtctcttcaagggtttcggtctcggatgatagtgttgaaggtgtagatcgcctcatctataaccattgtttgaataaaaaaaatctgtcagatttttttggcaagtcacgcgtcacctttaataaaatccttgccgatcttgaagatagaggtctggttggtgctcctatctttcagaacaaaaaccatctctataccaggtgggacgtccaaaaaatcatggatgctctgggctgtcctcggtacagcgactattaccatagccgtgcaatcgtaacgcagaaccataagggcggcacgggtaagagtacaacttcaggggctcttgctgtagccgcagcgcttgatatgcatctaaacgcaaggacacttttgatcgaatgggacccacaaggctcaattggtagcgggatgatacaaagtgtagcggaagatgatgttttcctcactgctattgacgccatcttaggggtttatgaagaggactcagattacaaaaaataccttgatttagggtattcggaagaagaaatcattgagagtatgcctttttcgacacacctaccgaatcttgatgttattacagcatttcctacagatgcgcgatttaaagataaatactggcagtgttccagagaagaacgaacagagctattacttcgattcaaagaagttattctgcctgttttgaagaaaaaatacggcctgattatcatcgatactccaccagaggattcgccaatcacttgggcagctgatgaagccgctgatggcattcttgttgccgtatcacctcgtgaatacgattatgcttccacaactgatttcatgttgaccatcagcgagcgtttcaaacaatcgccgagcaagggcgaaaatctgaggtggttcaaagtgctggctgttaacgtagacgataagagtccatatgaaaaaattgttctggataaactggtaagaacagtgcaggaactctttatgtctgcaaatattaaaaattccgaagcgtttaaagccgcagcatcaaggggcagaaccgtattggatattaaaaagtctgaagagctttgctcacctaagcagcttgatgtggctgaagaatctgtaatggcggtctaccagcaatttataaatgagattaagagtttttctgtgaaagaaaggagtaacgcatga

SEQ ID NO: 199516 - DNA, 1005 bp, Klebsiella oxytoca
atgagtgatgagcagcatatcgggaatgacaaatcccgttatattaatgcacctaagcgtactgaagtcagccatcgctccgggcttccaggcctgaaatcacagcctcgactgaggaagctgtttgctttacataatggacgtaagctggaagctgaacacattattgtaccggctgagaaggtggaactggaaaccgcagtacaccctatgaacccacgaaaccaggaagctctcactgtaaatgcagttcgagatatcctggaacaaattaaggtacgtggtgttgatacagaaggcgttgctgtcaaacgaaatggggtgtatctgcttatagagggcagtcgtaggcgtttctgttgtattcaatctgcgaaggatttgccactatgggtgttgccggatgaattatccccggaagatattaattccatcattacagcagcacagacatcacggagattttcttaccgtgaagttggattccagtatttacagaaaatgaaagaccttggatttgcaactaatgaagagcttgctaattatctcggaatcagccatgtatctgtttctaagcgtatccaggcggcgaagatagataattctcttattgctctctttcctgactatgaaggtattcctaactcgtattacaatcgcttatcccgactacagaagtacgtcgaaaagaatttattctctcttgaggaagttgtagataatgttcgggaggaaataaggagcttggatgtaaccgatatttccgaagcacagaagacagtaatagataaaattactacagtagttgaacagcttgacataaaacctcctagcaaggggtgggaaactcgtgaattagccgtgtttgataataaagataaatatgcaaggattagcaaaaatgcgtctggaagaaaaattaggtttgaatttaatagaatgaatagcgaattgatcgcagaaattgaggagtttataaaatcgaagttgaaagaaaaagaataa

SEQ ID NO: 199517 - DNA, 393 bp, Klebsiella oxytoca
atgaaatctatattggccgtcatctgtatttgctgctgcgaggtggcttttgcttatccttatcgcatctacacagcacctgatggtgccattgtgaaaaatatactgaccaatgaagtgatcggtaggacaccggttgaagttgatgtcagtaatactgaagcaggctccacgttcgggatatctatgtatcggcatgagaatgttgcaataaaaatattcacagtaatgccaagcgcggaaaataactttactgtttcaggtcccgacgttgcaacaatgtctttaccaggtaaagcccctttaaacgtaattaatgacagtaatgcagcagcagttcacatagatctcaggccttttctttctgaacctgcacatcaacccattcaatag

SEQ ID NO: 199518 - DNA, 522 bp, Klebsiella oxytoca; identical to SEQ ID NO: 144588

SEQ ID NO: 199519 - DNA, 840 bp, Klebsiella oxytoca; identical to SEQ ID NO: 144589

SEQ ID NO: 199520 - DNA, 948 bp, Klebsiella oxytoca
atggcatctgagcacgtccagacaattgacctgactaattattccggaagggttttctttctggcagatccccatggacattattcgacgctttgtaatcttatccattcgatatcgagcccagatgaggaactaatcattttccctaccgggaatctctttgattatggtcctgagcccatggagttaatgacagcgataaacactggtatttttgatggacgttctgtgcgagtgttctcagcagccggggctggtgaagagatgatgaagaagctcttacccacaaataatgatcgtaggacttattacccaagcacatttcttaacgaacggtggtgtgcaagaggcggacgttggcataaacaaattaaccgcagttatcttgaagaggagatcagcaaactgctctccacccagctggccacggtgatgaaggtgctttttaaaggaaatattactatcggtgtttgtccatccgactacacggacatacgacagggtttcgacaatacctataacgctctcctcgcgtttaatcaggcaaacgtgaatatctttcagagtcagtttctttttggtatggatcacgcagtcagcccaatgaatattagcgatgtcaacctcgttgtactgggtcggaatccggtcaatagcatcagaaaggctcatgggttacctttgactaacttacctgtactcgtcggcaactgtctccatatcaatactggctcgctgttcatgtcagcaattagcgatccagcactactagccccaggtatacctcgtactacagttccggcaataacgctggtcgagttgatactggcctcaacaccaaccctaatttgccaccaaatgatccttaataagaacggcatttacacacaaaacacaacaccacttgacctggatttaaaagataacaacatagaggctgctttataa

SEQ ID NO: 199521 - DNA, 1035 bp, Klebsiella oxytoca; identical to SEQ ID NO: 144591

SEQ ID NO: 199522 - DNA, 678 bp, Klebsiella oxytoca; identical to SEQ ID NO: 144592

SEQ ID NO: 199523 - DNA, 453 bp, Klebsiella oxytoca; identical to SEQ ID NO: 144593

SEQ ID NO: 199524 - DNA, 435 bp, Klebsiella oxytoca
atgaaagttaattacaagaaactattacctcttgtagtgctcggtttaacaattgcgggggcttactcgcttttcaacgcaagaccggcggagcccgacttgtacgattttactggcaaagttcttaaagccacgtctgttttccaaccctgtgataaagaatccacaccttcgttaaacgttaaaattgcagataacggaaacatacatatcaatggtgttgcatcaaaagttacttttgttgaaaaagtttcgcctgatgaaatttctgttaagtgtgctgggttaccaatcaaaaatgctcggcttgtgcatacgagttcttacaccatgataatttcggaaggaaaaggtggttttgttatttcggatttgatacgcatccaggataatgaagtcatctccggtatatggttctttaagaagagagcatag

SEQ ID NO: 199525 - DNA, 558 bp, Klebsiella oxytoca; identical to SEQ ID NO: 144595

SEQ ID NO: 199526 - DNA, 4299 bp, Klebsiella oxytoca
atgagaaaatcaggtttatgtttaaccctgttgttttctttaattgcctcgattaagtcggtacatgccgaggcaattatgatttccggaaaactccaggctgatatgcctgccgtcacgtttaatcccggcccgggcgattttgttgcattcgtaaacaataatataattactgcctcaggctctggaaccgcatgtaatgtgacggttgatgatcgtgcgacatcaacggtggataatcttgtctgcttctttgagtggcttccaaatagctctggatttactgctaacgggttcacgttaaccgggattccaaacagctcaggagacctaaaactcccttacaaaatttcctatttttccggtacagaaaggcaaaaagtagaagtagtgaaaggggagtatacagttaatgctctcgtaccggttaaaccgacgatcaccggcctaaagtcgtctatgaatgggctggttcaagagggttacacacttaaatcttatattaaggatgaagtgatcaggagttttgccgtctcagtagaaccccgcaattttgtgcaatatatttctatcggatcgggttctgcctgtgaagtccctattggtgggaccagttgcacgatcgatgtaggaagtattaaagtaagtgattcggatttattgataggttcacgggaaataactgtcaccgctaattcgaaaaataattactttgcccctcctgaagcgcaaaagcttacgctgacctgggactaccgtcctcctgttgttgaccatactctctggaatttcactgatgaagctaaaactatcagtattggcggtcagcaaatctataccggcgctaaaacggtagctgtagtcgtcaaagtgccccaggaagagactgaaggcgagtggtggctaccaacagctatgacgctgacgatggtgccggacggggttttcaagccgacaacaaaagtaactttggatgacggtacggttatcgactttaagcaatcctgggcaacaccgatacgccgtaccctccagcccgtgagcggaccccagaaggtcggcgatgagtatctgtatatctttgacttaacagacctgacgaatggctcttatgccgccacgttcactatagagaatactagcaagaatacgtctacgtacaatgagcccgaaagcaaactgatgctttctgataaccccacactcatggtacttaaggatggggcagcgctggcaaaacgagcacctgtttatttcttaaatgaaattattgttgccgcattccaggggcaggccggggttgcggatattaaagccgttactatcgataacaaagttgttgaactcaccccaacgaactacaaaggcatttattatctgccggtgggggatgatctagatgtgaatgctgaccacgaaatcacagtcgtggcggaaaacctgtatggcaagattgtgacattcaataccactttcacgtatcaaccgacagggtttgcgcttaaaaacttagaaaaagacgtcaccttgtattctcgcgttcggcaatataccgatctgatgagtcagacagccggtgataaatgcactctctttactacggaagagaacgcgcaggcttatcttgagtggtatggcggcaaatctgatatcactgcctgttaccctcagtggaacaatgtaccggacgggcttgaattttactttaaaggcaggacgccaggacttacggggttcttcaataaaactggcgaaaacctgctcgattaccaagtctatatgataaacggtagaggctctaaagctgtgtcggccaaataccgccgcgtattgacaactcaactgccatataacccaatccttacttacaagaaaaataagttggtaactgggatcaaccctaacactgcactagcgtacacgacaggtggggaagctgctcgcctcttggcaaaagtggtacctgctgatgtgacagtctatgtttcgcaaaacgggggtgagaacacaaaaacgacgtttaaaaaccgttcatcaaacaacgatgcaactacattcgttcagcgtctgaaagtagccgcagccccactgtggacgaaaaatgtattcgacattgctgtagagtactcgaaggacccgacaatgcggaccgccgatacacttaacgtgtatacggtccccgacttcagcattcgggctacgatggaagtcgaagacaaaaagacggctactacaatggaattaccgttgaaggtgtcagttgggcgctataacaattcaactcgcaaaagctcatttagccggacgacaatgggtgactgggatgtaaccatttacgctcagaaaagtatctatggtaaagatccagaaacaggccgttttaaaacgacgtatgaacgtaccccattaaccgaggcattgccggtgaatgatgccggggtagtcgaaacaaaaatcaaaatcgagaatatggaccttgggaacatgcgtcttgtcgggatagctaaagtccgttcgcctttcgctgattttgaattgacccgggaaacaagtgcggtcggcatacgtgtgtataagggtgaagagctggagggtaatctctcaaagagcctgattatcggccgtatcccgctcagtacgcttgtgaacttcaaatcggccagcacagctaactctgatgcgcttgctcctaccgagtggcaggagtcgtcagacaatgggcagacatggacgatgctttcggacatgactgggaagagaagtatttcaatcagaaaaactgacgtcggtaagtggctctacagggccaagatgaccaacaagtttacgtcaaaagtgtcttatagcgacgtgctgacagttgtaacgtacaaacagcctaagctaagtattgatgttgcggaaattcttgaaggcgatgatttaccagtctcgttgctggataatgatgagccgattccgcagggtacggctgaagtaatgtggtcggaagataaaattaattgggtcgcgggtgacactacctataccgtgactgccgctgagaagcttccgccaactatctacgcccggatgcgctatctggattcagacgacctggctgaagagtcctcctggaaagagacgtctgcgcggttaacggtcgctaaacccaagcgcctttccgtttcagtgagcagcatttcaaaggtagaggtgggaagtaaagttactttagatggtaaatactccaacccgaacagtcggtaccagaacggaaatgacgtcattgaagaatggactgcccctgacggacagaaaatcagagggcctaagttgtcgatgacgctgacagaggagatgctggataagcaaggctatgcggcatttacatacagtgcatggctcgctgacagcaaggaaagtaccatttccacgcggaaagtatcgattaagtcctgggtgtataagttccctgaaatgaaagtcagtacgaagctaaaatacactatggccccgtcgaccttacacgtcgccctgaccggaataaaagacggtgactatccgggagtaacttattcacgggagtggatctacgataaggaaaatatctccatttcaaaagatgaaggagatacgaaagagtttgcaattgcgaagccgggtaaatatacgttgatgatcgttttccgcgataatcgtaataacgaacagcgtattgaaaataccttcgtcgtcgatgagcaaactccgatgactgttgaaatgaccccaaaattctctaataagttcatgagggctcctcttgatgtcacactaagatctaatattaaactggcgcactctgctgacagtattgatacggtgacgtataaagtaaatggagaggttgtccagggtagtaaaaactattgggctcagggaattcccggtcttactgagaaaaaatatgaaatcacgctggatgttgtcagtaaaatgggacagcgtggtacagcatcagtagattttgatgttgtaaaaaacgccgctccgcaatgtgtgctaagccatacagaatccaatatgagctggagtttcacaaataaatgtgtcgatactgatggcaaactggttcgttatgaatggtatatcaatgatgaactaaggaatgtttttggcagcactgcgacactatcgaaaaatcttaatcgtgggaagcaagatatccgtgtagtcgcatatgatgatagtggagattcagcaacacagcgcacggtcgtatatggcccagatgaggaaaaatcaaaggctgtagaaacaactggtacatcgcagtaa

SEQ ID NO: 199527 - DNA, 513 bp, Klebsiella oxytoca; identical to SEQ ID NO: 144597

SEQ ID NO: 199528 - DNA, 1509 bp, Klebsiella oxytoca; identical to SEQ ID NO: 144598

SEQ ID NO: 199529 - DNA, 132 bp, Klebsiella oxytoca; identical to SEQ ID NO: 144599

SEQ ID NO: 199530 - DNA, 3177 bp, Klebsiella oxytoca
atgaaaactaggaaattaattgcttcaacaattattgcgtctatgctcgcaaatactatgagttgggcattttacgtttcgctcattaacatggttatgacaccaaaaatatacgcagctgatgcgatatttgatcagttggaaaacaattttgaccttgcgaaccccaacgcaaatcgaaatgcaacaacaagtgctcaggatattgtagagaagtacaagaatgctgattccggggaaaacctgagcggaaaaatatcagataaatatgtaggtaaagcagattcaataaacttagacgttgggaagtacggggcgctgaactcaaacgaaagtgttatgagtaatgctgcatctgacggcaagtcgatcggtaagaccgtacagttaccgagcatgacgggcggtacgatcaactctaattatacgaaagagggggcaaagttactttccagagacagtagcggtaacattggtataagtaacaacacgaatacaacggcaggaaccaaaaccagtacaggagagctattcagctcagagcagaagcacagtgatattcagtttaattccggtggccggtatggagatgaggatggattcatcaatgacatcaaaaatcgaaaaagtcagctgtttgaagcgcagagttacgatggggttgcctaccgtacactggtgaatgcaaataaagacaacccagcatctaatattaaacctaacgaccctatgttcaatgctggccgaaatgaaattggtaatgctgtagccggtacaggcaactggctacagagttgcaatacggaaacaaaaaaacaaactattactacgcactatccagattataaagagttttactgcaactcacccaagaaagataactttaatagttgcacaataactcgtgatttttccgtacctgtttatatctcaggtggtaatggtgatatgtctatgtgcggggataattgtgtgagggtctggttcggcagaagagacgacaactattggaacgatggagtatatgacaactcattaaccttaaaatttcatcctgatgcaaagcttgcaactgcgaaaataattaatgcagagtgggatgatcatatgagggtcacgcttgatggaacgcagatttttgctcacatagatggagaatatagaagtagcaattatccatcaccacaagggccatgggagctgaaaaaatcatggaagcttgacaaagtctacgatattaccgaccaggtaagaaactctgtatatcaggaggtggaccgtgaagtgacaatggcgtcacgtgtttgggtaggtggcggtggggaaggctattttgaagttgagctgacttttgaaaatatgaagctggaggataaacatatacaggaacccgcaggttgttttgatgcagtacaaacgccgaattcattctgtcggtttgaccggtttgtgaacatggatgtcggtacaaagcggctcccggaaactgtgcttaaaatggccacaccgctttataaaggcgataccgggttcttaacctggaaaacaaaccttgaaggttacttctgtgatcccctggcgaaggaaaagctgtgctcatatgatgcgaagggaaacatcatgaaagacgccgcaggaaaagacctctgctacaactacgacgacattaaaaatatgcctgacgcttgcggcacatataaaaatgatgctgcgtgtgtgctcgatacacagacttgtgcagaaggttggttcgatgaaggcacaaatacatgctacatgtatgagcagaaatatacgtgtgacagaggtaaggacgtcgtcagagaggtagagtcacagactaacgcctgtgtaggtatgatcccatgttctggtggaacatgcgaaaccggcccaaaagaggaaaacaatgattttgggaaagtggccgcgtactcaaacatggttcagtacatgcagggtgaggcaaaatgcgaagatcccaacgaccctaattcctgctccgtctttgaggggaaagcagaatggtgcggcaggtccgttggttttgtgaacgggctggccaaaacagattgctgcgaacagccacagggtaccgctggctcactagaggcgattatgctggctgggtcgatgatccgaaacacgaactggacacgagtgaatgctcagctggtaagctggaccggtggggagagtggaacctgggcttcaatggctaactcggttggtgaatggacagcatcggcaggtaaaactgttggtcagatgtggaacaatgtcaccagttcgctaaccagcgtctacgaaaatgtggccggtaaccttgggcgaacagtaggttcatccactgctggtggaagtggtcaacttgctaaggagacaatgagctctttcgggcttggtacccttaagaagatggccatggaaaaagcatatgacttgcttcccgatacagtaagggacttcgtttttaaaaatgtagcgacaacgggtggcgaagtagtcttttcagcagcaattcaaaactttatgcttgcattaaatgtcattggctggatttataccgcatatcaaataacaaaaatgttgcttgaaatgcttgtggcctgtgatcaaaaagaaatggaagcgtctattcataaaaatcagaaatcctgtttcacactggatactgaacgctgtgttaaatatctcaatatgggatttacaaagaagtgtgttaaaaaagcaacagacatgtgctgctacaattcaatgttatctcgcgtgattatgcagcaggcgtatcctcaacttggaatagatccggttgcttcgagttgcgttggattatcaattagtcaaatacagagattagattttgataagatcgatttaactgaatggattaacgatgccgtccaggtcggagaagttcctgatcagtacgctacattctccgagtcatcgataacagaaaatttgccatttaaaaatgaaaattaccaacttccatcccaaagaacgaaagaatcaatgggtggtgaggataatatgataaaagctagacaggaaaataatcaggcaattaaagaggagaatgtggactgtagctatctaccacggcccgcgatttgtgaagttgggtcaacttatgtagacccaattactgggaaggaattaccaaaatactaa

SEQ ID NO: 199531 - DNA, 873 bp, Klebsiella oxytoca; identical to SEQ ID NO: 144601

SEQ ID NO: 199532 - DNA, 1809 bp, Klebsiella oxytoca; identical to SEQ ID NO: 144602

SEQ ID NO: 199533 - DNA, 876 bp, Klebsiella oxytoca
atgtctaaaagcaaagcacgcagtaaagcccttcttctggccttcgccgatctgattccggatatggacaaggcagttaacaagaagttattggaatctctgattatttactcagggcatgataatgaccttattgttattttgaatgaagacggaccaactataattgaactgaactctttaaaatcggtttctatgctggcccaaaagctttcagctttttcaacttattatcatgtagaaatgcagcaaattcatgtcaatccaattgactttgagaaggcttataagctactcaaagaagcacctgcaattcccatgtttaaaactttagctgaactggataagtttttaaatgaagagtttgaaaagtatgggttgaacacattccttgatgtggatgacctagattattcactcgataaatccagagagttaaaaaatgatcagttgattgcctgggtttctgaaattattgtgaagcgcgataaattagcattgcgtaatcgctttaatgaagtgacaaaggcacattatgaaactgtagatgcattgtatgcagccgtccgtcccttaatgaaagaattaggttttcctgatgaactcatgctacatacctttagtgaattgagcgttttcgattccaaaggctgggaccatgctatcaaatctaaaattgaatttctcacaaaacgagaagcgcaatatttagatgacaaaatgaaggcagaaaaacggcagttaacaattgatgaacttttgactcaagccaatagcgctaaaacagctaaagaaccaagaccttttggtcagacgttttgttttgctgttcttggcatgatgtcattgatgttcattgtaaataaatttatttaa

SEQ ID NO: 199534 - DNA, 378 bp, Klebsiella oxytoca; identical to SEQ ID NO: 144604

SEQ ID NO: 199535 - DNA, 390 bp, Klebsiella oxytoca
atgattaattacaccttgaaaaaaaatatatccagagaagcgttcaggtacattatcgttggcctggcaaatacagccattacggcagttgttatatttggcctgatgcatgtcggcgtgggagtctacctttcaaatgcaacaggttatgtcgttggtattattttcagttttgttatgaatgcgaagttcactttctcaacgacattaagccccctgagatttatcaaattcctgtccacatgcgctttttgttacattttaaatttaatagcaatgaaagtttttttcatcgtcatacctaatgctatttatacagcgcaagttgtaggcatggtgatttacacaacagctggttttattctaaacaaatactggtcaatgaaatga

SEQ ID NO: 199536 - DNA, 630 bp, Klebsiella oxytoca; identical to SEQ ID NO: 144507

SEQ ID NO: 199537 - DNA, 789 bp, Klebsiella oxytoca
atgcagtgtaagactgcgagatcttcatggtccaatccaattctgacatgctttgagtcaccctcgtcagatgataaaatatggaaaatttatctaattcaaaaagggctgcttgtggataattcatttcgtgcagaaataaaggttctttccgttttcgactttgatggaactcttacccgacatgacagctttatcccctttttgcgctttgccttcggtaacagtgtcttcacccgccggttggttaaactcgctcttcctaccctgcggtgtttgagtcgcaaactaactcgtgatgaactcaaagaaattttaatatcaacgtttctcactggtatcgaggaaaagtgggtcaaggagaaagctgaagcctattgcaacctttattgggggcgtctgatgagagcatcaggcctattggccgtggcaacggaagtttctaacaatgttgaggtgacactctgctcagcctcaccgaggcttgtacttgctccgtttgctgaacgactggggatcaagctcatcggtacagagctggaaagcgttaatggtatcctgaccgggcgcattacagggcacaattgtcgttgcatacagaaaattaaccggctggagtctatttacggaccattagatcagtatcatcttcgagcctggggggacactcggggcgattatgaattgctggcagccgccaaagatgcccactggcggcacttccatcctcgttgggacagaaaaaaagcttttatacaccgcttaaaaaaggagtcgttcagggtctaa

SEQ ID NO: 199538 - DNA, 1242 bp, Klebsiella oxytoca
atgcaattacagtcaggtcaaaatatccttctatcttcatcatcagtcactcttaatttgcgatacccggtacgtcccggttttaacggcgaacccgacacctgcgttttcatgctcaacgcacaaggtaaggtgagcggtgataacgatttcatctttttcaataacctgagttcaccggagggggctttaaaactgacggcagggacgcagcaatcaagcgtacatattgatcttaaccgcgtttcctcggctgttcagaaaatcgccataaccctcgtgatagacggaagcgatactattacaggcttgcagaatctgaatttgcaggcctccggtattgcatcgtttgatcccgaaacagcagggcgcagcgagaaagctattatcgtggcggaggtgtatcgccataacggcagttggaagctacgggcgcttggcctcggtttcaacggtgggcttgagcccctggcgatgagttatggtgttgatgttgcacagacagctccgcagccagcacaacctgctcgtatcagtctggaaaagaagctcgaaacaaaatctccgcgacttgtaagtctcgctaaaaaggcctcagtcagcctcactaaaaataaactggaaaccctggaggcagcagttgcgtttgttcttgacgcgtccggctcaatgagtggccagttcagtaagggtaacgttcagtccgtgctggatcgcatcgccgtccttgccgcccagttcgatgacgatggcgaaatggatgtctggggctttggagagaagcataagaagtatccaaatgtcactctggataaccttgacgattacattcagaccattcgtggatccggaaagcgttcagcctgggaaaatttgccggggcttggtgggactaacaatgaaccaccggtaatggaagaaattgtcgactacttcaaagactcaaaaatcccggtttacatagtgtttattaccgatggcgggataagcaagaccggagcaattaagaatgctatccggcgctcagccaacttcccgatcttctggaaatttgtcggcctcggtggatctagctacggaatcctgaaaaacctggatgattttacagaccgccgcgttgataacacccatttctttgcaatggatgacttcggctctatcagcgatgaaaaattatacgataacttactggaagaatttagaccgtggatagatgaaacaaaaaggttaaatatcctttag

SEQ ID NO: 199539 - DNA, 651 bp, Klebsiella oxytoca; identical to SEQ ID NO: 144509

SEQ ID NO: 199540 - DNA, 1638 bp, Klebsiella oxytoca
atgtcgcaaaatacgtcacttgaagaaaagattatccgcttagttctgtctgagctcagccacaccgcagaaggtgagcggctttcccttccatcccaggatcctgccctgtctgccgaggttatgcagcttataaagcggattgagaaccttgcaaaaggtacctctgcactggttaacgaaggtgagaacgaatcagtgactgccctcccgcctgctccaggccttgccgaaaagcaacagccggtcgggactgatgaggatatgcagggaaaccacgctattgacaaaaaagagacgcaaacagccacagtcaacgaaaccagccctacattgtggaaattgatgcctttttacgaacttcagaaaccaggaaaaaatgaaactgaaaaccagccgtctccgatactaaaacctgggcaggtaccggaaagccagcatcggaccgggtcagcagtgcaatgtgtaatgcccccgacagcgagaataaccatacccaacgcccgcgcaggcgaacgtttctcttcgccggttgccatcatactggatgagggtggacgggcgacgataagagacgttgtctttccccgggacattggcttgtcgtataaaaaagaacaagggttgctcactggcatacccactgaaattggcgatattgagctttcagtactgtggtcatacacttcgcacgacgaatgcgaaacaaagttactttttgtagtaaacccggatccgagaagcctgtggaaggtaatagaaccaccagcagacgctccctaccctaaggcccatctggactctgctggcctggtcagagataacatatgtattgctgccgccagtcgccggggccgctctcatgagcatgccgggagcttcagagatgatgacttctatatcaaccacagccaggaaacaggatggtctgtcatgctggtcgcagacggggccggtagtgcagtaaattccagagagggatcgcgaattgcagtcatgacggctggcgattaccttttcaatcagctcagtggagtgaaaggcgtccgtttaaaagagcatatcacgacttgggaagggagcgatcagcaggcaaccataaacgccatgcttcatcattttaaacaggcagctacgctcgcggtcaacagcatccagaacgaagccatttgtgcagaacaacctgtgaaatcctattcaacaacccttcttgcaactgtagcactgcgaactgaaaacgagctgtttgcagctgctttctggcttggcgatggtgcgataggtgcatacagtccttcaggtaaagtcaggatacttggaaatcccgatagcggagaatacgcaggacaaacccgcttccttgaccagagcattatcgcagacccatcatttactggtcgcatcagcgtgggcaaatggaatgacgtatctcacttgatccttatgaccgacggcgtatcagaccctctgtttgagactgataacgggcttcgcagtgacgaaaaatggacccgtctcattaatgagatctcccctatcctcgcagacgccagtattgcgtctgaggggttaggcgactggttaaactttttctccactgggaaccatgatgaccgcactattgcggtgttgtggtaa

SEQ ID NO: 199541 - DNA, 810 bp, Klebsiella oxytoca; identical to SEQ ID NO: 158973

SEQ ID NO: 199542 - DNA, 612 bp, Klebsiella oxytoca; identical to SEQ ID NO: 144625

SEQ ID NO: 199543 - DNA, 423 bp, Klebsiella oxytoca; identical to SEQ ID NO: 158974

SEQ ID NO: 199544 - DNA, 393 bp, Klebsiella oxytoca; identical to SEQ ID NO: 144445

SEQ ID NO: 199545 - DNA, 750 bp, Klebsiella oxytoca
atgaataagactatcaaggcatcattcttattactggcatcttgtacggcctttagcatgaatgcccagacagtgaaaactgacgtgcttcctgatgcagcactgaagaaattaaaagaagttgggctgtccatcgagcatattgaaccatccccagtaaaagatatttataccgtgatttcaagagaaggcgtgagttacgtcagcaaagatggtgattacatttttaccgggagcttgtttcatgttaacggcaaagatgtggagaatacaacggaacaggcgatactgaaaggcgtcagggagtttgctgctaaaacaaaatccatagaatataagtcggcgaatgaaaaatatcgcctggcggtgtttactgatataacctgcgggtattgccagaaactacatcatgatcttcaatcctatctcgatgccgggatctcaataaaattcctcgcttttccgcgtgcaggcctgaactccgtggtcgcggggaatatggcaaaaatctggtgtgcggccaaacctaatgatgcgctggatgctgcaatgagctcgatatcaatcattccggaaggacggcctgacgcggcctgcctcgatattatcaaatcgcatttccaggttgcttcaactattccgcttcagggtacgccaaccatggtaacgctgtcgggtaaacctcagttgttcaccggctggttgagcccggaaaatctggtgacccgcatgggcaccgcacaaaagtga

SEQ ID NO: 199546 - DNA, 516 bp, Klebsiella oxytoca; identical to SEQ ID NO: 144447

SEQ ID NO: 199547 - DNA, 567 bp, Klebsiella oxytoca
atgctccaatcaatatacgaattcctgtgcaagatacgctgttctccacagaagcttagaaataaagacttggacgggatcttgcctcaggatgaatcaacagctggcttatggggacctctgccattaatccatattgttcttttcctggattttgatggtgtaatccacaaatgtcagaatgaatctttcgaacggatgtatttgattgagaagttacttgatgcaagtccttcaatgttcatcgttatatcaagctcatggagagaatgcgggagtattacctacctaaagtcacttttccgctcgccgtacagagaccgggtaattggcgcaaccccatccctgtgtctaccctcggggggaataggggtacgtgcagctgaatgtgaagaattcgtggccaggcaccaggtaaaagcctttatctgccttgatgacgatacgaccctgtttccgccagaatatccgcacctgatccgtacggattattacacgggggttaaagaaaaggacataacggatctgatagccagatataacctactgatggcccgtttttattaa

SEQ ID NO: 199548 - DNA, 3990 bp, Klebsiella oxytoca; identical to SEQ ID NO: 144449

SEQ ID NO: 199549 - DNA, 1416 bp, Klebsiella oxytoca; identical to SEQ ID NO: 144450

SEQ ID NO: 199550 - DNA, 1047 bp, Klebsiella oxytoca
atgactcgattaacgttactgccttcaaagatgttagtgctgatgtctttgtttataactggcgtccatgcaaatgaagaccagacccttatcaaagacaccccatttgtgtcaggacaagcctttaagaaaggttttttctggtatgacgacccagcccggaaaactgaggaagaaattaatgagactacgcctcctgttgcatcttcgtcccagccagtacaagaagaaaagattgatcttaattcaaagtggctaaaggacaatatgccccggcttttgactcaggcaatggataatccgacccctgaaaacttatcgaggttttatacagcgcaacgtttaatgttggatatcggtacgcgattttcggataagtcgaaagattattttcttaaaaatccaatgatgtctgaaaaacgaagacagccggttgagaaggttgccttggatgcacatcgtacggttgtggaaaaaaaccagcagacggtaatgaaagatattttcacaagatccgggctctttttctttttccagagtacctgtgagttctgccacgaagaaagtcaaatcctccagtttatgcagaattactattcggtcgacattctccctgtcagcatggatggcagaccattacaaaatgggttgttccaggatttctctgtccctaatgcgcagattattgatcaattcaaaatccgcgaagtgccaactattttccttgtgtcgaaagacgggtcatcagcgcaacgaattagcgaaggtatgatcactgctgaggagctcaagaatactattattctggctgcaaagggcatgaacctgattgatgatgcctcattccaatccacgttagatattaagcgccaatataccattggtgaggatggcgtaattacagtgaataaatcagaaatggaatctgacccgttcttattgcaacgaataatggaccagaagttggaagggtacgatatgcctacagcggaccctgtgaactacttgaatgttggtggcagtttaggaggcccatatgcgcgctaa

SEQ ID NO: 199551 - DNA, 513 bp, Klebsiella oxytoca
atggctaaagtcgatcaaactaaagctaacatgttgttgagcgctacaaaaacgatgtcacttggtgcgaataaaaactcaataagaattctttatggaagccatgttgcagaaaatattgatttcagatcggaacctcaacaaaacgttaaaaaaggtattcgagggtggagtcgtcgttcggataaccgcagagcattttctgcggttattgatgtcgcggtaaattacttcggttttgatcctattcatccggaatccagcttccgcaatattgacttcaaccgaatcatgagcgtgctgcataaccttgggtatttcgtctgcgcccctgaggtcaataaaatcattgagatcctcacgtcaatgaaagaaatagaggaactcgaaacttgtgcgaaatgcaagcggccttacattgtcccgtataccaatgatactcattgccctcggtgcagattgtcgtcaacggtctctgcaatagcgagatattctcaggaggagttagattag

SEQ ID NO: 199552 - DNA, 798 bp, Klebsiella oxytoca; identical to SEQ ID NO: 144451

SEQ ID NO: 199553 - DNA, 498 bp, Klebsiella oxytoca
atgtatcatccccggccgcgctcacgcttaccggggctacagctctgcgcggtatggtcgcccggacaggcgcgtcaagcgccgcctccggggaaatccccggttgcgctcacgcttaccggggctacagttctgcgcggtctggtagcccggacaggcgcgtcaagcgccgcctccggggaaaccccggtcgcgctcacgcttaccggggctacagctctgcgcggtatggtcgcccggacaggcgcgtcaagcgccgcctccggggaaatccccggttgcgctcacgcttaccggggctacagttctgcgcggtctggtagcccggacaggcgcgtcaagcgccgcctccggggaaaccccggtcgcgctcacgcttaccggggctacagctctgcgcggtatggtcgcccggacaggcgcgtcaagcgccgcctccgggaaaatccccggtcgcgctcacgcttaccggggctacagttctgcacggtctggtag

SEQ ID NO: 199554 - DNA, 558 bp, Klebsiella oxytoca
gtgctgattggttatgccagggtctcaacaggggatcaaaacctcgacttacagaaaaacgcgctgattcgcgcagaatgtgaactgatttttgaagataaagccagtgggaagaacgtgcgccgaccaggtttaaagcaggcgattcgacgttcgcgagaaggcgatacgttggttgtctggaagttagatcgactggggaggagcgtcagggacctgattacccttgtctcagacctgcaatcacgtggcgtacatttccgcagcctgaccgactcaattgataccagcacgcccgcagggcgttttttctttcatgtaatgagcgcccttgcggagatggaaagggaattgattattgagcggacgcgtgcaggactggcagctgcacgggctaaaggcagaattggagggcgtaaacgagtgatgaccgaggaggcagtgggaagagcccagagaatgctcgcgaacggggcttcccgccaacagattgcagagatttataacgttggggttaagaccatctacaagtatcttccagtggcccctaagttgtaa

SEQ ID NO: 199555 - DNA, 591 bp, Klebsiella oxytoca
atgtttgatatttataatttattaaagcaaatagaagagaatacgaaacctgataattctgctatttggattgctataatatcttcaatatcagctattgctggcgctgctattggtgcatttttgttatatcgaggcacaaacaagcaaattaagtctgctgctgctactgaagataaaaaattaaaagcaactataattaccgcagaaagacttcgttggcttcaagaactaagatcaagaagtagtgagttttatgcgaatctcgatatgaattacagcttattaaaacgacaaataaatccgcagacaaccccggcatatcaacaagctggggacgagttggcgaaaactgtaatgattgagtgtaatcagataattttgttacttaatccaaaaaaacataatcaacaaacaatgcgcgataaatgcaatgaggctcttactttttttcaggaatgtgtagaactaagaaatagaggtagttttaattttgatgatgtaaaatacgcagaaataaaaagtcagtattttaatgccttgacagaaattggcattgaaacatggaagcagattaaagaattaagttag

SEQ ID NO: 199556 - DNA, 735 bp, Klebsiella oxytoca
atgaaaagcaaaaagatagcgatgacgatagtgctggcaagcctggcggcaggtctggttaacgaagccggggcagcgattgcgctggacagaacgcgggcgattttccccggttcggaaaagagcatttccctgagtattactaacgacagtacgtcaatgccgtacctggcgcagggatggattgaggatgaacacgggaaaaaaatcagcggtcctctggtggttgttccgccgctgcagcgtcttgaagcgaaagggaagagcatgatgcgtatcaacgccatggcggatgccgcgatgttacctcaggacagagagagcattttttatttcaacgtgcgcgaggtgccgccaaaaagcgagcgacccaacgtgatgcaactggcgttacacaccaaaataaaattgttctatcgccccaaagccattctgccggagaagtatagccgctgggataaccaactggtgctgcataaagtgaacggcggttatcgggtagaaaacccgacgccctattacatgacggtgatcgggattaccgctgcgccgaaagtggcggtggccagcggatttcaaacggtgatggtaccgccgaagtccacctcgatggtcaatagcgcgcactataccgtgccgcatgtcaccacgattaacgacttcggcggtaagccaaccctgcggtttagctgcagcggtaacatctgccgggctgcggataccccggcaagctga

SEQ ID NO: 199557 - DNA, 1620 bp, Klebsiella oxytoca
atggccaaagcaccaaccaaaaaagccaaagcaaagaaaggctttgaagacacattatgggataccgcgaaccagcttcgtggcagcgttgaatcctccgaatacaagcacgtggtgctgagcctcgtgttcctcaaatttatcagcgataagtttgaagcccgccgtcagaaaatgaaagacgaaggccagggcgatttcctcgaaatggaagtcttctatcagcaggacaatatcttctatctgccggaagaggcgcgctggtcgttcatcaagcagcacgccaaacaggatgatattgccgtgcgcattgataccgcgctctccaccattgagaagcgcaacccgacgctgaaaggcgcgctgccggacaactacttcagccgtcagaatctggaaaccaagaagctggcatcgcttatcgataccatcgataacatcgaaacgctggcccacgaaaccgacgtggaagcgctgtcgaaagaagacctggtcggtcgcgtgtatgaatacttcctcggcaagtttgccgccactgagggtaaaggcggcggcgagttctatacgccaaaatgcgtggtgacgctgctgaccgaaatgctcgaaccgttcgagggcaaaatctatgacccgtgctgcggctcggcaggaatgtttgtccagtcggtgaagtttgtcgaaagccatcaggggaaaagccgtgatatcgccctgtacggtcaggagctgacggccaccacctacaagctggcgaagatgaaccttgcgattcgtggcctttccgctaacctcggcgagcgcccggcggataccttcttcagcgaccaacacccggacctgaaagccgactatattctggcaaatccgccgtttaacctgaaagactggcgcaacgatgccgagctgaccaaagacccgcgctttgccggttaccgcacgccgccgaccggtaacgccaactacggctggattttgcatatgctttccaagctgtcggccaacggtaccgccggttttgtgctggcgaacggctcgatgagctccaacaccagcggcgaaggtgagatccgcgcgcagatgatcgaaaacgatctgatcgactgcatgattgccctgcccggccagctgttcttcaccacccagatcccggtgtgcctgtggtttatgaccaagtcgaaggccgccgatccggccaagggctatcgcaaccgtcagggcgaaacgctgtttatcgatgcgcgtaaccttggcaccatgatcaaccgcaccatcaaagagctgacggcggacgacatcgccaccatcgccgacacctaccatgcctggcgcagcacgccagaagagctggccgagcgcgttaagcgcggcgacagcaagctggcgcagtacgaagaccaggccgggttctgcaaggtcgcgactattgcagagatgaaggtgaacgactatgtgctgacgccaggccgctacgtcggtgccgccgagctggaagatgacggcgtggcatttgaaaccaaaatgcgcgagctgtcgcagacgttgtttgcgcagatgaagcaggcggaagaactggataacgcgatccgccagaacctggaggcgctgggttatggggaataa

SEQ ID NO: 199558 - DNA, 1059 bp, Klebsiella oxytoca; identical to SEQ ID NO: 192662

SEQ ID NO: 199559 - DNA, 297 bp, Klebsiella oxytoca
gtgcagagtgaaggctaccactttgttctgacgccggtattgctcaattccctgatgctggcgctgctggccatcgtcttcaacaacctggtgggacgacgctacccgcacccgctggccgcggaagaggtaaaggccaaagccgtaccgctgggcctgtcggtgacccgcgatgatattcacgcggccctgctggacggccagtttctcgatatcgatgaagacgacgtgcaggagctgctggaaaatattgaacataaagccagacagcgtatcgccggcgcccggcgatcctga

SEQ ID NO: 199560 - DNA, 207 bp, Klebsiella oxytoca
atgggggtcaaaggtaattatctgttcaggggagacaaaactgcctgtggtggcgtcatcattgatggatgtcccgatcatcagcattttggtaaagccatggcctgcgaaggccacagagtaacctgcggcaagcatgaagggctttaccgtattgcgggagggatgaatcgccacgggtttaacagacacctcagagtcatttaa

SEQ ID NO: 199561 - DNA, 198 bp, Klebsiella oxytoca
atgactgtccacgacgctgtacccaaaagaaagcggcttaacggtcagcttcaactacttctaaaacaatacgttggtatgtctcagacctttaaaggtgaaaatgcgacacaaactgtgatacagacgaggcataccaacggctgttccatctctaatatccgtggcgattcatcgcataggtctaatgcttattga

SEQ ID NO: 199562 - DNA, 822 bp, Klebsiella oxytoca; identical to SEQ ID NO: 144511

SEQ ID NO: 199563 - DNA, 825 bp, Klebsiella oxytoca
ttgcgaaaacatacaccaatcatcaaatgggcggggggtaaaaccaaactgatgccattcatcagtcagcatttcccacatgatcagagccgccggtgggtcgaaccatttatcggcgggggcgctgtgttccttaacatgtttgccaccgatgcactcttggcagacagtaatccggatctaatcaatctgtaccgcaacatccagcggaataaatcggcattcatcagagaagtgaatcttctggcggaaagggaatttgataaagaggattacttaaagctgaggaacacgtttaacagcaccagtttggatgatgccccgctgcaacgagcagtccttttctacgcaatgaaccgactcggatataacggcctgtgtcgttacaatctgaaacgtaagtactcagttccgtgggggaatcgatccaagttaactctggacccccagaaagtcgattatctctcattcagactttctggcgttgagctgacaaccgcagattttggtctgacgttggagagtgctggtggttgtgaccaaatttattgcgatccgccttatgataaaatcagcaaaaccagctttgtcagttatgacggcataccgttcaataagagcgcacatgttaaactggcggatatgctggtggcagctcatcgtaaaggggcttcagtggccatatccaacagcttgactccctttacgctggagctctatgaagaacgcggttttgaaattcatactctcaatgcttaccgttctgtcggcagtcaatcaaaatcgcgaaaaaaggaaaaagagatcctggctgtccttcgttaa

SEQ ID NO: 199564 - DNA, 1155 bp, Klebsiella oxytoca
atgagtgatctgatgactgattcccagcaaactaactcacgggtctttaaatcacccctcgtgtcattttcaacagtgacaggttccggccgattcgtcagtggcatgaagcagttccgcgacgcgaaccctgacctttgtaatgaagtcactgaacaaaaagcttgggctatcaacccttcagtggttcaaatctcgccaggcttcaactcccgtgagatggggatgggggaggcatattaccagctgccggaagtcgtagatcatctcaataacatcaagtgtgcattcatccggggtgattacgttgaccctatacgcgttctgatcaaagacggtattccgtacgttcgccagggccattgccgtttaaaagcggctttaatggctcaggcagaaggacatactgacctcaccattctttgcatcgagatgaaagccgatgagatcagctgcgaactgacgacaattgacgggaaccgtggtctggctctttctccagtggcactgggtgaatcctacagacgtcttcaggcgctgggcggatggtcgcttgatcgtattgccgaacgtgagggcaagagtagtacaaccattgctgctctcattcgtctgaccggatgctctgtctacatcaaaaaattaatccatgccgatgctatttcctatgttgcagtcctatcccttattgatgagttcggtgaaacggaagccatctctcgtatcgaaaaaatgatcgccgagcttgagaaagctgattcaagcggtatcaagattaagaagacgccacgtggcagtattcgtgttgtcccttccgattttaaaccggcacgtgttccacctgttctcgccacaaaagccgtagaaggggtcaaactcatcactacgagtttgttgcagaaactcggtgatatccaacttcccgaagtgaccgactccagcgaagatgaagaaatttcctttacgttgaaccgaagcatgctggagatgctcaagaacctgcaaagtgagatcactgaagcagaaaacaagcagcttcgccgggtcgaaaatcggcaagctcgattgaaaggggagaaagtgacttacaaatccgcgaaaaacacaaatactggcggagaaccacaatctgaagcaccaccagcacaggcctga

SEQ ID NO: 199565 - DNA, 1677 bp, Klebsiella oxytoca
atgtctgctgttgaatctgatttcccccaaatgggcgccccagggaactctctggtcgcttgtatgcctctaactggcctcagtgttaacgaggataactttctgcccgaaatgcgggaagagcttggcatcattgccagccaggtcgaatcctataacgaagagcttagtttactgaggtccatgtccactcagtttatgaaatacggaaatcagaagctctattcctacctctcgggctataaccatctcatttcagaagcagatgccttgtacgcagaaaacgcacttcgttctgagtactggaagcgggtaatggcccttaccgatgtgctgtccgtgatgtctgacgaaaaaaagaacgaatgggacaagcaatttactgctgaccgatatcaccggcctccgcaggagatccctgagtttacactcgacgcagtagttgccacggttgtcacattgctcaatgaccggcatcagttcattaaagagcgcgtctatgccgtttttcaatcattaagccgtcaccacaaaaccaataaagcgtttggtttctcaacccgcatgatcaccgtcggcgtctgtgaaggggtgaaagacaagtgggtaaaacttaaagttgaattcaaagaatcaggactcatgccactgtcggaactgcgggtgatctgttcttatttccggggagaaacagttaaaccggtctatgacacgaaaaaaatggtagagaatatggttggtcatgctgggttcagaaattggatcagcctggatggcaacagtattcgttttcgggtttacaagaatggttcgatgcacattgatgtacatcctgatattgcagaacggcttaacaacattcttgctgccattgtccctctggcgctgcctactgaacgcttagcccattacaaagccacgttgcaggagttcccggcactgaaacgctgcatcgattttcattcacggatgcagctcgcagagctggaattcactcggaatgaaaaggaatggtccagctggacatcgctcggttatgccggtgagttcgctgataaaacgcggcaggtgaacgcggaggttctgcgtttcctcggtgcccggattactagctaccatgtgacatttgattatgacccgaccgaagtgatgcgcttcatcggtcatatgggtgccatgcccgatattgtatcccaccagttttacccttcatcgctgcgactcagtgaatacgtcgcatccattattgcgaccggggagggggagcggctgctagagccaagcatcgggcacggggatttgctgcaatgtttccctaagagcgtcaacgttaccggcatcgaactggatacactgaattgtctggtctcccgagctaaaggttacgatacaacggaggccgattttctggcatggtcagcagcgaacccgaatcagaaattcgactgcgtggtgatgaacccaccttttgctgacaaccgggctaaactccatctactggccgctgcgtctcatctagtttccggcgggcgtttagcggccgtcctgccgctatcccttcaggggatcgataacctgctgggcgagggataccgtgctgaatggatggacaccttcgataacgagtttgacaacactgccgtctccgtccgtgttctgtatgtagaatgcctttaa

SEQ ID NO: 199566 - DNA, 177 bp, Klebsiella oxytoca
atgtctgaaatctcacctggcctgccagaggaccaaaatgatgttgaatttatgatggatgatttccagcagagcctggggaaaagtaaaccggtacatgaagtacaatttctgggagagtcaccgcaaagtgaagaatccgccaacgctgccgattcgccctggtttgaaaactaa

SEQ ID NO: 199567 - DNA, 2388 bp, Klebsiella oxytoca
atgaaatgcagggcgatacttttagcaccactcatagctttttcgtttacggcacaagctgagattgcagagttaagattcaatgacactcagaatcaaccaaagattgttgttccatctgtgcagtggattaatccagcaacctcattcgaggctgatgtaatctccggcttagaccggtacgtccagttgtcgttacttaatgtcaacggtgcaagcttgtggagcacgaaaagtagcaaagttacggttgatgaccgtatgacctccagtagcgggtatgactattatggaaaaaggttaagtgtccctgcgtttggtgaagataattacaccctgagggaagtgatcacagatctccagaataatgaaatttctcgccgggactacgttatatctatcgaccgcactccccctaaaactagcacaattggatatacgcgaaatggatggcaatatggtagcgaagccatctttaccagcgttccttcaggtatgcagtatgcctctgttcaggctctcgtcttttcaggcctttcagacagtcgctctggtctcgaccgggctgagtactttcttgtcgattcgaacggcgttgaacgaaagagaggggctgtaattaacctggtcgataattcagtaaccgtccaaaatactactgcgagcgatccagccctggcgccagcttctcagtctgaataccgtatgggcctttatgtttatgacaaggcaggaaataaagcatcagtaagcagacaaagtgtgattgatcgggtcaaccctccttctgttctacaggtgcttaataccaggtcaaatacctgggaaaactactcagctgggataactgtttacagtaatccaatatcattgcgggtactcaggaataaaagtaactttactgctgctaataaaacaagctttgggtgggcagatgccaattatcaaagttctgacagcacatataatatttattcgttcaattttgttttccccagtaccggtgatatttatcacgaattccagacacttgcgggaggcgttcgtcggtaccatcactctgagttatctttcactccttccccaaccatggaacttgcaccaaaggtcacaagcaaagaaatttttcgtagtgataccggtaaatggagcagtgctactgggaatgtaagaactgccaaatttacccaaatacgcgtgactaccgaacctcgtaactatgtacaacgggttgcagctaattcgaaccgtaactggtactgccttatcccggtaggaagcactggttgtaccatgaacgtggattatacctttacttccgataaggggatgcaatacatccatctggtctcaggtaaagacggtactgctatttatgataatctggctggggcattcgtagtgatttgggataacaacccaccggttattaacgccgtaaaaattaaccgtatggataaaaatgtaaccatgacggttactgatgatgaccggataaatggatggcaaataggagcatgggatactcgagaatttggcgtggtgcttaaaaccgaaacggggaatgtgattgacctacccgccaggacatggacagagagtgattttaaaacaaaaaacgcggtcatttcctatgctgatctgccggacggcaaatataccgttctgtccgcctatgcaagagatcttgtgggcaacacggcaaactacgtgataaatgatttgcttaccattgactccactgcccctctaatttcctaccggtatctgaatgatgatcctgaaggcaaactggttaagggactagaaaacctcagaattagtgtagctgacccttcaggtgacgcctcgcttgaatcactggtgttgagcggtggaccaaacagtgaacaggtgacattagcttattccagtcagggctcaggagtttatacgccagagtacccgcgtatctttcccgtaatagcaaaagaggatggcatttatacaattgaagctcacgcagtcgatgcctctggaaaccggtcctcgaaaaagctcaatttcctctatcaaccagcaaacatgatcactctggacaggctacgtacccttgctactgcggctgcactaaagaccacggataaccagccactggcttttatccggacaagcgtacttcgccgaaaggatggttctgtcattactgggcagttaaacggtacgctgtccgtgcggaaagatgctgacttcccggtaagtgtagctggcgtaaccgttgcgccaggagagacaaaggcaatcatttttgatatggggcagggtgaagaacgtatttattctgtcacaccaggaaagagtggcgtttctggtacatctgagtttgccgtggaattcccgcagttctga

SEQ ID NO: 199568 - DNA, 2457 bp, Klebsiella oxytoca
atgcgtaaaatactgacaggctgtatcattgccacggccatctcttcaacttatccggcggcggctcagattttcagttattcctataccgacaccaatcagctggcaatgacgcttaagcctgcaacgcagagctatctcaatccggctggcgccctgaccctaaacttaatttccggtctagaccggtacgaacgtgtgactgtaaccagggacagtgataaaaaggttatgtattcgggactaacggccaagataagtgttgcagaccgcattgttgctgccgacggcacagagtattacggaaaggacatggggttacctgcacttggtgaagggtctttcacggtaatcaatgacacgctagatctccagcaagccgtcgtaagttccacaacgtatcgtttcaccatcgatactacagcgccgaagtacaccagcatatacccaagccagaacgcaggctatgacatggtcctgagtggaccactttgggagctcggtcgcggaggttctggccagttttccatctttgctgacggcgttgatgatgcgtatggcatagacaagatccggttggtcatcaagcgcagcaatggaacagtcgtttccgataatacactcagctacgacacggcggcaaaacgtgccttttacccctggataaaggaagcggtcactcaacctggcatgcccaccagcgatctcaatgaagaattcaccttcaattttatcatcactgataaggccggaaacacgctgaatattccgccgcagcgctttttatttgatgaccagatgggggaatatacgccctttgcggtccatgactcacgagtcagtacgagtgtggttccagggatctcttcagggtacgtaccgtttgtgcgggggctctctgtactcgaaaacccgtaccggatggtcattcgtattccccgaactaactggcagccataccgtaacggcggcatcaccattcttaacaattatggcggctctaaggttatttcagaagacacgacctatgtgtacgtagaagtgaagctcccacagggtactctggatggaaactactatcgccctgtgaacaggtaccaatgggccggtggcggtctgactcagtacgcctcctggctgaactgggacccggcggcggtaaaaagtcctgcgtgggggagtcctgcgattgagcgacagaagtctgacggcacttggttcaatagcgtcgactggaaaaattttctggcttcagatatgccggtgaacctaaccaagatccgtttcactgtgcaagcacgcccctacgaacaagcaattaccggcagtgccacctgcaagatccctgccgggtcaacgtcgtgtactgtcgacctgacacaggcgattacaaacggtaccaccggctatatacatactgcctatgaagtgcgttcgacaaccgagtccaccttcttcatgccgctctgggaaaacatcgcctggcatacaaaggggcccacagttactggctacaactacaatgatgcgaccaacattcttcaggtattcgtcaacgagccaggagacggatggtatttcgatgccgttaaactgagccgggtgtggttgtctgacaaatcccgcaataacgcggatatcaacgtgacaggaaaacaaacggggcgtaacacagcaaccgggaattatacttacgacttcaacctgaaacagatcccggagggcagctataacgtgcagctcaacgcccaggattctttcagcaacacgggaagcttagcctacaaaaccgtgacggtcgataactcgccgccgtccatcagtatcaactacgaaaacaaacctatcaccagcaacgtgacagtgttcggcttggaaaacgtccgaattcagctcgcagatacgctgaccaaaccctcgttaactcgcatgacgcttcgaggtggaccggtatctgatgctgttgagttgtcctgggtaaatctcggaaatgatctctatacaccgaattacccgaagatcttcccgtcacttaatgacggtgaaacctacacgttgaccgtgtatgccaaagacgagatgaacaacgttaaagaaagcgccgtcgaatttaactacctgccgaacaacctggtacgtctggagaaccttaagaccatctccgtcagtaccgccctgaaaacgtccgacaacacgccgctggctgtactgtatgccagccagctgcgcaagaaggacggttctatcgcaacagggaaacaggacgcgatactgacggtacgtaaggatgcggccttcggcgttacggtgaatggggtttccgcagcaccaggggagagcaaaaacgttcagctggatctgggtctgggtgacagccgcagcttcccgattttcccatcgatttccggcgtcagcggaacgtcagaatttatgctgaatatcgaggaactgaagtaa

SEQ ID NO: 199569 - DNA, 1200 bp, Klebsiella oxytoca
atggctaagatcaaactcactaagtccgctgtcgatgcggcgcaaccccaggcagaggccgtcgaactccgggacacgctggtccccggcttcctgtgcaagattaccccggcgggtcgcaaggtgttcatgctccagtaccggacgaacgctggcgagcgccgcaagccctcgctaggactgtacggggagctgaccgtcgaacaggcgcggtcgctggcgcaggaatggctggcccaagtccgccgaggcggagatcccgccgcagagaaggcggaggcgcgccaggcacctacggtcaaggagctatgcacgaagttcatggaggactactccaagaagcgcaacaagctcagcacccaagccggctatcaggctgtcatcaatcgcaacattattccgctgctgggacgcaagaaagttcaggacgtgaagcgtcctgaaatcgccggactgatggaaaagctttcgtacaagcagaccgaggcgaacaaggtattcagcgtcttgcgcaagatgttcaacatggccgaggtatggggctatcggcccgacggtaccaacccttgccgtcacgtcccgatgttccctgccggcaaatcgactcacctcatcagcgacgaagaaatgggcaacctgttccgacagctcgacaagatcgagtcggaggggctggagaactacgtcatccctttgggaatccgcctgcagttcgagttcgccggccgccgctcggaaatcatcgcgctggaatggaactgggttgacttgcagaaccggcgcgtcgtctggcctgacagcaagacaggcggcatgtctaagcccatgagcgaggaagcctatcggctactctcgacggcaccccggcaggagggtagccgctatgtgctgccttctcctagccacgctggcaagcatctaaccacgggcgagtattacggtggctggagccgtgcgctcaaggcggctggcgctacgcacgtgggcacgcacggcatccgccaccgttcggcgaccgacattgccaattcgggcatcccggtcaaggtcggcatggcgctaacggcgcacaagaccgtcgtcatgttcatgcgctacgtccacaccgaggataagccggtgcgagaggcggccgaactggtggcgaatcggcgtaagacgatcaccgggatgcagggagccaaggaggtggccgcatga

SEQ ID NO: 199570 - DNA, 1068 bp, Klebsiella oxytoca; identical to SEQ ID NO: 159012

SEQ ID NO: 199571 - DNA, 1248 bp, Klebsiella oxytoca
atgaaaaatatctttgaagaaatcaatgaattttcttcggaaaaaatcgcgttattcagctttgggaaattttgctacgtctttcttaataaagacccgatctttgtcaagaaattgcttcccctcatccaaacctctctggcaaatgagagctttcaggcagacgtaatgcgtgcttatacggagggctgcatgaatgaaaaggcggccattctgaaagaatttgaagccaaacgcgaccatccaaacgcagccaagttttatgggccacagcttgatctagtggacaagcgattggctataaagacaatccagcatttaatggactacttaaataattatctcaacgagtatccgggatcgctagaaattctcaacaattcctacaagcatatccatgacgaagatggtgtttcgtacataaaagaaaattacgcaaattatcgcattggctgcattttttattccaagcaccaatcaatcatggggagggctgagatgctggagctaaaatattccaaggtagttgaacgtgagtacgagaaaattggaattgacataagaaaggaagatgctcagttctctaaatatagtcttgtcagcctgaacgagaatattcagatattcaacgacaaggatagtcagacaatacgcgatgaacgcatagggcgacacttctggataaaagttccgaggaagctgcttacctctatcgaggaactcattgaaaaaggaatgctgtccgaaatagcattcaggattgattacgtctccgattatgtccctgcaatggaggagatggagtttggcgctccgttgcgattgaaaatatcttcccttcctagattgtcaaagttctactccaccgataaatatgagaacaatctatggattcaccatgacgcagagaagctaagtttgacttttgaagaattgatggaggactttgaggtggcaggcgacgacgtcgtaacgcaagtcatccatcttgaatacagttcaaaaggcgatgatttttttataactcacttggatcacgaatttatcgtatatacgttggatagctatcaagaaagattgagcaatgccaacatcaaggggcatagaaaaataaagacattcaaaatagataactcaatgatcccgtttgatataaatattagcggggatctttttctgtttcaggttctcgattcgtatttaaaaaatgatgacttgattcgtgaatattttgaaaaaattaactga

SEQ ID NO: 199572 - DNA, 1800 bp, Klebsiella oxytoca; identical to SEQ ID NO: 159009

SEQ ID NO: 199573 - DNA, 2139 bp, Klebsiella oxytoca; identical to SEQ ID NO: 159008

SEQ ID NO: 199574 - DNA, 1410 bp, Klebsiella oxytoca
atggcatctatcagaccttcagcattcaatcaacgtgagcgtttggacggcggccccttccttgtcattgaagcagccgaaccggaagaggaaggcattaacgttttcttcactgatattcccgcagcggagcgcaagccggattcgccaatagcgagactgctcaatgtgtgtccagacagattgaccatttggcctcttaatattcgagaagatcgcgacgattacctgcaacctaaatacggcacccttgaacgcatcgtcgtcgctcggcctgttatcgagccctacatactgccagagactactgacgatgtcgttgggcttcttgagcagttgccggatgggtttgccaaagattttcgattcggtttggggcttctgtgggaatatcggcaaatttgcgaaacagccgccagcttagaaaacgtaagcatactcattgtccacaaaggaaatgacgcgaaaattgattcgccattctttattctcggaataagaagatttcatgaattaagaaaagaattaaatcgcatagcctctcgccaccagagagacgcgcgcaaggacaagcaatttcatgtctaccagaccttattacatgctgccgattcagcacaatttcccgctctaaagaagagcgtaagacctgatgcactaacggaaatgaccgatggtgggcggcagcatgtgacgctttccaagcgtgatcggcgcgccgctgttcgcatggttcaagacaatatagaagcactggcggaatctgagccgcgctcgctgctggcattaaagaatgatattgagctcatcacactgaatcaactgattgagcgataccaggaaatgcttggaaaaggactgacggaaagcaagtggcaaagcttctttctggaaaatcctttcatacttagtcttgcatttgccgttccagccatgctggttcaggggcaagcttatgcaggtggcaagcgacttaacgggtccggcggaaaattttcagattttctatacgcatccgcttccacgggcaatcttggcctcattgagataaaaaagccgcaaaccgaactgctaggaaaatctccctatcgtggagatgatgtttttggcccatcgacagaattgggtggagcgattgctcaaattctagatcagcgtttcaaattgcagagtgaactacccgtcataaaaaataacatgaaccgatacgacctccacagctatgcggttcgctgcatagttgtcgctggcatgacgccacaagagcatcagcaaagaaagtcattcgagctcgttcgaaatgcgttcgcagagatcgtgatcgtgactttcgatgaactacttgcaaggctaaccgagattaaaaatgcgctccaaccgattcctaccttagacacggtgccgttctaa

SEQ ID NO: 199575 - DNA, 192 bp, Klebsiella oxytoca; identical to SEQ ID NO: 159005

SEQ ID NO: 199576 - DNA, 564 bp, Klebsiella oxytoca
gtggcttcggttggttcggcgcagagacctgggccggtcctgtttgccgccgtctttcctgagttcatcgcccgcgaaaaaccgggccagcgagggactggccgtcaagggagaagcgcagggttggtgcggcccgcagcgcagcgaggactcggccctgcgcgccttgacggccaggcaccgcgggctacggtcgcgggaaaaagcgatgaacttggggaaagacgaacagcggccaatgggccagggggtgcgctgaaaccaacgccgcgcggcgagcgcccctgcgtgccagcggcacgcctagctggatggctgttggtcgatcaggtgcaacctgttcggtgcatgcgaggggcgccaagcaaggcgcggcggggatgggctgtccagccgatcccctggagggcaagcgccgcgcgcaggccaggagcgaagagacggccggaggcatcagggatcaaagccgcatggccgcgactcggcacgaggcgcggggcaacgcccgcgagcccgacggcggcacgccgggatgctctactgttcacaacaaaatgtaagtga

SEQ ID NO: 199577 - DNA, 831 bp, Klebsiella oxytoca
atgcaactcgcatctcgattcgcttcccattccccgacgctgcgcagtgactacccgctgtccgacgaccaaatccgccgcgtagccccgtccatcttcgcggaggccccgcacgatagccgctccgaacggtacgcctacattcccaccgccgccgtgctggcggaactgcgcaaggaagggtttgaacccttcatggcagcgcaaacccgcgtgcggcacgacgaccgccgcgactacaccaaacacatgattcgcctgcgccatgccagtcagatcaacggcgcggaagccaatgaaatcgtgctgctgaactcgcacgacggcaccagcagctatcagatgctggccggaatgttccggttcgtttgcagcaatggccttgtgtgcggcgataccgtggccgatgtgcgcgtgccgcacaagggcgacgtggccggttctgtcatcgaaggcgctttcgaggtgttgagcggcttcgaacgcgtgaaggaatcccgcgacctgatgcgcgctatcacgctggacgaaggcgaagccgaagtgttcgcccgttccgcgctggccctcaagtacgaccccaccgataacaagcccgcgcccatcacggaaagccaaatcctgatgccgcgccggttcgacgaccgccgcccggacttgtggagcgtgttcaaccgcacccaagaaaacctgaccaaaggcggattgcatggccgcagcgccaacggacgccgccagcagacccgccccgtgcagggcattgattccgatgtgcgcctcaatcgcgccctctggatgttggccgatggcctgcgccagttgaaggcctga

SEQ ID NO: 199578 - DNA, 285 bp, Klebsiella oxytoca; identical to SEQ ID NO: 158996

SEQ ID NO: 199579 - DNA, 255 bp, Klebsiella oxytoca; identical to SEQ ID NO: 158997

SEQ ID NO: 199580 - DNA, 912 bp, Klebsiella oxytoca; identical to SEQ ID NO: 158998

SEQ ID NO: 199581 - DNA, 204 bp, Klebsiella oxytoca; identical to SEQ ID NO: 158999

SEQ ID NO: 199582 - DNA, 408 bp, Klebsiella oxytoca; identical to SEQ ID NO: 159000

SEQ ID NO: 199583 - DNA, 660 bp, Klebsiella oxytoca; identical to SEQ ID NO: 159001

SEQ ID NO: 199584 - DNA, 1206 bp, Klebsiella oxytoca; identical to SEQ ID NO: 159002

SEQ ID NO: 199585 - DNA, 231 bp, Klebsiella oxytoca; identical to SEQ ID NO: 159003

SEQ ID NO: 199586 - DNA, 393 bp, Klebsiella oxytoca; identical to SEQ ID NO: 144583

SEQ ID NO: 199587 - DNA, 1074 bp, Klebsiella oxytoca; identical to SEQ ID NO: 144582

SEQ ID NO: 199588 - DNA, 642 bp, Klebsiella oxytoca
atgggaattaaacctttattaattttaactcttccattcatctccttttatttaaacgcggcgagcctaaacgagttcagtcaaaaactggatgaaggttaccgttacgcctgtaacgcaactcagacgggcaacgcagaggttgcctctctggcgcttgagaactacagggcaaatttcactacctcagacccaaaagttggtttcagccagataatgaatgatgaaataaacaaggttgtctcgaattttttcagaatgggcatgatccaggggaacaccagtactgcggcctgcgagacgccttcggagttgctgagtcagaccgctttggcggtatattcccgacaggaaaaggcggcgttggcatcgagccttgatgctgtccgcttcactgaatatgcggcgcaggcctacccgatttttgattcaatccggagtacaagcatcagtgaggatgaagtaattaatcagattaataaaattgggaataatgcaattataaatgacaagaatgctattgacgccagcaatgcgacaagtgcgatgaaaaacgtagtgactgtacttttttctgcccggagtgacccggaacttatgcaatttatgatgggttatattgatcaacacaaactggattga

SEQ ID NO: 199589 - DNA, 213 bp, Klebsiella oxytoca
atgtccgaaactaaacaggcgtatttgatgaaatttcgtaagtgctcttcatttgacacactggaaaaagtatttgaacgactctgtgaaaagaatgttggtatagtttcactagaaatttccggggcatatgaccatcgaaaagctgaattgacaatgaaaaaactctacgataaagtccccgccagtgtatggaccctggttcgtcagtaa

SEQ ID NO: 199590 - DNA, 1200 bp, Klebsiella oxytoca; identical to SEQ ID NO: 117479

SEQ ID NO: 199591 - DNA, 1065 bp, Klebsiella oxytoca; identical to SEQ ID NO: 117480

SEQ ID NO: 199592 - DNA, 510 bp, Klebsiella oxytoca; identical to SEQ ID NO: 117481

SEQ ID NO: 199593 - DNA, 1830 bp, Klebsiella oxytoca
atgaagcttggacttcaggcgattgatacgagcgacagttattacttgaattacgaccgccgcaagctcttcaacttcatacagaataacggcgagacaattatcaaggcggagtcggttcttccagatgagagggttatcgaccttacgaatgccgccaagccagatcagcttccaagcattgctttcgcctcaacggccattgagccggactactttaagaaagcggcgggccgcatcagagatttgattgggactacggcggtcaatcaagcaatccagcggctgaccgataacccggaaatccgcgaatgggttcaagcaggcttggaaatccataaaaaccacgactcgcaatcctgcgagttctgcggctctccgttcgcccagcttcgtgccgaggcgcttgctgcccacttcagcaaggagttcacggagtttcagagccgacttcagaacgcggcgacatggattgaatctcaaggcgctccagctaatcagtttcccgcatcgaccgagttttataaagaactatcggccgaggcagagaagcttcaaaaggactacgcaactgctgctgaaaagatcgaccagcaaatcgacgcctggcgggaagccctgaaggccaagatcacagaccctgggaagacagacattcagatctcggatgtggttgaagacgatgtcaccaatttcaatgacatcctgaaatcgattgttgctctcgttggaaagcacaacaataagacttcaaatttcaaatctgagacctcaaaaagcaaggtggcactggagcttcactttgctgcggctgaggtgcaagagtttgactatgctggaagtgagaagaagtgcaatgaccttgagtcagaagcaaagaacgaccataaggaaattgaaaaaattagtctagaggtcggagccatagaagcggcgctctcgaatgaaacggtcggggcaaaggagttcaatgacatcctgcatcgcttcattggccgctctgagctttgcctgaacttcaatcagaagaagaaaggctatgagatcatcagaaacggggttggtgagcacgatgggaatttgagcgaaggtgagaaaactgcgattgcatttgtctatttcatcacgaagctcaaagaaaatggaaataacatcaaggatacgatcgtcgtcgttgacgatccggtctcaagctttgattctaatcacttgtttcacgcctactcgtttttgagaacgcaatgcactgaagccaagcaactttttgtgctgactcacaacttcacttactttaagctagtgagagactggttcactggcaccaataggaatcgagtcaaaaaaggcaacgccgagaattgcttcttttatcgcctggatgcgccacctggctcccctcgtcactccctacttgtggatgccgacgactcactcaagaactacggttccgagtaccactatatcttcaagaagctctacgaatatagggcgcacacaacactcaatcgagatgaggcgttcttgaccgccaacctcgcccgaaagcttgttgaatcgtttttcaccttcaaatatccaaggcgtcgaagcgacattagtcaattgatggaggctggcctaaaagattgcaccatcacgacaccagagcttaaagaaaaaatctaccgctttatcaataagtattcacatagcgacgttattgagataacagaggaatccgcagaaaacttggcaggcgaaagccacagcgtcatcgggaacatcttccagtggctggaagaggtggacaagaaacattacgacgagatgattcaggttgcgacggcctga

SEQ ID NO: 199594 - DNA, 438 bp, Klebsiella oxytoca
atgattgtctgcatcaaccgcctcaaacagttcggaatcttcagcgacttcaatggaacgaagatccaaaagttcggccggtacaacctggtctatggttggaatggaacaggcaagtcaacgttatcgaatctattctcttgctttgagcttcgctcgatggttccccgcttcagcacgggccaattttcagtagttctggaggatggctcaacgatcacggaatccacactccactcatcccaattgaatattcatgttttcaatcaacgcttcgtgcatgagaacattgattgggacaaatccgtaaagagcatccttcttattgcgaaagagaagattgatgacttgcagaagctggagaagctgaagagcgagcttcagtcgaaaaagaaggctcacgaccgacaagcaaagcgatatcaagaagcagcgtga

SEQ ID NO: 199595 - DNA, 828 bp, Klebsiella oxytoca; identical to SEQ ID NO: 117483

SEQ ID NO: 199596 - DNA, 282 bp, Klebsiella oxytoca
atggttgctgcgtctgctgatggcccgcgtggccaagtagaaggcaaaaatgaactggccctgcatttgttgggtgaacttgacgttgcggcacagtccatccccctgacgcagtggacaccggttctgttatttaaagtcaaatcgcgtcgcctcagactgctgcgcatgaaagccgcacgcagtgaaaccgataagtcacggtttcagcctgaaatggaccagcttctggctggtctgattgcgctcgatccggcaagcagtgcggtgctttgtgggtaa

SEQ ID NO: 199597 - DNA, 279 bp, Klebsiella oxytoca; identical to SEQ ID NO: 199310

SEQ ID NO: 199598 - DNA, 555 bp, Klebsiella oxytoca
atgcgcgtccgacagcggttcggccaaggcatcgtagatgcgccggttggcgcgggtgattgcttcggcgctcgcccgctcgacggcgttgagggcaggcagaatgaccgactgctgccgcaggtgctcgatcaaggtgctggccagcacgatgcccttgtcggtctgcaaggccatctcggtcagcaactggacggcctgccggtagtggcccatggtaaagggctggaagccgaacaccgtttgcagttcgaccaggtgctcgcgccgggtctgctcccgctgcccgtattcgtcccagctttcgacgctgaccttgagctggtcggcgaccagtttcaacaagggcggaaacggcggctcatcgacgcccaggatgacaccaggaaagcgcaggtaacagagctgcacggcgaagcccagccggttggccgggccgcgccgctgccggatgatggagaggtcggtttcgctgaacgtgtagtgacggatcaactcatccttggtgtccggcaacgccagcaggctttcgcgctcggcggcggacaggattga

SEQ ID NO: 199599 - DNA, 699 bp, Klebsiella oxytoca; identical to SEQ ID NO: 16846

SEQ ID NO: 199600 - DNA, 768 bp, Klebsiella oxytoca; identical to SEQ ID NO: 133624

SEQ ID NO: 199601 - DNA, 444 bp, Klebsiella oxytoca; identical to SEQ ID NO: 140641

SEQ ID NO: 199602 - DNA, 633 bp, Klebsiella oxytoca; identical to SEQ ID NO: 30074

SEQ ID NO: 199603 - DNA, 681 bp, Klebsiella oxytoca; identical to SEQ ID NO: 30073

SEQ ID NO: 199604 - DNA, 357 bp, Klebsiella oxytoca; identical to SEQ ID NO: 112495

SEQ ID NO: 199605 - DNA, 345 bp, Klebsiella oxytoca
atgaaaaccctgtcgccccactcagagctgacgaaagcgttcgcgtacgccgtgagccagtggctggcactgacatactatgcagacgatggctgggctgaagctgataacaacatcgctgaaaattccctacggacggtcagtctgggtcgtaaaaacttcctgttcttcggctctgaccacggcggagagcggggagcattgctgtacagcctgatcggaacgtgcaagctgaacgatgtggatccagaaagatacctccgctatatccttgacgttattgctgactggccgataaaccgggtcagcaacctgttgccgtggcgcatcgagctgccaacttaa

SEQ ID NO: 199606 - DNA, 327 bp, Klebsiella oxytoca
atgacaactcaatccagctcaatacaatacgcttacgcgctagacggcgagggcaccctcacgcacattggcgctgccctgcgctcacatacttacacctgcccaggttgtaagagccccctgaccccggtaatgggcgagttcaacgctaagcactttcgccattcggaagaatgctgtgcccttgaaacctatcttcacaagtgcggcaaagaagcattcttctatcgctaccaacaagctctcagccgtgaaatgcctattaggggttcggggtccaatgatgtaaaaaaccacgctaagggtttaattcattgtttgtattga

SEQ ID NO: 199607 - DNA, 405 bp, Klebsiella oxytoca; identical to SEQ ID NO: 161495

SEQ ID NO: 199608 - DNA, 453 bp, Klebsiella oxytoca
ttgaaagcgattatccatgttaattcgacaaatgacagtattactatccagctatgcggagttggcgctactgaggtacaggccagagagaaagcatttggcaacgtaaatcgcgttgttaatgtctccagtcagcagtatcagggcggacagtgtgtcacagcatctcaagaatttatagatgcctacaatgtagaacctgtttgggactcacgatttgatgagactggtaaggttgtaaatagccttaatgaagactcacatcagtttattgttgattttttggaaagtctgtttattgatgaaaatggcgaactgaattgccgtgtgaaatctgtacagaatgaaacttctgataaaaaaagattagtaaatgagtcttcggcatttagacatgctatggatatccactataaatatgcttcagcgatcaaacctgatactagtcattaa

SEQ ID NO: 199609 - DNA, 564 bp, Klebsiella oxytoca
atgcaaaacgcgacaggatggatgacgctcggccagttctctgaaattttcttcatgctggcactaccgttcttcaccacacgctttggcattaaaaaggtattattgcttggtcttatcaccgcggcgattcgttacggatttttcgtctacggcggtgcagatcaatacttcacctatgccctgctgtttcttggaattttgcttcacggcgtaagctacgatttctattacgttactgcctatatctacgttgataaaaaagcaccggtacacatgcgtacggcggcgcaagggctaatcacgctctgctgccaggggtttggcagtttacttggctatcgtctgggcggcgtaatgatggagaaaatgtttgcttatcaagagccggtaaatgggttgaccttcaactgggcaggaatgtggggcttcggcgccgctatgatcgccgttatcgccgtgttgtttatgattttctttcgcgaatcggatacagagatcaccgctattaaggtgcaaaacgacgattgcgatgctgcactgaaacaagaggaagttaaatga

SEQ ID NO: 199610 - DNA, 936 bp, Klebsiella oxytoca
atggcccagcaccactggcctacctggggtaatgagaacgtggttaacctgctgaagagccagcgcgacctgtatcggtacattaatgaccagactctgcgcatggccaacgagggcctgacccgcgatgagatcgccgctaaattcaagctgccggacagtctggccaatacctgggccaaccgcggctactacggctccgtcagccatgacgtgaaggccacctacgtcctctatctcggctggttcgacggcaacccggctacgctggacgagctgccgccggaagaagcggcgaagaagttcgttgagtatatgggcggcgccgacgctatcctcaagaaagccaaagaagattacaaccagggcaactatcgctgggtagctcaggtagtcagcaaaattgtcttcgccgatcccggtaatctggaggcgcgcaatctggaagccgatgccctggagcagctgggctatcaggcggaatcaggaccgtggcgtaatttctacctgaccggcgcgcaggagctacgcaacggcgtagtgaaaggcccgacgccgaataccgccagcccggataccgtgcgggccatgaccccggaaatgtttttcgactatcttgcggtccatatcaacggcgaaaaagccggaaccgccaaagcggtattcaatatcgaccttggtaacgatggcggtaaatataagctagagctggaaaacggcgtgctcaaccacaccgccgatgccgaagccaaagacgccgacgctaccatcgcgctggatcgcgccacgctgaacaaaatcatcctgaaagaggaaacgctaaaacaggcggaggataagggtgaagtcaaagtgaccggcgacggcgcgaagctggacgagatgctgggctatatggataaatttgagttctggttcaatatcgtgacgccgtaa

SEQ ID NO: 199611 - DNA, 360 bp, Klebsiella oxytoca; identical to SEQ ID NO: 144460

SEQ ID NO: 199612 - DNA, 714 bp, Klebsiella oxytoca; identical to SEQ ID NO: 144459

SEQ ID NO: 199613 - DNA, 1182 bp, Klebsiella oxytoca
atgtttaaccgtaaaaataagaagtcacctgccaatatcaaagaatcgcttgatgagaacgctgaccgtttttataagatgttccgaatccataccacctcaaaagtggttatttcccttctggcattagcagcagcaggggtttcggcctttaatatttacgataagtatcaggaatcagaaggacgaatggatcatattgccgtcgtgcgcatatcgggagaaatgggcaccgggtcagaggccggtgacggttctgtgatagccgcagcactggcaaaagcgtacaacaacccgcatgccaaagctgtcattatcgaggcggagtcaggtggtggcggaccttcagacgcgattattatttatcgccagattaatgcacttcgaagccaccagcagaagattgaacgtatttcacatgcggaatccgcaagcaagacccgtaatacgggtgataccagtgcttcacgctcgcaggacgatatcaatgccgaacaatcgaaacgcaataccctggaggtcctctccgccgggagtggccgtttcattgccgatatggaaaccagctataagcctattatcgttagcgtcaaaggcatttgtgcttcagcgtgctactacgccgtgtcccctgctgacgccatttatgcagatagcagcgctctgaccggctcgatcggcgtacgaatggatcactggaacctgtcccgcgtcatggatacggtcggtgttaaaaatgagccgctcacagcaggggaatttaaagctgcactcgacccttatcatccgctttccgaggccacccgggattttatgcagaagcaaatcctagattccatgcatgaaaaatttatttcggacgttgagcaaggccggggttacaaactaattagccgcccggaggcaaatgctgtcgctctgtattccggccgggtatggacaacgcagcaagcaatccagtacggtctcatcgacggtgacctgacaccagtcgaggtccgttcgcgtctgtctcaaatgtattcgaccactacattcaaaacgtacaacgagccgcaacgatcgcttcgctccgcgctcggtatgttaatgagcctgtcaaccaacatcgaaacgctggcgggcacaacctcccggttacttgattctgttcaggccaccagctatccgacggtgaaataa

SEQ ID NO: 199614 - DNA, 663 bp, Klebsiella oxytoca; identical to SEQ ID NO: 144457

SEQ ID NO: 199615 - DNA, 1104 bp, Klebsiella oxytoca
atggacgagcaaattactctgacacaaaatcaaattttcagttcatctctgaaagtcagtaaaagccgttcgcttgttaaacggcgtatgcagtcattaggcctgaagtttgccgattcgcaggatgttcgtgaccgtctggcagggattgaaaaaggtgctttgaaatctgtggggcaattttgccatgacaacgatgctgagtctttatcagcgctggctattatcctttccgagctttttctgctccaaggggaactgtccaccagcaatgaatacggtgaccatgaaacaagttactggtccgtagctcagggaccttgtgatgaatgggttcagtctcttcttacgagcgaagacggacagcgaaaatttattggttttcgcattacattcgacaattctgaagagcgccgccgccttgttgataaaaattcaaaaatgctggggagttatttacttccctattttgtcaattttacgagtgctgcatcggcgtttattacgctgcctgacagcgtcacgtttaaacaagtacaacgcaataagccactcattcaccctgaaaccacattaagtcacattcttaccatagaagactcggcgtttctctctcgtatcaaatttaaactaatctcggcgattgaccgcctgcccgacccgaccgggctatatgccaatatgttcaaccacattatggaccgggcactattaacacacctcgaccgggagcaaattgatagcccttgtgtgtgcaaaaaggtcatctcaacctacgcagacaccatgctaacgctcccggtatttaatacagggatcaccgggagataccgacactggacgccctgggggattaattttgttgagtttagccgtcaggctgcaaaggaaaaagcctgtgtctatgttcctgaacccggtcaaattcattggaaaagtccggagcataaggaactggctgagttcagcctgatcaaccacataatcccgcagcaataccactggttgctgggtgtgccaacaatctggcgaagccactaccgtgaccatggcgaccgattagacttattcagggagtggagggacgcaaatggctgcggataa

SEQ ID NO: 199616 - DNA, 2085 bp, Klebsiella oxytoca
atggcaaaatcaaaaaggaccaacctgcacgcccaggaaaacttttacaggccgatattggagtacagaagtgcctcagtacttttaatttgcgccataataatgctgtttatggggtttcgatcagatgggttgaatattgcccccatcattttgtataccgctgccttcatgcttttggtttgtttgtaccgctgtaaaacggcatacccttatttgatggcgcactggcgcgtgtttcagcgccagattatgtttattagccttaaatcgctcaggtcgatcaacaaaagtaactttttctctaacgagcgaaagtaccgccagctggtacaagagtataaaaaatccaaccgtcaggtaccggacagaaaaacctacttctgtaacggctttgaatggggtcccgagcatgcagatcgcgcgtatcaaattgccaatctctcaagcgataaaagagagatagccctgccatttgccctaaaccccatagcgcggcattttgaggcgatggccagatccatgggtggcagtaacgccatttttgctgttgataaacgggcgccaatttttgttaccgaagataactggttcggccataccctcattaccggaaacgtcggtaccggtaaaacagtccttcagcggttattgagcatcagtatgctgcatttaggccacgtcattgtggttattgatccaaagaacgacgcagattggcggcagtcacttatggatgaagcggcggaacttgggttgccattttataagtttcaccctgcccagccttcttcttcagtgtgtattgatgtctgcaacgcttataccaatgtttcggacctcacctcacgccttcttagtctggtttcggttcccggggaagttaacccattcgtacaatatgccgaggctctcgtttcaactgtgattaccggtctgtcttacacggataaaaaaccgtcgatatatctcattcataaaaacatgaaaagccacatggcaatcctgaacctcaccgtaaaagttctggaatgctgttatgcacggcactacgggcccgatgtatggatggaaaaggtgaaatattcttcgaatgatactctacaagtccgctttaagcgccttgttgaatggttttctgcccacttcttgaattatgaaggtgccgagcccattgattggattgataccgtcggccggttagtagattattctttgtctgatcctgagcacatgtcaaaaatgacagcgggtattatgccgctgttcagtcgtctgaccgaacaaccactgaatgaattgctttcgccgtcacctaattcactcacttcgcgtgaaatagtcacttcagatggaatattcagtaccggaggtgttctctatatctcgctcgatggtctttccaacccggaatccgcccgggctatttcgcagttgataatgtcagacctgacgtcctgcgcgggtagtcgctataactctgatgatggtgatatgtcctcacattcaaggatcagtattttcgtcgacgaagcacactccgcaatcaacaattcaatgataaacttactcgctcagggtcgtgccgcacaaattgcattgtttatttgcacgcaaaccatttccgattttattgcagcagcaaacattgagactgcaaatcgtattacgggtctgtgtaacaattacattagcctgcgggtaaacgacaccccaacgcaaacgctggttgtagaaaactttggtaaaagtccaattagtacaaatatggtcacgtatacgacaggatcagaaaccactttgccgcataataacttctctggttcgatatcagaaagaaagcaaacaacgctggaagaaagtattccgaaagagcttttaggccaggttccaaaatttcatattgtggccagacttcaggatggtcgtaaagtcgtcgggcagatcccgattgccgtaagtgaaaactcgatgagacccaatacaacattattggagatgttcctgaaacccgccggaaaagtaactttgcgtcagaatgtgggtttagactatttaaataaacatctaaggaaattgcattga

SEQ ID NO: 199617 - DNA, 3036 bp, Klebsiella oxytoca
atgaatttcagggcgctattcctaagtatacaaagagttttaggcatcttctccagtagggagaatgatgtggctgagttaatgatgaaggatgtttcgagtctttcaccatttgctcagattataggggatcagaaatacactgtaccggatcacccgaatcttgaagtcctgaaattcattgagtacccaactcggccagctgggatacaaacgtttaatgagcagtctattctttctctttacagagataaactgcactcaatctctatgatgctggcaataagtgatggagacatccgtgaggatgcctttaccttcaccaatctggttttaaaaccattgattgaatacatccgttggattcatttacttcctgcttcagaaaaccaccaccataatggtattggcggattgttgtcacatagcctggaagttgcaatgatttctttaaaaaatgccaatcattctgaattgcgcccaattgggtatcaggatgaagaagtcattcgccgaaaagtatatctctatgccgcttttatctgtggccttgtgcatgatgccggaaaggtatatgacctcgatatagtaagtctgaatctgaatgaaactttaacatgggcgccaagctcgcaaagcctgcttgactgggcacgtgaaaacaatgttgtcgaatatgaaatacattggcgaaaacgcattcataaccaacataatatatggtcaagcgttttccttgagagaatattagatccggtctgtatgtcattcctcgaccgtgtcaaaaaggagcgcgtctatgcaaaaatggttacggcactgaatgtctataacgatggcaatgactttctgtccaaatgtgtaagaacctcagattattattcaacgggaactgaccttaatgtattgagggacccgataatgggtctgcggtcgaatgatgctgcggcaagagcaataggtaccattaagcataacttcaccagtattaatattaataactataaatccaaacccatgcacatcattattgtaaacggtgaagtttacctcaatgaaaacgccttcctcgactttgtacttagtgattttgcggcccacaagttcaacttcccacagggggatgcaggtaaaactgtactagtagagtcgctggttcaacggggttatgttgagccttacgatgatgagcgtgtggttcattattttattcccgggacatactcggaaaatgaaatagccagcatcttccgaaacggtatcggtaagctggaattttataatctcctgaaacttcgctggatcgggttaatttttgactcatataaaatcccggattctgttccgggcctcttcagcgttaatgcaaataaagatttcatctatattgatgaacagaaaactgtaacagaatacagaaggccggtcccgggtcgtgagtctgttaccagagtaacggacaccgtaagcgacgccattgaagatactccacaatacggactcaaactcgtgaacggccctgatgccgacagtgtcaacggtaaaagcagtgaaaatactgaagccatcacagaaagtgtggaggcggctggcacggataaagcaaccgatattattgatccgcaggttactacgccaacagatacagccggaacaggcggcttggatgaaaaggaacgggtagaggaacatgaagagcagagtcagatgcgtctggtcgagcagctgcatgaaatgcttctgagcgccccactgccccacaacgcagtcattaatattgattccgtaccttaccttaatctcgatgctgctattgcgttaatccctggtattgatgaggcggcattttgtgatgggccctttttccagctgacgtaccgtgatggatcactggatggtatgtggatagtccgtgacgtaaacaatctacgcctgatacaactgggggataactgtgctggtattcaggtgagcacctcggaaccccgaaccacttctacgctgaagtcgctttttgatacgtcaatgtaccagccgttggatatccctgaaagtccatcattaaacgaagcggtttcgcccccacaaacaccgcttgatctccctccggcgcgactgaataccccccaggctgtagaggccaattcggtagctgaacagattaacgcccactccgaaccggagaccgtcactgcttctgagtatgagcaatatggccacctgctggaagaaaccctagatagcgatagtgaggcatattctgactttatagtcgccgacaactctgtggttgaacccccccagcctgaggcgaaaaatagcgatgtcgccgaattccatgatgaaacagaccaggtcgttgcgcccggtaaattgaatgatcctgaggataccagagagccaccagctcccaatacaaccgggaaagaagtaattttaacaagtcctgtgtcatcacaggaccctataaaatcggaacccgccggggagaaagcgaaccatctatctccggccctggctcgtctgtttgcggtaaacactcaagcagagaagaagcatgaaaatccgccggtcacgactccagtgaaagaagcctttaatcgatccaactctgccacagttcaggctcctattgccgttgaccaacctggtgcagaagaaaaggagacactggaagattttaccctgctaagtggcggtgaagttacagaacttgaatacgtcgaaattgccacaatgcttcaccacattctgactaagttatctgggtcgtttaaaagaaagcggaaaaaccgattcatggttttgacccagaacaccttttttctgacccagtcatgtgttgaaaaatacgggacgcagttaaatgcgcctgagctttttaaccagcttcctcaataccaggtcacctccggcgccatagtcaatacaaaatgtttcgcattcaacatgccaactctggtagccgcatccgaccgggcaaaggtcgatattgagttaatcattaacacacttaaagatgtagggaatctataa

SEQ ID NO: 199618 - DNA, 723 bp, Klebsiella oxytoca
atgaccgacgtaacaattaatgaaagcaagcagaagacacctgatgtaaatgcccgctcctctcagactcctgaagatagccgaagagccacgcaaagtaaaaatgaacattacggcatggcaacagtaactattactccaggcacgccagactttaaccgatttcttacggcacggaatcgttccgtaataagaggctttaatgatgttagcattgctatttcatcattattcaggacggttaatgcggtaaaacaccctgaattggtgcaggcaattcaggactggtttaatgaattgcacgacgaaaacaatttgatgaagcagaatctggaggcccacatcgccactattaaggttgatgaaagtgatccattcttctcatcaactgagttttctccgttcagatttgaatctgtccagttaaacttcaacaaccagaacacgatgcgattttataagcacatctttgaaatgaacaaccttctgacccagatgtataaattcaactctctgggtcagctgccggttagcgattacaacgtaatggcgcacaatattatccgaagtctcaacatgtatatcgaacgggtcaaaaaaacacttaacgtgtcgcgccgtgtaaaaggttcttacagtcctgatgagtttatcgaaaaggtaaaacagtacaaaagcgtgcaggcatatattgctgcggaactatctggtaaacgccaataa

SEQ ID NO: 199619 - DNA, 486 bp, Klebsiella oxytoca; identical to SEQ ID NO: 144452

SEQ ID NO: 199620 - DNA, 318 bp, Klebsiella oxytoca
atgccggcctttgaatgggttcatgtgcagctccatcagcaaaaggggatgataagtttatcaccaccgactatttgcaacagtgccgccagaactgacagtcaggcgatgaccgatggggaaagcctcacggggctgcgtaaacaattcctgcaaactttttgcagctcgcctcaagctgtaaaatggcagaaagaggaattagaacgcgcaaaactgcggcttagtatgcatcaacagcgtaaaaacgggcaaacagagtccgacgaaaaacgcgcggtggaaattcaaaaagagatttacgatgcgattcagtga

SEQ ID NO: 199621 - DNA, 4254 bp, Klebsiella oxytoca; identical to SEQ ID NO: 25059

SEQ ID NO: 199622 - DNA, 423 bp, Klebsiella oxytoca; identical to SEQ ID NO: 25058

SEQ ID NO: 199623 - DNA, 453 bp, Klebsiella oxytoca
atgaagaataagaaggtaataactttgataatggccgcagccgcatcatgctcgtcagtctacgccgcgacattaccgaccagtgaggtagacgcatacatacttgcgatgaacaccatgtcacctatcactgcaaagtacaccatccagtacaagcaagcggttgagcagaaatgcaatacagccctgagcgttgagcagctcaactcaaaggcattcaccaatgttgtccaggcaatggtgagtagtgagaccgtcgatagaatggggcttgatgctgctggtggatcactccaggataccctgtctgtgatcggcaagaacgtcacatgcagtgacctgaacgcgccatttaaagcactcttggatgataaggacttcaccagaaagcatcagcacctatcgaaggtgctgcatacttggaatgaagttgtttctcaaagcaaaccctga

SEQ ID NO: 199624 - DNA, 282 bp, Klebsiella oxytoca; identical to SEQ ID NO: 25056

SEQ ID NO: 199625 - DNA, 288 bp, Klebsiella oxytoca
atgttaaacaaaaacaaatttgagaaagttttaaagagaatcctcgataagaactttgagcgctgctctatttgcaggaaaccattccctggaccgtgccatacttttgctggtttggattcggacaataaagttcagaacgtaggttcttgctgtcggaccagtattgtggacttgcggcatggaggtgtgtatacgaccgctcctgtagatactcaagaggggcaaagtcaggcgcatgagctactcgcaacacatccttgtaaggggatgatggggcatgcttag

SEQ ID NO: 199626 - DNA, 537 bp, Klebsiella oxytoca
atgcttagcaaaaaagtctttttcattagtcaagcggaggccgaaagactggagccggttcccggtgcggccatgatctccataactgacccagacaagtcccctgccgctctcggacagtgggggcagttgtaccgcgatagcttctatgacggcggctattctgagaacaccatccacacgatgaaggcagcgttccggatgaattacgcctcttacattgactcatcccaggctgaaaagctgtccaccttcctggatggattggttggtagcggtatcgatcagatcttcgttcattgctattacggagaatccagaagtggcgcggtagcgctgtacctccagaacaaacatggattcactccgaataagccgatcaccaagcccaaccgaacagtttacgaattgctgtgcaatccaaccaagtttgaaccactgatgcaaagctacgaaacgcaacatatggaggaggaactacctcttcacctcaaaatatgggattttcttctcgttgcggtcgggcttaggaggtga

SEQ ID NO: 199627 - DNA, 1011 bp, Klebsiella oxytoca; identical to SEQ ID NO: 25053

SEQ ID NO: 199628 - DNA, 480 bp, Klebsiella oxytoca; identical to SEQ ID NO: 30179

SEQ ID NO: 199629 - DNA, 288 bp, Klebsiella oxytoca
gtgggggcaggtcatctgcagcaatctgaacaatgggatgaaggttcgacgttaggtctcgccatcagccgacccgatcttgaacaggaggagggcatctggcatgacgtgctgatgctgttcaatccctttgagggcgatgttccgttccagatcccgcagtttggcgaaggcggctgggttcttgagctgtcgaccgctgaagaaaaaacggacggcgtcatcattaccgagacaattgattttgttctggccgggcgcagcattgcccttttcagacggccttaa

SEQ ID NO: 199630 - DNA, 450 bp, Klebsiella oxytoca
atgagtgacaatgataactttgaattagtgcgaaaactgcttttgaatatccgatcggtacgtgtttttgcgcgtgatactcactttgaacaacttcttgaaatgcaggaaaagcttaatgcggttattgaagagcgccgtgaagaagctgagcaggaagccaaagagcgagaagaacgtgaaagaaagcgtctagaattgcttcagttgatcgcaggtgaaggtttctccgctgaagaactgctaggattaagcgaaggggcaccgaaaaaacaaaaaaacaaacttccgaaagcaccgccaaaatatcagtttgaagaaaatggcgtagtgaaatattggtctggtcgcggtcgtgcgcctaaaccaattgatgcagcccttaaagctggtcagaagcttgaggattttctcatcgagaaagaccaatccggcacagaacaagcataa

SEQ ID NO: 199631 - DNA, 405 bp, Klebsiella oxytoca
atgagccttaccttgccacttatgtactttaaaacaggaagcgatcttagccagataacgcattatgaagtgaactacccggatgattttgtaaaacaagcatgggaacagccagaaataaacctctttattgtttgtgtagcaacaaagaaaggcgcggttcgggagatcaagggaggcatggccgtatttactagcatacctgccagtaatgggcttgagctatccagggctcttgatgacgttcttagaaaatctaatgaactccgctcgctcgcaggtcagaaaaataacgcctttcttccggcaaaagttggtcttgctggcgacccccctacagaacaagagttgcttagtcttttttatcagcagtgcctgaagcatggatcatggggtagtgcctga

SEQ ID NO: 199632 - DNA, 264 bp, Klebsiella oxytoca; identical to SEQ ID NO: 118545

SEQ ID NO: 199633 - DNA, 372 bp, Klebsiella oxytoca
atgaaaaaagataccgcaactcaagtttttgaatctctggcttctggcatccggctggatgtctatcgcttgctggtgaaagccggaccacaggggatggtagcggggcaaattgcctcaagccttgccattgttccaaataaattgtcctttcatctcaaggctatgacccatgccgaattgctctcggttgagcaggaaggacgcttccagcgttatcgggccaacattcccttgatgctggagttgataactttcctgactgaagagtgttgttctggccatccggaaaaatgtatatccctgtactccaatcccagttgctcatcaacagagccactttcacccacctggataaaatgtgaggactag

SEQ ID NO: 199634 - DNA, 480 bp, Klebsiella oxytoca
atgaacgttttgtttctgtgtaccggtaactcttgtcgatccattctcgccgaagcgacattcaatcatctggcaccagaaggttggcatggcatgagtgccggaagtcatccgacaggtcaggtgcatccccgctcccttgctttactggctcgtgaaggtatcgccactgaaggttattacagcaagtcgtgggagaacctacccctggaaccggatatcgtcgtcagcgtctgtggcaatgctgccaatgaaacctgtccggcctatttgggtcccgtgttgcgaacccattggggagttgaggatcctgctcatgtcgcagggacggatgaggagatcgatgcggcatttgttacggcatataccattctgcgtacgcgtattgaggcattttttgcgcttccattggaaaaattgcagcaggataaaaccatgttgaaagctgaactggaccgtatcggcaatctgttgggttag

SEQ ID NO: 199635 - DNA, 441 bp, Klebsiella oxytoca
atgagcaagttatatcatgcactaatacctggtcatatttactgtggcggcgctaatgatatccagcagatggtggacgaagatggcatcgacgtggtggttgatttacgtgccgaagcgacgggctgtgctacacatcacccagaggtgcagtgggtacatattccattgagcgatcatgccgaagaacctgaggaacaactgttccgtgatgcaatactcgcggtagtagatgcctatcaaaatggtcataaagtggcatttcattgtggcgcaggcaggggacggacgggaactgttgcagcaggtgtcttgctggaattaaaaatcagcaaaaccgtaccggaagcggttgagcgggctaaatctattcgtccggtattcaacatcaagccaattcagtatcaggcgttaggtctcctctaccctgaacctgattaa

SEQ ID NO: 199636 - DNA, 492 bp, Klebsiella oxytoca
atgcagaatcaaccattcaacgtgctgtttctttgtacaggcaattcaacaagaagcattatggctgaagtgctcatgaatcagatggggcaaggtaattttaaagcttacagcgctggcactcatcctcgtggagagctgcatccgatgacgacacttttcttgcagcaacatcagatagatacttcaacgctttccagtaaaagttggctcttatttgcagaagtccatgctcctaaaatggacttcatttttactgtctgcgatcaggcagcaggagaatcctgcccggcctggcctgggcaaccgattactgcccattggggattttccgatccggccttgtttaaggggactgaagagcagaagttgaaagaattcagccgaatatacaaagaaattagcaaccggattcgaatttttatgagcctgccgtttcataaactggatcgtatgtctcttcagcaagaactgaatcgtattggtaagtaa

SEQ ID NO: 199637 - DNA, 522 bp, Klebsiella oxytoca; identical to SEQ ID NO: 156250

SEQ ID NO: 199638 - DNA, 453 bp, Klebsiella oxytoca
gtgcgcggatcgagccagaactcgctgacgctgagcgcaggagatgtgaccaacagcggccggattcaggggcagaacattactctggatgccagcagcctgaccagcagcggtgctgttcagagtgcgctggagttggctctgaccctgagtggcgatgttattgctgccaccggcagcaaaattaccgccctgggcgatgcccgccttaccgggaaagtgctgggtaaccagggattaatcagcgcgaagacgctggaagtgaatggtgattcgctcagcaacggtggcgaaatcagtggtgttaacagcctgaatgtgacactcagtggtaatctgcaacagcacggtaaaatgctgacaggcggtacattggggtcgtctcagaaaacggaatctatggtcactcccgtttttgcaacaccgattttgacgacaagttggcttgcttga

SEQ ID NO: 199639 - DNA, 318 bp, Klebsiella oxytoca
atgactcaactggatgagtggacactaagtcttttgaacaatgaagaaataaatgccatgcatcttaagcttattaatcagaaacaggtctatcgagataatacctgggttatctgggaagccatgtctccacacgatagctatgtcgcagtgtttaatatctctgataccgttgcagttttacctgaagaacttaaaaacgaatatctccctgcttccgattatcttgaattgtggagaggaaaagataaatcggttctgaaagagacagttaacccacatgccagctatatttttcgtgctttgtctaaaaattaa

SEQ ID NO: 199640 - DNA, 663 bp, Klebsiella oxytoca
ttgaatcatgcagtaaccagccactacgacaatggcagatatcaccttatcaactcagctaactacgccttcggcgacaacacgtatagcctgaacttcaaacctgacagcaaacgccatgcgccgatccgtcaggaaataatcgacagcttcattatccagctctgcgcgatgcagtcccattacagcaaaatcttcgctttccggttcgacctgtcagtcccggcaggaatgccagtagctgagagcaatcagctgatcagtgagctgttcaccagactacgcggcaagttcactgcaaagcgatggaatggacagccaatcaagaaattcgcatatggctgggtaagggaaaaagagaaggccaagcaggttcattaccattgctggatcgcattacctcacttccaggtcagagttgctggattcggcaatgagggaacatacggcctgatcaacactctttggagtgagctcacagcccaaaagggccgctcacgcccgtgtaatggcacatacaccatcaaccgggatgatcactcatcgctggtagcactggttgagcgggtctcataccttgccaaggcgcgtggaaaatattccactggagacgggcagcgtatgttttcagcatcaaaactgaaaatacaggccaatgcttaa

SEQ ID NO: 199641 - DNA, 150 bp, Klebsiella oxytoca
atgatcgttaccaaggagaaaagcgggccaccatgccccgcttacctcgacactgacgcactggaaagagccattgccgccgctcgtaaaatcagggaagccaacccggaacggtataaatctgttcccgtctcgccgaaacttttctga

SEQ ID NO: 199642 - DNA, 507 bp, Klebsiella oxytoca
atgacaaagaagacagcacatagcgccgctgatagcgatctacaggcattcctgagcgaagccgcagaacggttcaaacctgacgccaacgcactggcagcacgtatggataccgctatacaacgttacacagccaccagcacaacgcagcgcttcaacgccccggcagcacttgcaatgcaacagctacaggagcggattctggaaggatggcgatacgatatcagtatcccgcaatcgatctacctggccggtaacactgggaatatggcgatcacgctgcgcaaaccggaatcgctggtagagctggagatcaccaacctgaaacgacaggttgaggatgcttaccacaacgaactcgccgccgcgatggaacgtgaggtagatatgctggttcaggacgccgccaacgaagcccagcaacgtgcagaggaagccgcagccaaagaacaagacgctatgcgaaagctcctccgcgatatgctccttactggagagaccgcatga

SEQ ID NO: 199643 - DNA, 213 bp, Klebsiella oxytoca
atgttcattgataccgtaaaatgggcctcaagccctaaaaggaaaacgttaatcctaaccattaaacaacttccgccaaaatcccttctgacgttcgactcccaactctttcttaacattctccagctcttttaccgcttcgtcacgttcattttgcaacccggtcacctgttcccgcaggctgtcggtctcctgtttatcctcaagcaataa

SEQ ID NO: 199644 - DNA, 771 bp, Klebsiella oxytoca; identical to SEQ ID NO: 117490

SEQ ID NO: 199645 - DNA, 318 bp, Klebsiella oxytoca; identical to SEQ ID NO: 117489

SEQ ID NO: 199646 - DNA, 294 bp, Klebsiella oxytoca; identical to SEQ ID NO: 117488

SEQ ID NO: 199647 - DNA, 315 bp, Klebsiella oxytoca; identical to SEQ ID NO: 117487

SEQ ID NO: 199648 - DNA, 210 bp, Klebsiella oxytoca
atgacccaccaacccgcaaaccgcccccgcatagctgcgacctatgcctccggcacggtgcgcgcccgccgctggcacggcgacggcgacgtgcgcggctaccgtccgccgcgtggctggacggcccgcgccgacctgaccgatctgcatcccctcacgggccgcgccttgccgcgcgccgtgtggtggatcatcgaaaccaaggaataa

SEQ ID NO: 199649 - DNA, 1677 bp, Klebsiella oxytoca
atgcaccccgccgaccagttcgaggcgttcgccgcgctcgtggccgaaggccgcagcatcgaggacattgcagcggatttcagcgtcacgccgctggtggtgcagcgccgtctgaaactcgccaacgtgtcgccgcgcctgctggccgactaccgggccgaggccgtgagccttgaccagttgatggccctcgccatcaccgacgaccatgctgcgcaggaagccgcgttctacgatgcgcccacatggcagcgcggcccgcacaacctgcgcgaccgcctgaccgaacgcgaaatcgacgcctaccggcatccgctggtgcgctttgtcgggctggacggctacgagcaggaaggcggtggcatccgccgcgacctgttcgcggagggcgacaaaggcgtgtatctgaccgatgccgcactgctggaacggctggcgcaggacaagctggcaggtatcgccgccaaggtgcaggccgagggctgggcgtgggtggatgccacgccgggcatgacccatgccgatctgcaagccttccagcgtgcgccaagggaacgccgcagtccgaacaagcgcgacgcgcagcgcatcgagaagctgcaaaccaagctgcacgaactggccgaggcggtggatgccgcgctggacgacgaggacgaggaaaaggccgatgccttgcaggaagaaggcgaacgcctgggcgagcagttgcaggcgctggaagatggcttgctggactatgcggccaacgtgaaggccgcagccggtgccattgtcaccatcgaccgcgacgggcaggccgcgattcatcgcgggctgctgcgcgaagcggaggccaaggcactgcgcacgctggagcggctgcggcagggtttcggcagcgaaggcgaagccgcgaacgaggacgcaggcgaggacgacgagcagcccaagaccgccgccatgtctgaccgactggcgcagcggttgagcgcgcaccgtaccgctgcgctgcaaatcgaagttgcacggcatccgcaagcagcgctggccgccgtggtgcatggcatggtgcagaccgtcttgcaggaaaggcactacgggcacgacctgccgctgggtgtgcgcctcacggtgcaagaccggctggaaggcatggccccggactggccggaatcacccgccgccgtggcgctgcgcgaactgcaacaggtggcaggcgaaaccttgccggaggacagcgccgaactgttcgccgcgctgctggcgaaatcacaggatgaactggtgcggctgttggccgtgtgcttagcttccacggtggacgtggtgacgcctcgcgccacgccgcaccagcccggcgcggaactggcgcaggccgtggggctggatatggccgcgtggtggcagcccaccaatgagggttacttccggcatgtgccgaaggccgcgattctggaagccgttggcgggttcgcgccctcgcacgtcacccgactggcgaagttgaagaagggcgacattgccagcgaagccgaacggctggccgctggcaccggctggatgcccgccatcttccgctccgaaggcccgcagcagaccgggcaggacgcgccggcggatggcgaagccgaagcacaggaagaagtggccgccgtggcggatgaccagccgcaggccgaggctttggccgcgtga

SEQ ID NO: 199650 - DNA, 1674 bp, Klebsiella oxytoca
atgcaccccgccgaccagttcgaggcattcgccgcgctggtggccgaaggccgacccatcgaggacatagccgccgatttcagcgtcacgccgctggtggtgcagcgccgcttgaagctggcgaacgtctcgccccggctgctggccgactaccgcgccgaagccgtgacgctcgatcagttgatggcccttgccatcaccgacgaccacgccgcgcaggaaaccgcgttctacgacgcgccgacgtggcagcgcaacccttcccaattgcgcgaccgcctcaccgagcgcgagattgacgcataccggcatccgctggtgcgtttcgtggggctggatacctacggagccgcaggcggtggtgtgcgccgtgacctgttcgcggaaggtgacgcgggcgtgtatctgaccgatgccgcgctgctggaacggctggcgcaagacaagctggcaggtatcgccgccgaggtgaaggacgaaggctgggcgtgggtggatgccacccccgccgtgacccatgccgacctgcacgccttccagcgtgcgccgagggagcgccgcgaaccgaacaagcgcgaagcgcagcgcatcgagaagctgcaaaccaagatgcacgaactggccgccgccgtggatgacgcgcttgataccgaggacgaggaaaaggccgatgccttgcaggaagaaggcgaagccgtgggcgagcagttgcaggcgctggaagatggcttgcaggactacggcacgaccgtgaaggccgcagccggtgccatcgtcaccatcgaccgcaacgggcaggcagtgattcatcgcgggttgatgcgcgaggccgaggccaaggcgctgcgcacactggaacgcctgcgccaaggtttcggcagcgaaagcgaagccgggaacgacgacgaaggcgaggacgacgagcagcccaagaccgccgccatgtccgacaagctggcgcagcggttgagcgcccaccgcaccgccgcgctgcaaatcgaagtcgcccggcatccgcaagtggcgctggccgcgctggtgcatggcatggtgcagaccgtcttgcagggcagccactacggccacgacttgccgctgggcgtgagcctgaaagcgcaagaccggctggaaggcatcgccccggatataccggattcgcccgccgccgtggcgctgcgcgagttgcagcaggtagcaggcgaaggcttgccggaggacagcgccgaactgttcgccgtgctgctagcgaagtcgcaagatgaactggtgcggctgctggcgatatccgtggccgtcacggtggacgtggtgacaccccgcgccacgccgcagcaaccgggcgcggaactggcgcaggctgtcggcttggacatggccgcatggtggaagcccaccaatgagggttatttccggcatgtgccgaaggccgcgattctggaagccgtggagcagtacgccccggcgcacgtcacccggctggcgaagttgaagaaggccgacattgccagcgaagccgagcggctggccgatggcaccggctggatgcctgccatcttcaaggccgaaggcaccgacgacaccacggcgcaggatgcgccgcaggcggtgacgaacgacgagccggaagccatcgacaacgacgacgagcagcaggcccacgcactcgccgcctga

SEQ ID NO: 199651 - DNA, 315 bp, Klebsiella oxytoca
atggctaacatcggcaccttcaccgcagagaaagacggcttcaccggccagctccgcaccctgaccctcaacttcaaggtcaagctggttcccaacgacaagggcgagaacgaaagcgccccggacttccgcctgcaagcggccggccacgacttcggcgcggcgtggaagaaaaccagcgaggccgggcgggattacctgtcggtggccatcgacgatccttcattcccggcgacggtctatgcccgcctgatcgaaggcgagaatgacacgcacgacctcatctggtcgcgcagcaagcccaaggcggcctga

SEQ ID NO: 199652 - DNA, 333 bp, Klebsiella oxytoca
atgggctgtcatcttggtttttatggggaaaccaagttagtgacagcgaaacactcattggcaacggcaatacggacagtcaggaaggcgcgaggcttgagccaggaagcgttctccgacgtgtccagccgcacctatatgagtacgctggagcgcgacttgaaaagtccgaccctgcacaagctgaccgagctgtgcgaggtcatggaagtgcatccgctgacgctgttgacgctggcctacgccggcgacgacacgcacaaggccgacgaactgctggcgcgggtgcgccaggagttcgaggccgtgctgaaagagcgcgacgcgccctag

SEQ ID NO: 199653 - DNA, 552 bp, Klebsiella oxytoca
atgcggattccgacagaaccggggaatcgcatccgtgtctttccggcttccgacaattccgcttcggcgcttctgttcttctacggatgcgatggcttgcacatcggtgcttccacacgaatgcacggatgcgtttcggcagttctgcgcttcggcaccaaagcgcattcgcgcatcgtcggtttcgtggagaagctgcccatgaccctgccgcttgtcaccgctgatgaacgcgcccggctgctggcccacggcgcggcgctcgccgctggtcagcggctcgacccgctgcccgtggtgcgcttgttcaccccggacgcgcatgtgacctggctgctggtgtcgctcgacccggcggatggcgacacggcctacggcctgatcgacctcggtatcggtatgcctgagctcgggatggtcaagctgtccgacctggcgggcatcgtcgggccgcgcaagctgccggtgcggcgggatcggtatttccaggcggtgcgcccgttatcggagtacgtccggctggcgcaggagaacggcgcgatcacggactga

SEQ ID NO: 199654 - DNA, 768 bp, Klebsiella oxytoca
atgactgatcgcagcgccgaacactggtatccgacagcggcctatctctacgttctgcaccttgacggccctgcgctggcgtgggaatacctgcgccgaaatcccgactaccgccgcgactggctgcgccgccgccgccggccggacacggcgcaggcgtggggcctgcgcctgctggaagacccagccctggatgcgcgcgacgcgcatccggcctggtttcccgatcacgatgccgtcgtgcaggtttacccggacgatgacccgccacccgaagcccatgccttcgagttctggcgcgtccctggccgcaagcaactgatccacgacggcaagcgcctggtgctggtgtcgcattggcccggctgctgcctgcggctcgcgctcgcgccgggcctggaagacggcatggcctacctctacgccacccgcgcctgcgccacgccctgcgcgcgctatcgcacgctcgcgtccgagctggacgcattggccgtggccacggttgccacgcctgcggcggcggcccgttccaggcccacgacggccgcggtgctggaactgcacaccttgcagacgctcgacgcgaccctggcgggcgcgtcattgcgcgaagtggccgaagggctgttcggcgccgatgccgtcgccgccgactggcacaaggacagcgccttacgtgcccgcgtgcggcggctggtacgtcgtggcgatgcgctgatgcgtggcggctatcgccgcctggcacagcttccgccgccgttgcagtag

SEQ ID NO: 199655 - DNA, 534 bp, Klebsiella oxytoca; identical to SEQ ID NO: 25686

SEQ ID NO: 199656 - DNA, 1260 bp, Klebsiella oxytoca; identical to SEQ ID NO: 56173

SEQ ID NO: 199657 - DNA, 864 bp, Klebsiella oxytoca; identical to SEQ ID NO: 161496

SEQ ID NO: 199658 - DNA, 399 bp, Klebsiella oxytoca; identical to SEQ ID NO: 161497

SEQ ID NO: 199659 - DNA, 939 bp, Klebsiella oxytoca; identical to SEQ ID NO: 161498

SEQ ID NO: 199660 - DNA, 801 bp, Klebsiella oxytoca
atggaaaatccagatcactactatgttctgcactttagttattcggcatctttatcagataaaaaagcatcaaaatatctaccgctttatgaaagagttatgcgctctgctgaatgggaacgtgtcggattaaaggttaaaactgatagatacggcattcctgttcgacctaaaatcggtagtgtctactactttcgtagagtcatctcttattccgaggcagaaaaagaggcaattgcaaccggtagacgattgtatgttaacgagagaacgctagttgattttgcgcgcatgggcatatcctttgatgaattcgtatctcacccatttcatatggaaaactatgctttggcagtgcttgcctgggaagcatctgaccttgtcctcgcaactgaattgtttaaagcagccataaccgattcgccagaaaatgtcacatataaacaaaaatactttgccgtccggcttgagaacgatgatcttacagccatcagtgaagagcttacttttttctcaagagatatcgattcgctgatccattcgggtcgatttgatgagtggctcaagaagctatttatctataaacaatattcatttgctgccaaccttgtcctgaaagttgatggtctctttgggcaggttttagctggcgaattggctaagggatattacggtacccaatccccggattttgttagtcacaaaagagaccaatttagagacaaagtcaaaaagctatgcaactcatctcgttatagtccattcaagaatgcacttgaagatgtgggatggtttgcataa

SEQ ID NO: 199661 - DNA, 591 bp, Klebsiella oxytoca
atgaggactctcggatggtgggtgcttggggttggtgttttttggctaataattgcgctcaatatggatacgagtgttgagagtagccccggtgtacgggttatgaactttagcctgatagcgcaacaacagaatcaattgcttcttggggccttgatctcttttgccggattgatgtgtgtaatttttggcaaaaaacatgaactggtaaatatgtctgccgatgtgaagtgtccgttctgtgcagaacttatcaagcccgatgctatcaggtgtaaacattgccatagcgaccttccacccaagctctctctggcagatagagatcgtcttttggctgaatttgaaaattttaactatcttaatttttttgatgaaaacgatgttctctgtgagtcaaaaattcaggagttcaccaatattggactcaagtatctggacgctgttagacagacggaaggggataaagcaatggcagaaaaaaggttgcttagaaagattgatgagcttgcctctatgcttgatggcgatgtggctgagcagtttaatcgcttatgtgttaagcattcatcttggttggtaatgggataa

SEQ ID NO: 199662 - DNA, 354 bp, Klebsiella oxytoca
atgtcacttggcgcacgattaaaagaagagcgtaaacgtctcgggtataaccaatctgattttgctgaattggtaggatcttcttataaaagccagttgcggtgggagaaagatgaatcctcgccaagtgctgatgctctaaatatctgggctagtattgggcttgatgtgctttatgtggttactggtaagcgaagcggggacactccctttcgaccgcttatcccaaaaatgtcacaggaaaagcaagagctaattgacgcatttgacaatatgacccctgagcagcggagggcgattcttgaggtcggcaaaggactcgcacaaccgaaaccaagcaaattcgcaggctaa

SEQ ID NO: 199663 - DNA, 189 bp, Klebsiella oxytoca
atgactgcagaacaagtcaaagcactctttcgccagcgaggggtcactttcacccagtgggctgaagagcacggctactcccggaacgaggtctaccgggttctcaatggccagaccaaagccaactacggtaaatcgcacgagatcgccgttaagcttggcctcaaatccggcaacgttgcagcctga

SEQ ID NO: 199664 - DNA, 306 bp, Klebsiella oxytoca
atgaacaaggtaatcacatccacatccggtggtcgcatcctgcgggtgctcaaggcgctcaagggtgcctcactaacaggccgctccaacagcgagcttgctaaagcactggacgaatcaccggccaatatcaaccgcgccctcaacacccttattgaagaaggattggcccagaagctggacaacggtcgtttcgctttgagcgttcagcttctgcaaattgcccttgctcacagcaatgaaatggcccgcgctcagggccgcattgatgagatgaaccagcgtatcgtttctggtagtcactaa

SEQ ID NO: 199665 - DNA, 1287 bp, Klebsiella oxytoca
  misc_feature (1259)..(1268): n is a, c, g, or t
atgagtattatatccagtttattcatgaaaattagggtcgccctcttcggagggcctgactatgaaattgtctatgatacggatgatgagtatgacataccgcacacgcctaataaggacgtgcaaaactacctcgactatccaagtaagccaacgggtataacactctattcagagcgtgagattctgtctgtccatgctaatcggttgcaggaaatcaatatgtatatcggtctccctaattctgacctgagcgatgaagcatatacattcacgaacctgattatcaaaccactgatggaatttacgcgctggatccaccttctacccgcctcagagaatcatcaccatgcaggtacgggggggttattaacacacagtctggagacggcttttctggctttaaaattcgcgtacagtactgaacttagccctattggtttacaggatgaagagcaggtacgtaaacggcggtacctttatgctgcgtttatttgtggtctgttacatgacgcaggaaaaatatttgacgttgacgttatttcttcaactccaggggttaacagtacgtggcgtccactttcagccagcctgatggactgggctaatacgaatcgtattatgtcttatgaagtaatatggcgcaaaagaactgcgaatgaccactctgtacgggctcccgtttttttagaacgttgcctgaacgatacctgcctgaattacctgagtgacgtcgtcaaagaacgaatgtacgataaaatgcttgcctccctaggtaattacactaccagcgatgattttatatcccgttgcatgaggaccgccgactggcattctaccggtaccgacacaagttatcgttatgataagcaatccggcattcgtgcatccgataccgcagctcgtgccatttcaattataaaagataatattagtgcgcttaacatcaacggcttcgattcatcacctacactcgccgggcagaatggtccctctcccgttcatattatgattatcggaggggctgtttacatcaatgaacacacagcccttgattacatactgaatcagttcaaaaaactgggtgttaatttcccggacggcgagattggtcgaaaatcactgacggatttattagtgaatggcggctatatagaaccatacggagatcaacgcattgctcactttttccatcgcggtgaatttactgagatggacattcaacgaatgtttagtgacggcatcaaaggcctgagctnnnnnnnnnnagctggtactcgcttttaa

SEQ ID NO: 199666 - DNA, 258 bp, Klebsiella oxytoca; identical to SEQ ID NO: 144505

SEQ ID NO: 199667 - DNA, 1098 bp, Klebsiella oxytoca
atgagcagattttatgatttcaatgcgttagagctaatggaaatggcccccatatctatcttcagtcgtaacaaaaatactgagattttcctggatgatcaattattagagcaggaacgtcgccattgcctgtcggttcatattttttgcagaaagctcgaaagatttgaagaagaatttaacagcaataaaagttccagaaatcgcttggttaagttccttgaatcacaagaatgcgattttatctatgatatagctaaagagtggtcatcttacaatttccaaaaagttcctcaaagcacaacttatacgtacttgaaaacacttgtcgaacacatcaacgaactcaaaagtaagtttggcattatgagttatgccacttatcacaacaattacattcataacttaattacgacaatcaatgaaaacctcgtaaatattaattatgatttatcccttattacatcaacaaagcgaaattggaatctttatcgaactgaattcggactaattctagcgaacgggattaggaaagtattacttattgataaattagaacatttgaaaaacaaagatcttaagccgggacttattttcttcattacaacgccagtgtcacaagatgtcttgcaggatttattttcacgtcaccagccttacattatgatttataggaatgaaaaaggcattataaaaacagttgaaccacttcatctgcttaccgatgctctttatgaaatcatttcactggcttcaaacattaaaaataaagactcaatgttctttgaacctaaaaataagttaacctctattattgaagaattgtttgagctccagaacctttttgaagaatacatgcgccagagttttatgcaggtcagattaagtgaaagaaacacacaatatatatataataaaatcagatcacttaaacatcaagccaatcatcttgagtttggaaatacagaaaaaatacggacgctcgcttttaaactaggtgtattagctgattcatttaataattacgatgttaaaagcaagacaatcgaccttctgcctaatactattttcactggcattcagggaaggtgcgaataa

SEQ ID NO: 199668 - DNA, 663 bp, Klebsiella oxytoca; identical to SEQ ID NO: 183959

SEQ ID NO: 199669 - DNA, 504 bp, Klebsiella oxytoca
gtggaacacatctacgccgcaggcgactgcaccgaccagccgcagttcgtctatgtggcggcagcggccggcactcgcgccgcgatcaacatgaccggcggtgacgcggccctgaacctgaccgcgatgccggccgtggtgttcaccgacccgcaagtggcgaccgtaggctacagcgaggcggaagcgcaccatgacggcatcaaaactgatagtcgcacgctaacgctggacaacgtgccgcgcgcgctcgccaacttcgacacgcgcggcttcatcaaactggtggttgaagaaggcagcggacgactgatcggcgtgcaggcagtggccccggaagcgggcgaactgatccagacggccgcactggcgattcgcaaccggatgacggtgcaggaactggccgaccagttgttcccctacctgacgatggtcgaagggttgaagctcgcggcgcagaccttcaacaaggatgtgaagcagctttcctgctgcgccgggtga

SEQ ID NO: 199670 - DNA, 159 bp, Klebsiella oxytoca; identical to SEQ ID NO: 156255

SEQ ID NO: 199671 - DNA, 2151 bp, Klebsiella oxytoca
gtgggggcaggtcatgagctgcagataaaaataaagaaacttaaagagtcaataaaattaaaaaatgccctttcgctgcgagaactcacgctaatcatcgggcgtgaaaaatttgaagatattgctcaggggtatcttgaggcgatggagggtcatgacttcgtctctgagcagcagctccatgctttgcgtaccgatatgcgcaatggcgggttagacgccttgtatctgctgctgtctgatggtctggtgatgcaagacttcatggcctaccgctctattttccatgaaggatcgatgaccgtaaatgataacgacttcctgaaagccgttggtcaggatctgagctacgcaacctcaaacggtgaatattttatcgatgatgagaacagagtcaccagcgaactggttgaacataaccgtatttatgccgatggagcgcttcatcatcaactggtgacacatctgattgataacgaggatgaacatctggctggtatgatcacttcgctattcagcaagtctgatgaacatatccttgctgttttttctgagctttatagcagatttggcaaacccgagaccttcgataagttaatcgttactgcactgcaaaaaaatggttatcttgacagaatggttgccgttctcgcatgccagcctggtgaaaaattcaccaatgatattgctataagtatgatagcctgcgtatcgcctgaacatgcgctagataaatcgcaataccgccagcttattcattcgctgggctgccgtatcatctctcagctcaccgaggagaatcaggaagagttcatgcgtcacgtacaacaggcggaggcatgttatgacgagctgttcgaaccaatgacgctaacggagcggtattgcctgcaatttattgcacaaaacagtctttatcagttaactcggcacaatgttggcattgccgtttcgtgtcttattgaaaacataacgcctgaagaggcggaaaggaaaccttggacgctcgcctatgagcataaactcaatgcggtttctgattacttcagtcaaaacatcgatacattcgtaagggatgtgtttatctcctctgctgaggatgccgaatgtatccgctacgtcctgacccgcacctccctaagcgatggttccaaaggcgatatcgtcagaaaaatgaccttctcgtttgctgatctgtccgggatatcggctaaagaagaatttaccgaagaccagctaacgatctcctatcacgacctgttttaccgttatgaccgcgtcgtgccgggatggggcgcgctaatagactatatctgtgaagactgcaacatggcgatactgacggcgtatgtgacaaagcatgtggctgcattaggtcagtcccccctagaagtctatgatggcgaccgctatgacctgctgtacatgaaaattatctgtaatgatgacctagacgagtggacttatcagaacctggttgcaccgattgagattaacatgcgggaaattgatgagcacctcagcgcccgtaatttctgcacattgatagctatgttgaaactgcctctcgacgcggatgtgtatgaaaaaattgcggctcaatacgcggatctggatgagaaaatcagtgatgccttcgtctattggttcagtcagtataaaagtgaatttttggagcagcccgagttctatctaagaaaagaaaaagatgcgcgcttctttaaagccatgttcacaaaagtcatgacttacgcaccctttactgtgcaagaaagagcggacctggtgtcgctatttattgattatttcattgtgtctgatatcgctgaccttaatttcccaaatgatgtcctgctgcaggtgtttaacagcactagtaatgaagaattcaagggcatgctgtttacgcgatttattgtgacaggtctcaataaacatcaactggccgggctttgtcatcatttaggtgaaggtgaattgaaaaatatattccttaatcgaacccgagcgacaattgctgttgcaaacagggagcgcgtgatatcaattcttcagcatctgcaagcagtacgcatcatcagagatttcaaggaacgtgaggatgggaaattctctgtcgttatcgaacctaacccagaggatgaagattag

SEQ ID NO: 199672 - DNA, 648 bp, Klebsiella oxytoca
atgctcgatagcaaagtcttacgagtatgtgccgaagaatgtgggattaacctgaaaacatcattccgatggcggcaccgttttctggccttaccttcaacgctaaaagcgaacaggcttgaaggcattattgaagcagacgaaaccctgtttccgtattcagaaaaagggtcaaagaaattgagccgtccaccgcataagcgagggatgaaagctcaaaaacggggtcgctctaaggaagattgggtgcccgttttgacggtcagggacagagccaagaacacctatgaagctattttgcacgacgtaaccaccgaaacgttgcaccaagaactggttggtaagttggaaaaagacagcgtgttgtgtagtgatggctataagccttacatcgcattatcagaaaaaaatgatttaattcacaagcggttagatgtagctggcggcataaaggtgatagataaagtctttcacattcaaaatgttaatgcgtaccacagccgtttaaaactttggataaagcggtttcacggtgtagccacaaaatatcttgatcatcatcttggttggttcagatatatggatacgccagaaaaccttaacgaaaacaggctgttccacattcaacaacagttaatgggaacatag

SEQ ID NO: 199673 - DNA, 1689 bp, Klebsiella oxytoca
gtgtcccttcgcgcaaacctgggttcaagcgaagagggccagggagcgtggctgattgcctatcttgccggtgattctgctgtagccagaacagtcgcggccaggttacgtgattttgttagcctgcatgattactggtccccgaccgatggcactgattatgctccggcactgaacaaagcgctgtctgtttctccgcatgttctgatcccaccaggaaagcattatttaaaatcgaccgtttcccttatctctggcaccaggcttatcggccttgggccgaactgtattttgtcatctccggatgcggtttcggcaagtggggcggaaatgcttaccgtgctcagaactacaggtgcgtctgatattgttctgcgggatttggtaatagaaggtggctgtaacgccggtgtgacgtcaaagcgggctatccgtggagtacggtttattaattgcactgatataaggatgattaactgtgaggtaagtcgtaccggcgactgggctacttcattcgaaaaatgtacagacgtgagcgtggttaattatcggcacagaaaaagcggtggcacgctatacggtggccgggacggtattcatttccttgattgcgtgaattttacactaaatggcgctgacattgagtctggtgacgatatggttgggtgcacgactgagacgcgagatcagaggaatgccgtgatacgaaacgtcattggctattccatgctcgcatctggcgttatcttcaatgaggagggagccacaaccttttcaaccgtagatattctggttgatggtgtcacgattaaatccgggaatgtcgtccgtgacgtcgtgcgcgtacaggggattaatgacgccacaaacgtcacaggagtaacggttcaaaatgtcaaaggaacgggctattcacatggtgttttcatatcaggtaaaaaactgacgcgagtaagcgtgtctgatatagatgtcgtttcaactcagtctcacggggtctatattaacggtgcccagaacatgagagcatctggtatgggcgtcagtcaggccgcagcttttgacggctggaacataacgaattgcagctactttgatgcatcgccccgctctttaagctctcaggggtggggagttcaggttctgaactgcgccaactttacactcaatggcaactgctataataacggagccggcctttttgcagcagccaacggaggaaacgggcgcataaacggatgttcaaattacaatgcaactggcgtttatgtcggcggcagtacaacatcttactatggccttttcaatgatgagacccctactggtcgtgttgaccctgctacagtttgcaatggatacataccaagaaacaggccaagaaatctaaatgctttaagggatgcatatgctgcatgttctttcggtcaaactgtaagcgggtctatttcattgcagggtgttgttaactgctcagtagagcttgtttctgatggcagatacaggattaattttaccacgccctttgaatccacattttacaggccggaaattgttgcacaggcaatgaatcaggatctgatcgtccgcccgattgcgaaagacggcagctactacatgtttgaggttcgtaactcatcgggtgtggcactggcaaacttcattttatgtgaattcaaaaaggcgatttaa

SEQ ID NO: 199674 - DNA, 288 bp, Klebsiella oxytoca
atgaccacgctttatcgatacgacgaaaacgggctatatctcggtgaaatagagcctgtaatcaatcctatgtttaatttccccgatgaacccatcgacaaaggttattacgatgcagatggcaatccaccgtctccgccagctgtcggggatgatgagagggcggtgtggattggctaccggtactcggttgagcctaaatatctcgtatttgcgaatacgactactgtgccccctggcgatgaaccagaaggtatgatcttcaatggtataaaatgggtcaaataa

SEQ ID NO: 199675 - DNA, 288 bp, Klebsiella oxytoca; identical to SEQ ID NO: 199674

SEQ ID NO: 199676 - DNA, 1359 bp, Klebsiella oxytoca
atgcttaccgtgctcagaactacaggtgcgtctgatattgttctgcgggatttggtaatagaaggtggctgtaacgccggtgtgacgtcaaagcgggctatccgtggagtacggtttattaattgcactgatataaggatgattaactgtgaggtaagtcgtaccggcgactgggctacttcattcgaaaaatgtacagacgtgagcgtggttaattatcggcacagaaaaagcggtggcacgctatacggtggccgggacggtattcatttccttgattgcgtgaattttacactaaatggcgctgacattgagtctggtgacgatatggttgggtgcacgactgagacgcgagatcagaggaatgccgtgatacgaaacgtcattggctattccatgctcgcatctggcgttatcttcaatgaggagggagccacaaccttttcaaccgtagatattctggttgatggtgtcacgattaaatccgggaatgtcgtccgtgacgtcgtgcgcgtacaggggattaatgacgccacaaacgtcacaggagtaacgattcaaaatgtcaaaggaacgggctattcacatggtgttttcatatcaggtaaaaaactgacgcgagtaagcgtgtctgatatagatgtcgtttcaactcagtctcacggggtctatattaacggtgcccagaacatgagagcatctggtatgggcgtcagtcaggccgcagcttttgacggctggaacataacgaattgcagctactttgatgcatcgccccgctctttaagctctcaggggtggggagttcaggttctgaactgcgccaactttacactcaatggcaactgctataataacggagccggcctttttgcagcagccaacggaggaaacgggcgcataaacggatgttcaaattacaatgcaactggcgtttatgtcggcggcagtacaacatcttactatggccttttcaatgatgagacccctactggtcgtgttgaccctgctacagtttgcaatggatacataccaagaaacaggccaagaaatctaaatgctttaagggatgcatatgctgcatgttctttcggtcaaactgtaagcgggtctatttcattgcagggtgttgttaactgctcagtagagcttgtttctgatggcagatacaggattaattttaccacgccctttgaatccacattttacaggccggaaattgttgcacaggcaatgaatcaggatctgatcgtccgcccgattgcgaaagacggcagctactacatgtttgaggttcgtaactcatcgggtgtggcactggcaaacttcattttatgtgaattcaaaaaggcgatttaa

SEQ ID NO: 199677 - DNA, 288 bp, Klebsiella oxytoca; identical to SEQ ID NO: 199674

SEQ ID NO: 199678 - DNA, 849 bp, Klebsiella oxytoca
gtgctcccaaccgagcggcgacaggtactgcaacagcgcgtcatcaacggcatggccgttgccacgcagcgcgtgcgcagcccgttccagatagaccgtgttccacaacacgacggcagccgttaccagattgaggccgctagcccggtagcgctgctgctcgaaactgcggtcgcggatttcacccaggcggttgaaaaacactgccctggccagcgcattgcgcgcctcgcccttgttcaggccggcatgcacgcggcggcgcagttccacgctttgcagccagtccaggatgaacagcgtgcgctcgatgcggcccagctcgcggagcgccacggccaggccgttctggcgtgggtagctgccgagctttcggagcatcagggaggccgtcaccgtgccctgcttgatcgaggtggccagccgcaggatttcgtcccaatgggcgcggacgtgcttgatgttgagcgtgccgccgatcatgggtttcagcgcgtcataggcggcgtcgcccttcgggatgtagagcttggtgtcgcccaggtcgcggatgcgcggcgcgaagcggaagcccaggaggtgcatcagggcgaagacgtgatcggtgaagcccgccgtgtcggtgtaatgctcctcgatccgcaagtcggactcgtggtacagcaggccgtcgagcacgtaggtcgaatcgcgcacgccgacgttcacgaccttggtgtgaaatggcgcgtactggtcagaaatgtgggtgtagaacgtccgccctgggctgctcccgtatttcgggttgatgtggccggtgctctcggccttgctgccggtgcggaagttctggccgtccgacgatga

SEQ ID NO: 199679 - DNA, 357 bp, Klebsiella oxytoca
atggcggaactgtgcgttgaccagatcggccagcgccgccccgtaggtttcgtcgcggatgtgccaggcttgcagccaagccagcttggcgtaggtcgtgccggggcaagactccgccatcttggtcaggcccaggttgatcgcgtcggcgaggatcgtggtcagcaacaggttcttgtctttggccgggtcgcccgatttcagatgcgcgaaatgccgagtgaagcccgtccattcgtccacctccagcagcagttcggtgatcttgacgtgcggcaggatcattgccgtctggtcgatcagcgcttgggcggtgtcgggtaccgccgcgtcgagcggcgtgatcttcaagcctga

SEQ ID NO: 199680 - DNA, 750 bp, Klebsiella oxytoca
atggccaccgcccccggtgaagccggtgacaaaatccgggagatgatccgccagctcgaggaagaactcggcaagctgaatcaggcggggaatgagctgactcaggcattccgcgacggtctgcagagcggtatcgaaagctctctgatggggctggccaaaggcaccatgaacctgcgtgatgcggtgaaaaaccttgccctcaccatcattaacagcatggcgcagctggcggcacagcagctggcgcagatggccacttccagccttatcgggagcagcggcggcatcggcggtcttcttggcagtgtgtttgcggctgatggcggtcaggttcgcggtccgggcagcaccacctcggattccatcccggcgatgctctccgaccaggagtttgtgacccgggccgcggtggttcagcagcccggtgcgctggacttcctgcacgcgttcaaccgccacggtatggctgcggtcgagggctggttgccccgcgttcgtcatgccaccggtggactggcgggcatccccgcacagaatatgccggtcccggcctcagtgcctgaaaccgcgatggccacacccgccgctgcgtcgcagcagcccatcagcctgcagcagcaactggtgctggacccgtccgaggtttataccgccggagcgcaaacgctggctggccagcgccagttcaccacgtcgctcaaagcgcaggtaccgaccctgaaacaatggctggggctgaataaatga

SEQ ID NO: 199681 - DNA, 987 bp, Klebsiella oxytoca; identical to SEQ ID NO: 99328

SEQ ID NO: 199682 - DNA, 423 bp, Klebsiella oxytoca; identical to SEQ ID NO: 10327

SEQ ID NO: 199683 - DNA, 1386 bp, Klebsiella oxytoca
gtggccaagttcgcccgcgtcatcgcagcccagcaggcgcaggacgtctcagcgattgaagagttccttttcgaagaccaggacgaacagggtaatacccggatgattgcggcctaccgcgtacggttcgccagcggatttcaggtggcagcactctcttcccggcctgccaacatccgtggtcttcagggcgtcgtcattatcgacgaagccgcattccatgcggatgttcagggtgtgcttgatgcagcgaccgcgctgcttatctggggggggcgtattgtggtcatcagctctgagaacggcaaaaataacccgttccaccagttctgtaaggatatcgaagaggggcgctacggtgacgatgccgccgtgttacgtatcaccttcgatgatgcagtgacgaatggcctgtttgagcgggtctgcgcgatgaaaggcgaagcggcaaccgtcgaggggaaaaagacctggtataaccgtatccgtaacgcctatggcccgcgtaaagcggcgatgcgcgaggagctggacgccatcccgcgtgacggtaacggtatctgtattcccggtgtctggatcgagcgggccatgccggaggaacgtcccgtcatccgtctcgcgctggatgatgactttatccatatgaccgaggcagagcgagcggcatggggtaatgactggatagacagggagctgcgcccggtaatggcagagaccctgaacccggagctgcgtcacgtgtttggtatggacttcgcccgccaccgtcacttctcctccatcgtaccgatggccatcatgcagaacctgtgtcgcgatgttccgttcctgctggagctgaacaacgtgccttcagcgctgcagcagcagatcctgttctggcttatcgggcatcttccccgccagtcaggcggtgcgatggatgccaccggaccagggatggtactggccgagtataccgccgaccgctatggtcgcccgcgcatcgccgaaattaccctgaaccgcaagtggtacggcttctggatgccgaaattcaccggcctgtttgaggacagcatgatcatcctgccgcgcgatgagaacaccgcgcaggacctgcgggcagtggaaaacattgatggcgtgccgatggtggccagcctggagaaaaaagacctcaaagaccccgaactggtgcgtcacggcgatacggcgattgccggttgtctggcgaactatgccgccctgaatctggccacagagatagcgtttgagtccaccggtgagcgcgatattttccgcgtgctgtcaggcttcggcgacagcagcagcgccggggaattcactgacaccggattcggtaccgtgcgtggcattaatgactttggaggattcctgtga

SEQ ID NO: 199684 - DNA, 1386 bp, Klebsiella oxytoca
gtggccaagttcgcccgcgtcatcgcagcccagcaggcgcaggacgtctcagcgattgaagagttccttttcgaagaccaggacgaacagggtaatacccggatgattgcggcctatcgtgtccgcttcgccagcggatttcaggtggcagcactctcttcccgcccggccaacatccgtggtcttcaaggggtcgtcattatcgacgaagccgcattccatgcggatgtacagggtgtgcttgatgcagcgaccgctctgcttatctgggggggccgtattgtggtcatcagttcagagaacggcaaaaataacccgttccaccagttctgtaaggatatcgaagaggggcgctacggtgacgatgccgccgtgttacgtatcaccttcgatgatgcagtcacgaatggcctgtttgagcgggtctgcgccatgaaaggcgaagtggcaaccgtcgaggggaaaaagacctggtataaccgcatccgtaacgcctatggcccgcgtaaagcggcgatgcgtgaggagctggacgccatcccgcgtgacggtaacggtatctgtattcccggtgtctggatcgaacgggccatgccggaggaacggcccgtcatccgtctcgcgctggatgatgactttatccatatgaccgaggcagagcgcgcggcatggggtaatgactggattgacagggagctgcgcccggtgatggcggagaccctgaaccccgagcagcgtcacgtgtttggtatggacttcgcccgccaccgtcatttttcctccatcgtaccgatggccatcatgcagaacctgtgtcgcgacgttccgttcctgctggagctgaacaacgtgccctcagcgctgcagcagcagattttgttctggcttatcgagcatcttccccgccagtcgggcggtgcgatggatgccaccgggccgggaatggtactggccgagtacacagctgatcgctatggtcgcccgcgcatcgccgaaattaccctgaaccgcaagtggtacggcttctggatgccgaaattcaccggcctgtttgaggacagcatgatcatcctgccacgcgatgagaacacggcgcaggatctgcgggccgtggaaaacatcgatggcgtgccgatggtggccagtctggagaaaaaagacctcaaagaccccgaactggtgcgtcacggcgatacggcgattgccggttgtctggcgaactatgccgccctgaatctggccactgagatagcatttgagtccaccggtgagcgcgatattttccgcgtgctgtcaggcttcggcgacagcagcagcgccggggaattcactgacaccggattcggtaccgtgcgtggcattaatgactttggaggattcctgtga

SEQ ID NO: 199685 - DNA, 165 bp, Klebsiella oxytoca
atgatgtccctctgggatgcgctccggatgaatatgatgatctcatatcaggaacttgttcgcaccttccctaagtcaccggcggcttgcctgccacacattgaacattacagaccaattagcactttgtcaccggggaaagatgtaaagattatgtataaatag

SEQ ID NO: 199686 - DNA, 1170 bp, Klebsiella oxytoca
atgctggtactgaaagacctgatgaaacagcacggtattgaacagacggaagtcgctgcagctgcagctgtttcgcagcccgccgtttcacagctgattaaccacggcatctggccgaagcgtcgccctgaagaagtgcggcagaagattatgacattcctggcatcacgcgggctcggggaggaattatcccgggcgtttgatgaggtactgacggcggaacccgccagtacctccgtcccgcaacaggcaaataacgaagaggacgaaaatatgttactggcaaaacaggtattaaatccagtcaccaaaaagcaattcggtattttccgtgacccgttcgcggatgacgccatgcagagttcagaggacgtgttcaccacgcctgatattcgctatgtccgcgaggcactgtatcagacggcccgttttggcggatttatggcggttatcggggaatctggcgcggggaaaagcacgctgcgccgcgacctgattgagcgtattcaccgcgaaaatgcgccggtcatcgtcattgagccctatatcatcgcgatggaagacaacgacaacaaagggaagaccctgaaagcggccagcatcgccgaagccatcattaacaccattgcgcctctggagaacgtcaaacgcagccaggaggcccgttttcgccagttacaccgcgtactgaaggactccagcaacgccggttacagccacgttctggtgattgaggaggcacattcactgccgctgcccacactgaagcacctgaagcgcttctttgagctggagcatggctttaaaaagctgctgtccatcgtgctgattggccagccggaactggcgatgaaactgtctgaacgcaaccaggaagtccgtgaggtagttcagcgctgcgaagtagttgaactgctgccgctggacacagagctggagcgctttctgaagttcaaattcgaacgtgccggaaagccggtgactgacgtgctggataacaccgctgtcgacgccatccgtgcccgcctcagtaataatatcggcggtcgcagaggggttgtcagcctgttatatcctctggcggtcagcaatctggtgattgcagccatgaatatggcggcgcagctcggtgttccggttgttaatgccgacgttattaaggcggtttaa

SEQ ID NO: 199687 - DNA, 414 bp, Klebsiella oxytoca
gtgatcgtcgcgttcaatatcaagataagggttgaaacgtcccccgaacggcagggctttgccttttctcgcagcctcggtttcttccttactggccgtaccgaagacgtgctgctcaacttcatcaagatgctgctgggcaacggtctgaggcagcggtttaaagctttcaccaataaccggggcatcaacagcaaagccgtgttcgtctttctgcacctcgtcaaccaggaagaacgatttcagaccatcctcgccggtcatcactacctgagcctgatcgtcacggtagaggttgcgggcaatcataacgcggtcattcacgcagacacccggcacagcggaaacgtcgtactgccgcccccggaaacgtacccgcacaaagctgtccaccttacagctgaccggcgctga

SEQ ID NO: 199688 - DNA, 351 bp, Klebsiella oxytoca
atgctggacttttccccgacatccgccatcagcggccattccgttgatgtgatcgaggcaggttttaccgagctgggtattcgcccgggtcgccgtgatatctgcattctgctggctgatggcacccgctattaccgccgcatcatcgctgtcagtctggtcagcggtgtggagcgtcttgtgctcgatggcgatgccatttcagctggtcagcaccagatcgtgtccatttccctgatgaccctggcccgccaggacgccgacagcgtgtcctgggagcatgtgaccgacgccgacggtgtggcccgggtcgccaccacctttaccggagtacgtgatgagctggagtga

SEQ ID NO: 199689 - DNA, 1020 bp, Klebsiella oxytoca
atgacattcctggcatcacgcgggctcggggaggagttatcccgggcgtttgatgaggtactgacggcggaacccgccagtacctccgtcccgcaacaggcaaataacgaagaggacgaaaatatgttactggcaaaacaggtattaaatccagtcaccaaaaagcaattcggtattttccgtgacccgttcgcggatgacgccatgcagagttcagaggacgtgttcaccacgcctgatattcgctatgtccgcgaggcactgtatcagacggcccgttttggcggatttatggcggttatcggggaatctggcgcggggaaaagcacgctgcgccgcgacctgattgagcgtattcaccgcgaaaatgcgccggtcatcgtcattgagccctatatcatcgcgatggaagacaacgacaacaaagggaagaccctgaaagcggccagcatcgccgaagccatcattaacaccattgcgcctctggagaacgtcaaacgcagccaggaggcccgttttcgccagttacaccgcgtactgaaggactccagcaacgccggttacagccacgttctggtgattgaggaggcacattcactgccgctgcccacactgaagcacctgaagcgcttctttgagctggagcatggctttaaaaagctgctgtccatcgtgctgattggccagccggaactggcgatgaaactgtctgaacgcaaccaggaagtccgtgaggtagttcagcgctgcgaagtagttgaactgctgccgctggacacagagctggagcgctttctgaagttcaaattcgaacgtgccggaaagccggtgactgacgtgctggataacaccgctgtcgacgccatccgtgcccgcctcagtaataatatcggcggtcgcagaggggttgtcagcctgttatatcctctggcggtcagcaatctggtgattgcagccatgaatatggcggcgcagctcggtgttccggttgttaatgccgacgttattaaggcggtttaa

SEQ ID NO: 199690 - DNA, 816 bp, Klebsiella oxytoca
atgagctggagtgagtttgaatattccgtggccgatggacagccgctgacgctgtatgagttccggctgggcgacagcctgttctggcgttacagcaacgccgacaaagatatcgactttgccggtcaggtctgggaggcacaggccatcagcaacagcggcctcagttccggcagcggtgacggaatggatatcactgttccggccagtaatgcggtggcactgctgtttcgtgccacgccaccctcgcgcaccgtcagggtgcgggtgatgcgctggcacgcgacggatacctccggcgagtttcgcgtggtctggatcggtgaaatcagcagcgtcaaacgcgagcagattgagtcctgcaagctgatcaccatcagtctggccagcacgttctcacgggtcggactccgtctgacatggggacgtcagtgcccgtatgcgctttacgatcataactgccgtgttgacccgctccagtttgcagtgagcggcgtggtagtcaccgccctcgacggctcctccgttaccgcgaatttgcccggtggccttgccagtgactggttctccggcggcttcattgagtttgaccgtaacggctataccgagcggcgcggcctgcggtcacaggacggtaacacgctgcatctgtttggcggtacaacaggcctgcaggtcggtcagtccgtcacgctgtatccgggctgcgaccgcacgattgccacctgcgacagcaaattctccaaccatctgaactacggtggccagccgcatatgccgggtaagtcgccgtataccattatcaaactgttttaa

SEQ ID NO: 199691 - DNA, 129 bp, Klebsiella oxytoca
atgaaaatctctgatgttttctactgcgacccatgcatggtaagaaagctcaagccttctggcctgttcccgggttttaacaccattgcggaaaggggccagcatctgttccggcataccttgctctaa

SEQ ID NO: 199692 - DNA, 468 bp, Klebsiella oxytoca
atgacagaaagtaccgaaaccctgggttttgccttcagaaaactcgttgaggccctgcataaaacgggggttatagacgcccggtccgttgccagagaaatagaacgagaccaggatgcacctgctgacattgccggggagttaacgtccctcgcaactgacatcagaaagcttgccggggatgccgaagcatcacttaacggatattcaccggcaccgtgggggtatacgtttgatctcatcgttcagtacctcattgtcagcgagagttcgtttgatcgcctggactttgccgggtatctggatgattgtctggtcgggatggtgaatcactcggctcctgaccacctacttcgggccgtgcgggatcttgctgactacagcagagggacccggcatcttgacccgatacttcggacgtctctttctgatcgtccctgcgggacctctgacgatgaaaatctctga

SEQ ID NO: 199693 - DNA, 468 bp, Klebsiella oxytoca; identical to SEQ ID NO: 199692

SEQ ID NO: 199694 - DNA, 783 bp, Klebsiella oxytoca
atggtgctgcgggcagatgacccgtggtggatttaccatttcccgatcaatgcctggggttgccagtgcagcgtgattgcccgcaccgaagacgacctgcggcgcatgggcaaagacggtccggatactgcgccaccggttaaattcattgcccgcgtgattggccagcgcagcccgggtggcccgaggaccgttattgtgccggaagggattgacccggggtttgagcataccccgggccgcagccggtatttcagcgaggtgccaccgccccggggtggcagtccggtcggcgacggaccgttcaccccggtggcggaagcgccagccacagcggcaccgctgccagcgccccttccggctccggtgtctgaaggcgatactgatgcggtggatgccttcctgcagctgttcggcgcgactgctgatcgtgatgcagcgttccgggacccgacgggccagcgcattgccattggcagcgacatgttcgcgtcgccggaggatcagggtcagatatcgctgtcactggcgcaggctctgcagctggcagagaccattcaacaccccgatgaaatctgggcgcagattgtctggttgccggaagagcagcagtcgctggtgaggcgctattacctggcccgcctgcagcaggaaggtgaggcgaacccactgtccgtagtgttcgccaccgggcgcgatggctgggccggtaatatttcaactgacgatacgctgctgcagtcgctgcgacagggtatccgcctgtggtcgcgggaggactga

SEQ ID NO: 199695 - DNA, 783 bp, Klebsiella oxytoca
atggtgctgcgggcagatgatccgtggtggatttaccatttcccgatcaatgcctggggctgtcagtgcagtgtgattgcccgcaccgaagacgacctgcgacgcatgggcaaagacggcccggatactgcgcccccgattaaattcatggcccgcgtgattggtcagcgcagcccgggtggcccgaggaccgttattgtgccggaggggattgacccgggctttgagcataccccgggccgcagccggtatttcagcgaggtgcccccaccccggggcagtaacccggtcggtgacggaccattcacgccggtggcggaatcgccagccacagcggcaccgttgccagcgcctcgtccggctccggtgcctgaaggcgatactgatgcggtggacaccttcctgcagctgtttggcgcgaccgctgaccgtgatgcggcgttccgggacccgacaggccagcgcattgccattggcagcgacatgttcacatcgccgaacggtcagggccagataccgctgacactggcgcaggcacttcagctagccgaggctgtccgtcaccccgatgaaatatgggcgcagattgtctggttgccggaagaacagcagtcgctggtgaggcgctattacctggcacgcctgcaacaggaaggtgaagtggacccgctgtcggtggtgttcgccaccgggcgcgatggctgggccgggaatatttcaactgatgatacgctgctgcagtccctgcgacagggtatcagcctgtggtcgcgggaggactga

SEQ ID NO: 199696 - DNA, 639 bp, Klebsiella oxytoca
gtgttcacccgctgcgtgctcggcatggtcgtcacgctggaagcgccgtctgccgtttcggttggcctgtgcctcgtgcatgtcgcctgcgacaagcgcccttggctggaaggactgaacgtggaaatggattggcagatgagcggcaagcccttgctgctctacctagacaacgcggccgagttcaagagcgaggccctgcgccggggttgcgagcagcatggcatccggctggactatcgcccgctgggacagccgcactatggcggcatcgtggaacggatcatcggcacggcgatgcagatgattcacgacgaactgccgggaacgaccttctccaaccctgaccagcgcggcgactacgattccgaaaacaaggccgccctgacgctgcgcgagctagagcgctggctcacattggcggtcggcacctaccacggttcggtgcacaacggcctgctccaaccgccggccgcgcgctgggccgaggccgtggcgcgtgtcggcgtaccggccgtcgtcacacgcgctacttcgttcctggtcgattttctgccgatcctccggcgcacgctgacccgcaccggctttgtcatcgaccacatccactactacgccgatgggcactgttgcaaatag

SEQ ID NO: 199697 - DNA, 198 bp, Klebsiella oxytoca; identical to SEQ ID NO: 191037

SEQ ID NO: 199698 - DNA, 606 bp, Klebsiella oxytoca; identical to SEQ ID NO: 170890

SEQ ID NO: 199699 - DNA, 288 bp, Klebsiella oxytoca; identical to SEQ ID NO: 199674

SEQ ID NO: 199700 - DNA, 324 bp, Klebsiella oxytoca
atgatcatcctgccgcgcgatgagaacaccgcgcaggacctgcgggcagtggaaaacattgatggcgtgccgatggtggccagtctggagaaaaaagacctcaaagaccccgaactggtgcgtcacggcgatacggcgattgccggttgtctggcgaactatgccgccctgaatctggccactgagatagcatttgagtccaccggtgagcgcgatattttccgcgtgctgtcaggcttcggcgacagcagcagcgccggggaattcactgacaccggattcggtaccgtgcgtggcattaatgactttggaggattcctgtga

SEQ ID NO: 199701 - DNA, 258 bp, Klebsiella oxytoca
atgtttacgatagagaaagaagttgcggtcaatcaggtaactgcagatggcattgcagtcggaaccacagcattaaaagtcaccctgacatataccatcgagaggattgagcttgaaggtgagaacggtatcgctttttacactgttacgtctggcgctgatactgagggtgcgaggaactacatcccattcacctattcaggaagtggcgatccgctgtctgaggccgaggaagcgctaaagttaagagttaaatga

SEQ ID NO: 199702 - DNA, 444 bp, Klebsiella oxytoca
gtgattgaggaggcacattcactgccgctgcccacactgaagcacctgaagcgcttctttgagctggagcatggctttaaaaagctgctgtccatcgtgctgattggccagccggaactggcgatgaaactgtctgaacgcaaccaggaagtccgtgaggtagttcagcgctgcgaagtagttgaactgctgccgctggacacagagctggagcgctttctgaagttcaaattcgaacgtgccggaaagccggtgactgacgtgctggataacaccgctgtcgacgccatccgtgcccgcctcagtaataatatcggcggtcgcagaggggttgtcagcctgttatatcctctggcggtcagcaatctggtgattgcagccatgaatatggcggcgcagctcggtgttccggttgttaatgccgacgttattaaggcggtttaa

SEQ ID NO: 199703 - DNA, 468 bp, Klebsiella oxytoca; identical to SEQ ID NO: 199692

SEQ ID NO: 199704 - DNA, 216 bp, Klebsiella oxytoca
atggcaataaagatagagattttaatcgcgctgacgccggaaggatttatctattgcaaaatgaccggcgcaaatacaaaagacgcgagtgaaagtgagctggcgacgcttgagtcattaaagcctgttgtaaatgaatctgttctcaacaaacttaaacagagcggatatcgggttgcagctgattatctgcagccttccggcaaatcacattaa

SEQ ID NO: 199705 - DNA, 210 bp, Klebsiella oxytoca
atgattattggcgcactgattttaaccattgccggccttttactcgtcatcatggctgggtatttatcggcaaataatctaagccctgtaccagccatgctgggtgtcatcggttcagttattgttattgcagcacttgctctggctcatggtcctggcaaggtcaataccccggattcgccccttgttactcaggaggcaggtaaatga

SEQ ID NO: 199706 - DNA, 171 bp, Klebsiella oxytoca
atgagcttcgaaaattggactattgaagacctgctcgagcgttgcacggactacgacgatatgtcgctggcaatggacaaggaagagttttccgcgctgcgccgaaaaattgcagagcttcgcatgcatgttaatcaggaggcagacaatgacccgaacccagctgattaa

SEQ ID NO: 199707 - DNA, 327 bp, Klebsiella oxytoca
atgccgacgcttactgttataaaacatttcgatgtaatcaaaaatatcgctgcgggcttcttcccgcgttccgtagatctttttctttatccgttcgcgtttcagcaactggaaaaagctttctgcaaccgcattatcgtgacagttaccgcgacggctcatgctcccctccaggccgtgtgctttcaggaacgactgccactcatggcttgtgtactgactgccctggtccgagtgaaccagcacctgtttttggggattacgccgccatacagccatcagcagtgcgttcaggacaatgtcctttgtcatccgggattgcattga

SEQ ID NO: 199708 - DNA, 240 bp, Klebsiella oxytoca
atggtcattaaagatgtacaccagcgcatccggttttttctcctccagccagcgctgcagcggttcgaagctctggaagatcggcgaccatgccgggtcctgctgtttatgatgatcgaccgcgaagccgatagtcggggtatgagagacggcgataccgccgagaatgttagccatcagataactccacttatcggtgttccaggggggatgacaaagcgtccagttctgcctctgtga

SEQ ID NO: 199709 - DNA, 258 bp, Klebsiella oxytoca
atgtttacgatagagaaagaagttgcggtcaatcaggtaactgcagatggcattgcagtcggaaacacaacattaaaagtcaccctgacatacaccatcgagaggattgagcttgaaggggagagcggtatcgctttttacacggttacatctgacgcggatgctgagggtgcgaggaattacatcccattcacctattcaggaagtggcgatccgctgtctgaggccgaggcagcgctaaagttaagagttaaatga

SEQ ID NO: 199710 - DNA, 1389 bp, Klebsiella oxytoca
atgcctgtgttcacatataaaacgactgaccggggctgggctatcctcagcactggtgcttcattgattattctcctggtggtcagcgtctggggctttacccttatcagtgactggatgcaaaaacggacctggctgaataccgcgtcacaggtatctcgctttacacaagctgtgaagagctacactggccgttattacgatactttgctttcaagtgccaccaccacgaccccggttacggttacacccgctatgctgaaaaacaccggatttctggagcaggggttcagcgagacgacagtagacggacaggcttatctggctgctgttgttcgtaatgccactaatacagatcagctgcaggcactggtttacactcaaaacggcgcggcactgccttttctcgcactgcgccagatatcaatggatatcacctcgggtatgggcggctatatatggacatcaggtactgctaccggcgctatgggcagctggactattcctctttcacagtttgggataagtacaactcagggacatattgcggctttactgaccacagatgaactgggcgctgctcgcggtgaaaatgatcgcctttatcgtttttcggtaaccggcaagccagacctcaacacgatgcataccagtattgatatgggaggtaacaatcttaataacgcaggcacgattaatgccgtaacgggtaatttcagtggcgatgtggcggccactggaaatataactgcgaatggaactgttacaggacagaatgttactgccggttcaaacgtcaccgcaggaaatacaataacggctaacaacgacatacgttcaaataatggctggttcataactcgagggagtaagggatggctaaatgaaacgtatggcggcggtttttatatgtcagataatgactgggttcgagtcataaataataagaatatttacacaagcggtcaggttcgtggcggaagtgtgcgggctgatggaagactttctacaggagaagttttgcagctcgacggagtcaatactgctggcgcagtttgttcaccaaacggccttgtaagccgcgacgccactggagccatactttcctgtcaatccggtgtgtggacagccgcatcaaaaatcaaaatgcaaaccgtttttggcgaaaccacctgcgccaacaaagcggttgcatctgcttattgtccgtcaggtacagtggcaataggtggttcttatgctttaaaaagttggtctgatggttccaaccataactcacccgactcaatggttcttgatcctgtaaatgaccggttttacatcgttttaccgaacaattcgaaaggtgcagcgtgcttccaggctatagcaaactgcgccactaattag

SEQ ID NO: 199711 - DNA, 870 bp, Klebsiella oxytoca
atggtggtgcaaaacaacaacaataatatatttagttttgtttctagatatcatttcccaattgttgggtttgataattcctctagtaaagaagaagtggttggtacgtgtactttattaaagattggtgagcggatttttttaataacagcagcgcatgttatgaatgaaagatataaagttagagataatgaattatggttatggaactactctgatggaagtaagataaccataactgaagacattatctgtaatccaagttcggatgttccgcacttttcagatgtggccgttgtagaaatagatgtaacaacttacccgagcttcaataaaaaagagtttcatgatttttgttttttaaatttggatagggtacttaaagagcttgattatccaattttggaaaataatacgtttgcatatcttattgccggctacgctagttctcagaataaaataattcaatgccgatatagacggcctaagatatttcagtatcttacgcatccattaccatatactgagtttaacagtcctctttcaactatgaccataagaggtgaatgggattccggcaatacttctgaatccggaaagacattacctaaaccacaagggatgagtggcggaggtatgtggattgtttcaacgaagtcagagtataaccctatttttgctggggtttcagttgcttaccttaaggaagaaaaagccgtgctggcagtaaaggcaacttatatattatcactgattaaatgtttttttcctgatgtaagcctttctgaggaagacttgccaataaaattaattctggattcagaaatggatggttctttatttttgcatattcctgttcaggagggttaa

SEQ ID NO: 199712 - DNA, 363 bp, Klebsiella oxytoca
atgaataaattaacagctactctgctactgatgctgatatctacagcggccagtgctgctgactatattaaacccaacgcaggactcagcctgacacctcagggagaaaatatggcgttcagtattaattcatcttatggtgatgcatccggggtctgtaatatggacggtgtagcgcaaccaatccccgcagggaaggggcagaaacatcgctggggctggagcgacaatgatagcaacagtcagtgcgttgccgtaatcagtgaagacaagaatggtaaaatgaacgttacgacaaaaggatgcgacggttactgtggtatgtctgctgtgggctctatggacggactctatcaccggtag

SEQ ID NO: 199713 - DNA, 756 bp, Klebsiella oxytoca
atgcacaatacaaaaagcaaatataaacacacgtcttctttctggatgtatttaaaaaagtgtgggtgttaccgtataaaacgcggtaagctgaccgacgtacatggtgatgtgagttttaacacagaagcaggtaaaaggctgcgtatccctgccggtattaatttccatggacagataaaactcactcagacaaacaaactgtcaccgaatatcaccttcgttaatcgagttcatgttttacccatcgctactggctcaattgatgctcacatagttcctcatctccgtattccagaaagtacacaattcctgtccgatatttttctgaatacgtttcacgggagatggccggataatataaggactattaaaggccattttttctggacatactcgtatatcaggaaactgccggaagtatttacagttgctacagacatcaacctcagcggttcccgaattaaacagtttccggtagaactgacagtgaagggggatgtcatcatgcccggaatacaagccagaagactgcctgacagaattaatctgagccagtccctgagactttcattttcaacactggaagcattgcctgaggcgctgagcattccgggtgacctcagtatcaaaaatacctgtatcagtcggcttcctgatggtctctgtgttggcggaaacatggatattacagggacacaaatcagtttcatttctgaaaagatatttatcggtggagaaatcctccgtaattaa

SEQ ID NO: 199714 - DNA, 471 bp, Klebsiella oxytoca
atgaaatttctgttcccggttattctttttgtgtccacgacggcatcagcaaaatgtttaaatcatgacccggcgtttccgggctcatatcttggaggaatggaatacacaatggctgttgcccccactgaaaacgggtacacgggcatgccacttacggattacgtctgtagccagtattatattctcaataaacctgtggttcgtatcaatgtgcgcggcggaaatacaaaactgcgtaatcaggtattaaccattgatatcatgggtagatatatgaactcaggaaaccctgcctttatcagacttacacgtattaatatgacacaatttcagccgttacagagtgacagtgagaattttactccagcttctgatttagagagagtaaaggaactggtctctgacctgcaggcatcagggtatcgttacgttgactccacttttataaatcccggcaacacctggtaa

SEQ ID NO: 199715 - DNA, 345 bp, Klebsiella oxytoca
atgggacataaaatcagaaagtatcatggcgattgttttttcgaaaatgacgaagagttccggtttgatttgtttacgataatcgacagcggttatatagtggcaaatgtatcaggtaactgtgagtatggtccatacaagggggaaattagaattaacctccaggaaggtgtttatcacggcgaaggactagtcacctattccggtatttctgtttatagtttttctctttcacttgccataaacattacagagtcattctgctatatttctgatgggatctggcaggaaggtggatatgagtaccattttcagggggagcttgagcggatatcttctgagtga

SEQ ID NO: 199716 - DNA, 519 bp, Klebsiella oxytoca
atgagtgtgagcgtcagcgaggtggtgaacagtttcagttgcctctatgcatccctgtggcggaaggagttcaccaaaacattacgtcccggcgaatacagtgaaagagaacttttacccctgctcaggttctaccttttaggtcggttcggggataaggtgttgcctgaggtacgggggatattgccgggtaccctgcgtggttcaggacgactggattttttgattggtgacgtggcggtggaatttgccgtcagaagacgaaatgaccgggcctgtacactgcgtccggaatatcaggcgacagaagtcaaaaaactgctgaaatacgacgggaaagcggttctgatactttttgacttatcatataccccgctgacgttttctgtaatcagaggatacaggtctttacctgccatggggaatcacataaaaacgtcgtatcatgtggtttacttttaccgtaaagagaatggcagtacggactatatacgcagacatataaaaatatttcggtga

SEQ ID NO: 199717 - DNA, 273 bp, Klebsiella oxytoca
atgactaactcatcagcttcgcagaaaaagcgtagtaagggaagtattcaggactggcacagggccgatattgtggctgccctgcacaagcgcggtatcacgctggccgggctgtcccgtgcccacggactggccgcacgaaccctcagcaatgccatggaacgccactatccacgggcggagaggctgatagcgcaggcgctggatatgcgcccggaagatatctggccccggcgttacctgaacaaaaaaatacacggagaaaaggaatga

SEQ ID NO: 199718 - DNA, 405 bp, Klebsiella oxytoca
atggttaaagagacgaaaaatccctccggcaatacgcataccggtatcgggcatgaaggtgaagaaaacatctggctgacggctgagaagtttgcccgactggacggaatgcccggtacagcaaaaggcgcccgcctgcgtctggagaagctggcggagcttcacccggaaatcagacgcaagcgcacgcgcggaaaaggttttgtctatcatatcagtgcggcagggatgtccctgaaaagtgaaagggaggccgtaaaattgccgtcggatgacaaactcagcctctggatacagttgttccgcaccatgtctccggcttcccgcgaccggatgctgaaactggcgctggcgcaggtggcggaagaccttgaacaaggacgttcatcagcagttgaaaaatag

SEQ ID NO: 199719 - DNA, 423 bp, Klebsiella oxytoca
atgaaagaaaatatgactgttcaccagtcagggctgcacttacccgtcagccgggcttttataaatataatagctgaatacttaccccctccgccgcttattcctcctgctgttaccctgaattttcgtgactcgaaatactccgcagaatccggtggcttccacccggttgaaatccgtctcacgcatcatgctgatggctggtacttcgactacgtgacggatttcagctatatggggcatccctggttggaactggaaaaggaactcgatatctgctggagtcagcgctacatatggcatttcctcacgggggatatcgatacggaagaaggcggggcgttgtttgaactgtggcagcgcaactttatccgctactgccggatgaagctatacacggtcaccgttcagcaggaacgttaa

SEQ ID NO: 199720 - DNA, 594 bp, Klebsiella oxytoca
atgacgtcatgggccatcaacactcaacaatggctcagtattatgaaacagaaagaccgtaaaacccttcaacccgctgtacagggtgacctggacacactttgtgggctctacagtgtggtgaacgccctctactggcttcatccacaactcagacgaaaagcactgttccgggcgctcatcgaccatctcagccagcatcatgacgtgacatcctgcctgacatgcgggactgagcctgagcagatagacgccctgctgcattttctccggacccgacgcagacagcgctggcctttcagcgttcacaaacccttcacgaatatccccgcgctcaccacccgccacatccttggacagtgtcggcagtggctggaccagcgtccggaccgggttgtactgctgggggaccagtatcactggtctgtcgtcagccatatggacagcgaatggctctacttcttcgacagcagcacttacacgcgcattcatcacagccgctggtccctgcgtcatcagccgggcagacaccagctgttccgggaagctatttacttcattgaaaaagaagtgccggaccatgaccacggatga

SEQ ID NO: 199721 - DNA, 444 bp, Klebsiella oxytoca
atgaccacggatgaacgtttactgattgaacgggcccggaaagtgctcaccacggcagtgcgtcgggggagaatgctgacgtccccggatgaggtacgcgacttcctgctgttcacactggcgctgcgccagcaggaggtgtttggcgtgctgctgctggataaccgtaaccgggtgctgctgtggcgggaactgttctacggcacgctgaaccagaccgccgtttacccccgcgaagtggtgaaactggcgctgcaacacaacgccgccgccgtcattctggtccacaaccacccgtcagggcacccggacgccagcgaggcggatattgcgctgacccgccgcctgaagcaggcgctggcgctgattgatgtccgtatcccggaccactttattgtcgccggggaccacacggtttcgatggcggaacaggggcagctttaa

SEQ ID NO: 199722 - DNA, 924 bp, Klebsiella oxytoca
atgccgcagcaacgtagaaaatcatcatcacgcaccaccatcaaccccgccagcgtctggctggacgggctggccccgaccgggagacgcagtatgcgctccctgctgaacctcagcgccaccctgctccgggactgtgccacagcggtcaacgatgactggtcagcactgcgttatgtccatgtagccactctccgcgccacgctggcggagcagggctatgccgtggcgaccatcaacatggtactggcagcgctgaaaggcgtggcgcagacggcgtttaatctcggacagatggatgcggacgcgctggcgcgtattaaagcggtaaaaggcgtccggggcgacagtgaagcggcggggcgcgccctgagccgggaagaggtccggctgctgctggaggcgacaaaggcccatccctgtaaatcccgccagaaacgcgaccgggcgatactgctgacgctgtgcggggccggactacgggcgggggaactggtggcgctggagacacgcgattatgacgttgccacccggacactgaccatccggcagggtaaggggcgtaagaaacgcactgtcatggtgtcccacgtggtcgggaaagcgctggcagcatggataaaggtcagcgctgaccgcgaaagcctcttctgtcgcattcatcgcagcgggagcgtgacaggccagccgctcaccaccgccggactgacaggcatactgcaccagctacaggaaaccgcgcaaatcagcccgttcacgcctcatgatcttaggcgcacgtttatcacccgactgctggaacagggcgcagacctcaatattgtgcgccagcttgccggacactgcgatatcagcacgacagcgctgtatgacaggcgttcagcaaagacactgacctgcgcttcgtcggcgctgcgattttaa

SEQ ID NO: 199723 - DNA, 570 bp, Klebsiella oxytoca
atgaaaaacaaccgcatcaaaaaaagtgacaagcgtgatgccgaatggcacaggaacgtctatgacaggaataaagaatttaatgtgttccaaaaagagttctatctcggcgataacacgctaaagaaaatggctgtgatgtatcgggaattttttgggcagacaatgaatctgtctaatgttgacaggcacaaggccagtgaggtagtcagcttctgtatcaaccattgctttaatgaattcctcctgaaacaaggcagtgtatctgtggatcatgatctaccggtgcgaatcgaaacagctttaacaccagagggcagagagctttatgacaagtatcagtatgcaagaggctgttttgatcggctgatgacgggtgacagtgataaagagaaaatcagatctgttgccgaaagattaaacaaagctgaaatcccgccattaggtcttgtcaggtttaaagggggtgggaactggacgccggatatggttgaatggttgttagatgcttctaatctcaatgacacaatcaaatggtataatcgtggagataaagctgcggaattttaa

SEQ ID NO: 199724 - DNA, 195 bp, Klebsiella oxytoca
atgtaccaagaacgtattctccgcaaaaaagaagtactgcaacgcatcgggatctcgaatgcatcgctgtaccgcctgatagcaaaaggcgagttccccacaggtataaagcttactggtcaggaaggacgcgccgttggctggctgtcttcggacattgacaactggataagcaaccgtgagcgcgtcaagtaa

SEQ ID NO: 199725 - DNA, 1098 bp, Klebsiella oxytoca
atgaaaaacgaatatgcatgcaaacgcgtggacagtctgaaaaatgcagtttgtctgatgcaaaatagcgacgggcatctctgttacgcccgcattgataaaatgtcgtgggtaacagatcttgggcgcgaacaaaataaagtgttgcttgaacgcctcagtgaactgaaatcgggtggtggctatctcatcaaatgccgccctgcgggtaagaaagagtgtggtgatctctaccgctctgtcgtggagatccggctttctgacaaacgctctgcgcatccagtattgatgatgatctacttttcgcccacaagaaagatttgtggcgtgatgcgtgtggaattcagcccacagcactacacacctgtgcagatcagcgatctgtttctctggctgggacgtaaggggcgcctcggaaaatacctgtaccgggcgctgcgtagcgcatgggtgacgactatccattatgcgctcgatgtggtgggaatgcagtttcatgactatctgttcggacttaaaaataagcatgggggtgaatactatgacctgcacggtcctgaagaagggctacgattgggttccagcacgctgattgcctccgtctatgccaaggttaatgcgccagtcagtacggaggaacgctattccgcgccattattgacgctggaggagagccagcttgagcattttctgcgtctggagctgcgtttctcgccgggtaaacagaagctgatgctgcgcaatctgtcgcatatgaccaatctggtatcacgactggtaatttatcgccgggagatgcttgaagataaggggctggaccctgatttcgtgaaactgctaggagaaatgcccattccggctgcccgagcgaagtttaagcctgccagtaagctgaacggcaaggttgtcagcgccaccaaagatgccgcaaataaacgcgtggataagcgcataaaagagtatcgtgtagcgctatttgacgctgaggccatctgggaccagctaccgctggtattggcgaaactgggtattctggcgcagccgcagtactgggggtatagcaaccgcctgaaatggcttgaatcacgcggggaataa

SEQ ID NO: 199726 - DNA, 1836 bp, Klebsiella oxytoca
atggcgcggatagaaaaccacaaatacagcattgaggaagctttcagggaatgtttctacatagtcccggactaccagcgtgaatatgtctggacggataaggaagtgcaccagttactggaagacatcggcgaacaaattgatgctggtagcacgcgggaatacttcattggtaccgtactggtgtcaccgaccgaccagaaaaaccactacgaggtcatagatggtcagcaacggctgaccacattcttcctgttgctgtgtgtactcaggcacatgtttcggggtgagccacaacggcaaatgatttccgggctggtttcgaccagctatgtggactgtggcggtgaagttcgcaccaacctgaagcttgaacctcgttatgagaacgcgggtgaggtgatgtacaggctggttgaactggatgccgatccacaggccgtgcgggcaggtattcagtctgcaggcattaccagctttgggtcgctggagaatctggtcagtgcctacagtaccctgtatcgctacctgaaggacaactacgatgatatcagtaagttaaaaaagtactggggctacctggccaacaatgtggtgttcatccagatctcaaccgacgtcagtagtgcactgaagattttcgaaacgatcaacgagcgcggcgtggggctgaaccctatggacctgctcaaaaatctgctgttcacgcaagttgaaccatctgagttcactaagctcaaggatgagtggaagaagatcaccaagcctctggaaaagaggaaggaaaaaccacttcgcttcctccgctatttcctgatggctaactacataatcaggaacgatcgcagtgactccgtggtacgcgaggacgaaatctacgactggttcgtatccaaggataatacagctctgtgtaattacgaaggtaagcccttcgagtttgtccgcaaggtgatccgtaacgtcgagtactatctggacttcgcaatgggactgggaaatgatgggacccccagtgtggcgatggatagtctcaggcggctggccggtggcgcattcagcctgcattacgtattactgctggcggcagctggtttccccaggacgttgtttgaacattttgtggcgcaactggagagctttctcttctactacatattcacacggactccgaccaaggatcttgaacgcagcttctccctgtgggccgatgagctgcgcacgattgcggagactactgacccagtaaaacaaaaaattcagctcaacacattcatcgttgatcgttttgagaagaatatggcgggtaagtctcaagaactggcagatgccctgaaacgctttaccttatattcaatgcagcagtacaggacacgttacctgctggcacgactgacacaacacgttgaaatggccttttgcggggtgaaagtaccgggcagcctcgaaccattcaccaaactggaaattgagcacatcctgcctgacaggccagatgcagatctgcgtgccaaatggaccattgaaaatccggggatagtctatgacgattacaagaatcggctgggaaatctgaccttgttggagaaacccatcaacatcgttgcaggcaatgacttttacacggccaagcaagttgaatatagcaagagcggcaactacctgactcgtagccttgtcacgctgactgaagttggtcaaaatacgtccatatcacggatcaacgcaaagctggaagcatttccggaatggaatgccgaaaccatcgagaagcgacatacaatgcttattactttggcgcaggagatctggaggacgcacccagttgatgcatga

SEQ ID NO: 199727 - DNA, 1500 bp, Klebsiella oxytoca
atgaaggcttattgcactaaaaacaacattcttgtcacaaagagaacacttaaaatattcaaaaaagctatttttagcataccgtttgatgataattgcgatggaagaagtaaacccacttattacatgtcaatcgccatacttcttcagcaccttatatgcagcgcaacagccagccggaatacacgaaagcgcgcccgttttaagggcaaccgtaaatggacatactctgttcctcttcccagtgcgctcggcgagaaggttgctcctgccgtattccgccagtcacgggaacttccctttgaaagggcactggaaaagctggtgaagacgggaactattaaaatcattgaacataacattataaagcacaagtgccgcgaatttgcgctgtcaaagcggctgctcaaagcgttgtttccggatgaccgacagtcatatctgcggcgtaaggatcgctactgttatcttaccgatatttatgataaacggcagggccctttaactcttgaggaactcgttgcgctggcatccattcagaaaccagtcgtttgccatcagatatcaaagcgtaaaatcccggatacggcattcagggagcgtgttaagcaggtctacgggcagcttgattacctgcatatcaaccttgatgccctgagggattactgtaatgcgcatcctacacaggtcaatatagggtactaccacaattttatcagccatctctgcgatgtgggcgtgaaaatcatcactatcagtccgctggttgtggcctatcgtcagtcgtacaaaaccgcacgcttaggtggacgttcgtttgaggtgggtaagggatttcagtatctgccaaaaggtatgaaatgggcgtgtctggcgctggggtataactacgatatcaaaagtagccaacttgagatcctgcgatatgagcttgtgcgcattagcgtgtcacccaaaaacctgaaacgccttgaaaccagctatatcagtaaaaaactgtctgttaatgaagatgatgtaaaaagcttccgattttcgaccattttcagtgctggtacagtcagtctgtcgtttcagagtgcaacccggtcgcggctgaacaaacggctgggagaagcagaggctggcaggatactgactcgctggaaaaaactgatggagccactcaaggaagaccttaaacaccttattgaggattatctttcatccggtaagaccaaccgctacgggctttgcgtcagaaatgcggtgggacaaaactttaactgcacatggaagaacatagggaaggcgaaaaaatggcagcccggacaaatgcgccgtaaactgttagcccacatgttgcagggactggaaagccgggctgtctatgattttgtagccagccatgacggggtatgtgctctggaacatgatggttttgtcaccctgaacaagctgtcctatgatgactggaaacatccgtatctgcgcatcgtgctgaaaaatagagcatgttaa

SEQ ID NO: 199728 - DNA, 240 bp, Klebsiella oxytoca
gtgaataaggtcgaattgattcagaagatatcggcgctcgccactgaatgccacacactggcctgtgaacttgatattggtgatgagcgcacggaggctttcgaaatctatgaagttctgagacgcgttcagcgccgtgtcgcagctggtgaaatgctggctgcaactaacccgctgctatgcccaggggtttctgatgatggggagtgggtagactttattgatgatcatgacgactga

SEQ ID NO: 199729 - DNA, 177 bp, Klebsiella oxytoca
atggctgagcgttggaaaatttatctcactattgcattcatcggcttgggagctacgccgataagcatggtagcggcaaagattgacgttcctgtttgggtgcttattgccgggcactgcggcgcgattatagcaggatttatttgcgcagaacttggacggggagccaatcaatga

SEQ ID NO: 199730 - DNA, 135 bp, Klebsiella oxytoca
atgaactttgatcctgaccattacagcaaatacgcactgcgtcggtttgccgcggtagccaatcttatcgggttaatcgtctttatcgttctgacctggggcatatgcatgatgatcgaatgggtgacggcatga

SEQ ID NO: 199731 - DNA, 246 bp, Klebsiella oxytoca
atgtcacagaaagacgacattcagacgttccctctggctggattagaagtgcgccaggttaaggcttatgacgctctgatcctcacaccccaatatctggcctcaccaattgatgccaccattcatcaggacaagaacttcatcgttaccagagccgtagccattcagcttatcgagatgcttcagaatggtgtgaagcaactggactcggcttctggttcagttccgaaatcagaccagcattga

SEQ ID NO: 199732 - DNA, 159 bp, Klebsiella oxytoca
atgaagacaaacggcgaggaagtgaaaagcgccttcgttcagaggcgcttcagtgagaatgaaatcttaaaagtatttagcgtcaatgctggtctgatttcggaactgaaccagaagccgagtccagttgcttcacaccattctgaagcatctcgataa

SEQ ID NO: 199733 - DNA, 672 bp, Klebsiella oxytoca
atgtttgattatttaaacatgaatattgaaagcatgagcgaccgcattgcgcggcgcatgaaagaattaaagctcaaaagtacccacctaatgtcggccactggggcatcaaaaggcacggtgagtcaatgggtgaacggaggtacagaaccttcggccaggtacataagcaagcttgctgatgttcttcgtgttagtgaacgctggttaacagaaggaggtttaattgaagagacaactggaaatgctgagcctggtccagatctccgccgtcgtgttccgttgatttcatcggtacaagcaggtaactggagagagatgattcaaggtaactgggatgaagtgactcaatggattgaaacaactgcaaaagtttctccttattctttttctttacgggtttctggagattcaatgtcagccccttcaggaagtggaatgtctttacctgatggttcgattgtgattgttgatcctgaggttgaggctcttagcgggaggattgtggttgctcgtataaatggaaccaatgaaactacggtaaaaaaactagttatagatggcccgaacatgtatttaatgccgctaaatccggcattcagagccattcctatagattctacatgtgaaatcgtcggtgtttgtgtacgtgtagagatggacttactctaa

SEQ ID NO: 199734 - DNA, 198 bp, Klebsiella oxytoca
atgttaaagcgagatctaatcaaccatttcggaacggcaactgcggctgctaaagctcttggggtttcaaaatccacagtaagtctctggaaagaaactatcccttggcagtacgccctgcttgcagagaagcaaacaaatggagcgctgtcatatgaccctgattcatatgacaagcctaacgaatcagcggcgtaa

SEQ ID NO: 199735 - DNA, 189 bp, Klebsiella oxytoca
atgatttctatacagtttactaacgaagatgagcgaactatctgcgcatacattcgaaccgctcatgatggatatagcggaccggtatttatcaatattcatcggctagaagaacttcatatgcctatgagcacgataatagtctcagaagctttgaataaagccagtaaaggaggaatggccgcatga

SEQ ID NO: 199736 - DNA, 276 bp, Klebsiella oxytoca
atgggcattgaaatgattattggtctggcaactgcgttgctggccattgtcgctggcgcatttgggttaggtcatgcgcgaggtactaataaagcggaagccaaagccgaacagcagcgcaccgaagataatgccgctgccagtgtcgcagcggcggaacgccgggctgatgcaacgaaaggggccagtgatgtacagcagactgttagccatatgcctgatgacgatgttgatcgcgagctgcgcgaaaactttacccgccccggtggtggttga

SEQ ID NO: 199737 - DNA, 330 bp, Klebsiella oxytoca
atgaaaattcagctcgcaaggctttaccgtggaggtcgcttctatggctttggtatcgctgtcaacggtcagctccttgatgggctgacatcggtcgttatcaatactgatacgggtggcactcctacagcaacagccgtattcaatctgaataaagacagcgctgaaaatcaggtggtcattaacctggaagatgctgctgttcgaatgggtttcgacggacagccatcaaataaaaaagttgaggctatcaagaaagccgcagacgaaggcgctaagcgcggttaccgaaatgcggttaacaagcttgtttcagggaaaagaccatag

SEQ ID NO: 199738 - DNA, 219 bp, Klebsiella oxytoca
atgatgaaggtatacagagataaagatggcaaggttattaacataggtgaatgggattacatggaagaagaaatcctgggtgaaattgtagacgaagagtctaaagcagtgtcattagttaaaagaactatcaggcataatccactaccagagggagccacatttacagaggaagatgtcataacgctaagcgatggcggcatcggtgctgctgaatga

SEQ ID NO: 199739 - DNA, 1299 bp, Klebsiella oxytoca
atgagttctgaaatgaaactaaaattgggtcatattcaaggatggatcttctactttcttgttttttttgtggtttttgatggaatgcgcagtaacttaatcatttcaggcctggtatcgccgtttcgtgaattggcgctaaacctgttcatactttgcagcttaccaatgatagcatcctgcaaaaaaaacgatttaaggattgcaattccttttttatgcatctctttgatggcaatagtaaacatacctatcactttattcaataatattgatgattataaaatggggaatatacttatatttgaaaataaatattccgcagtttataagcatataattttttctatattgtttatttctctattgtgctacgcaagaaaggatttggcgaaggtaaagaatggtttgggtatgctgataaatcttgcggcattttattcagtaataaccatacctatctatctttatggattcccgctatttgtggataaattcagagactgggggcgtatgggtgttgggtatccaaccatggatggacagatgttgtgctttgctattttctgcttggttttcctcgtaccacagagaagtaagttggtatttaactttaagatggcctgtcttttgctggggattattgctcagaatacaggcacggcaatggtaactatggtcgttcttgccatggctgcatttgtcaaaaagcccggcaagacaactagttactttgtgttcattgtgcctattgttgcggcaatagttatacagcaatattattcaaacccccagtttttcacagaaatgctatttattgctaacaataaaataagccagattatgaaccctgagatgtcagctaacgttggagatcttgacactctgcagatgagggttgttcagtatgaagctatcaatagcattatggacaaaaatatcttgcttcggttgtttggtgttggtgggcaggcttatatagaaaatgaatttaagttgaccctggcggcgtatggcgttttctcgttcgctttctttgtgttttcattcttctggatatctttccttaccattacatcgaagaatagaaataaattcttgatcctcgtcataatggtgatgtggggctttacctcctataccctctcgagcatccatctttttacaacttctttctgctttagtctggtgtttgcatatacatatgtaagtggttcaatgccgagtgaagaagtagaaaaaattgagtatgtggagccatcacaacgtagacggattaagttcaggatttctagatag

SEQ ID NO: 199740 - DNA, 1371 bp, Klebsiella oxytoca
atgaaaaaatttactaggcgcgaggttgtgattggtcttgctgccggagccatgggggtagcgatgccactcagagtggcgttcggtgacaacaaggatcaggactggctactgtcccttgattcatctggcgcaaaaattgatggtgaaggtgctacaatccttgtttctaagcccatcacgttaagggctggacacttttcaaacatatccttttcacctgcagatggatacgctggcccaggccctatcttcatggcaagagatggacttgtaacccacgatagcgttgtagtgacagggtttaccggcccagggtgcaagattttaagcaatcaagaaagcggaaattcttttgtagcaaccggcaaatgttcttacagtagcaatgggaacctgagaagaacagagctcacagaatctgcagacctgcgattcacctcatctataaaagttaaagatgcatcaatctttaatgaaggtgattttatctggattggtgatggtaagttcaagatagatagtatatctggaaatgagatatctctcatgcgcggagaccttccaaacatcataagccccaaagtatttagtggcgcctatgataaatgctctcctgggcaatatgttaccatagactcggatgataagaacggaataagaataggtgatggcggctacgcctggaatatcgatacatcaaaagcagaaatagagtgtagcaataatgcatggtttggcgtgttccattactgcaaaaaatattatggtaaacagctaattgaaaatataaccgccattggaaacggatattgcaatatcggtatgggctatatgaattcagggactattaaaaactgcacatcaagaaatgcaggtaataactgtattgatatctttgagagtaaaaaagatgttgatgtaactggtaatatagtctcaggcgcaggagtagatggtatcttcgttggcggcaacggagaaacggcgcgcgtgtacgataaccaggtgacagattgtcacaggctcgggatactgataaacgccagaaagaatcctatacaaggtgtgtacgttaagaataataaaattactcgttctggcatgaactccctgactctgaccggagttgaggctggagatattgaaggcaatacgcttgatggtagcaccataagacaggcgatctaccttgagcaaagaaaaggccttaacctttccgggcagttgaacatcaggaataaccatatttcaaactccgcgcaaggggacatatcaactaactacactggatatggaaccgacacgaaagcaagggttatgatacaatcgactaagaaattaaccgtatcaggtattgagggttattaa

SEQ ID NO: 199741 - DNA, 315 bp, Klebsiella oxytoca
atgaaatttcagcttgctaagctttaccgtggggatcacttctgtggcttcggtatcgctgttaacggtcaactactcgatagactggcatctgtcataattaataccgagccaaatataattcccacggcaactgcagtattcaatctggataaaagcaccgttgaaaaccaggtggtaattaatcttgatgacccgggcgctcgaattaatttcgaaagcaaaccttcggatgaggtattcgaaaaaattaaaaatgcagcatatgaaggcgctgagaagggctaccggaacgcagtaaaaagaattctttga

SEQ ID NO: 199742 - DNA, 270 bp, Klebsiella oxytoca
atgagtttcacgattagaaagaatgtcacgccgatcaaggtctaccactccttgctgggggcggctattgcgggcgagagcgaagagatcagcgtgacctacgaggtgacgtcaattctttcacttaccgacctggtaggggtggctgaatacactgtaacaccagaaggagcagccatgagcgggaggggtgagctcccgttcgtttattccggaacggggaacccgctggaagaggccgaggaagaactcaaggaaggtttactctga

SEQ ID NO: 199743 - DNA, 858 bp, Klebsiella oxytoca
atgaagagaggattgcttcttacaagaccattgtcatttaacacgggctcaatgtcggttcttggtgattttgatcctttggctataaggtacgctttgttatacttggatgaaatatgcataccaattaacagagttgtactttttgacctttctgatgaactcagaactttaaaaaaagaaggttttgtacgctcattgcaacctagggaggaaaaaaataaatcttttgatttcgattcttcagaaatggaaggattgataaaaaaatcgtataagagatgttttgatgagttaaatgagaacaagcatgagtcttggatggttcatcaaagtgttaagacggcactagatgaagataatgaactcagccatagtggcgagttgttgaccttcatcaattcattaccaatgcctgcaaaagatttccctattggagatcttctagatttccgtgaaaaaagaaatgatgagcggcttgagcttttaaatgcaataagcaccctgcggctaaatgtattgacgagcgaaaataaaaatgaagctatacagaaaggactattagagatcgaaaaatcaatcatcaacattaccaaaacactaaaagaaagaaaaaaaggaatgtatctaactgattttagccttgacttctcttcaactgaattcattgataacttcaaaaacatttacaatgaaagtcaaggtatgggcttgggtaaattagaagcattcctatcttcgctgggtatatccttggcttctatttttagggtaaaaatgggttataactataaacgagccaacccagactcgccattcttatatgcagcagaagtaaaagtaaaattcaacttgtag

SEQ ID NO: 199744 - DNA, 1515 bp, Klebsiella oxytoca
ttgaagcgcggtgattataattggaactgggatgaagcaatcaccttcacgttagatgatgaagatgaaacactttcaaaagataaattaaatagaagaaggtatgcagaatatctatattactacctaaaagacaaagggaaaaagaacaacacagtaattaatctcaatgccgagtggggcgcaggaaaaagtttttttataaaaagattttatagttcaataaaagatgtacatccttgcgtttatattgatgcatggaaacaagacttttccgatgatgcttttctgaccttattttcttccttatcacaacaactacaagagtatgcaggtaaacttgatgcgcgattgatacaaagcggccatgctattggtcgctttacaaagggtgtgattccagaaatcatgtctggactaatcaagacctacgcaggaatagaaagtgttggtgatatcgccaaggaggcatctttattgatgctgaatgagcatcaagaaaaacttaaaagcattcaggtattgaaaaaagaattagcactatggtccagacttgcgtttgaaaggaaatttgcaagcccaatatttatatttattgatgaactagatagatgtagaccagactatgcaatttctcttctagagattgttaaacatatctttgacattaagaactttgtttttataatagccaccgatacagatcaattacagcactcaattaaaaatgtttatggcaatgatttttccgccaatgactatttaggtcgattttttcatcgtagattcactttaaaatcaccagaactcaatgaattgattaatggagttattggtgtatctactggtacaagctttgaaaaaatcagttcaaaaatttatccactaactgcaacattagatgatctatcaagaaacatctcaagtatatttgaggcatttggactgaatctaagagactcaatcaggaatactgaaaggttaatcgacattctgaactctgacttagtaaaaaagaaaatagactatatttttatgatttcattaatgattatttatgataaagatcgtcaaattatagatgctcaagttggcaggcgaaatacagcgcaaactttcatagaatcaataaagcaaagttctaatttaaaaggtgtttcccaatcaactctaaaattgatatttgacacaaatcaacatacattaggagtggattatatatatacggcctctagaagcaggacacatatttctcagatagattcaacactaaacttactacttatcacatatataaacactgcattgcatttcatccgaaacattaaaaggtttaaaaatgaaattgatgtcaatagacaaaactccctaatgacggtagctcaaggaaagcttgacagtgaatcaactttaaaatatttacaaggagctctcttagaaaatggagcagacacgcccttttatacactaaataactacattgaattaatcgagttggccacatcgtttgactaa

SEQ ID NO: 199745 - DNA, 729 bp, Klebsiella oxytoca
atgattgaaatgtttggggtcatggtgcaccattcctctttaagtgcggcttgtggcgagccgttgtttctcgtgattagtagtgaaggttccaaaagaaaacttctagccaactttaagatctcttttggaatctgtcaatgtattttggattgttttggaggtcttgtggatttcaataccggcggtaagaaagtgatcgagcgtttggttgaggcgtacgggtttactacacgacaggcactttgcgaccacttgggcgtatcgaagagtactatggcgacgcgctacatgcgtgacattttccctgctgattgggttttacaatgtgctatagagactggcagctctcttaaatggctctcatttggcgtaggggaaaagaaagatgcagtaaaaaatgaaactcgaatcttagaaaaaaaaatattaatcgatggtaagttagaagatgacggtacatatttatttgataccaaattcctccctcaaaatttaaaaaaagcgatagttgtatctaccctatcctctgaattaatctgtgacatggaatttgaggatgtacgagatggaaaatggttagtcaatattgatggtgaaaattcattcaggatgataactcgcctccctggcggtagaatacatatcacatctaaaaatcattcttttgaatgtgcgctaaaagatattgaaataattgcaaaagtagaagtaagttgttttcgttga

SEQ ID NO: 199746 - DNA, 459 bp, Klebsiella oxytoca
atgactaaacaaagctccgaatacttccatctgcattactgttattaccttgaggttatgacggcaacgcttcacggtagagctgacaaattgatgacagctattcagcttattagcggtactgctgtgtttgcggacaccggtctagaatggttgttcgctttgcctgttgtcgttatcgcgacaattcaacttgtgtggcaacctgccattatttccgagcgtgctagcgtacaaagccgtcagtacggggaattgctttatgctgggaatgaactgaccccagaactgattgcacaaaaattgaaaacgctgcatcactctgattccgcacctttcggttctttgttaaatccagcctataaaagagctgctattgcatgtggtcggcctgatgacactaagctcagcttccaggaaaagtttttcgcctggtttgcaggttgcctgccgcgttaa

SEQ ID NO: 199747 - DNA, 225 bp, Klebsiella oxytoca
atggaaccgggtttatatggggtgttttatcagtttcttcacaaaggtgaaaaatactcgatcagtgaggtggagcttgtctgctgttatccctctatagcaggtgacggcagttactttttcatgttgaaggatggtgctttttttcgaggggagcaggtagaagaggtggtgcgtaagaaaacatcacctctcattaaatatcaacagattagttatcgataa

SEQ ID NO: 199748 - DNA, 249 bp, Klebsiella oxytoca
atgctgacccagatagagaaggaccgaatcgagaaactcgaaaacgaggtcgcaaccctccacaaggaagtagcgatgcagcagataatgatttctggcttgctacacagctttttccgtaacgaatcgtcgaatcaggaggcattctttagcgtcatcagcgaagaacttaaccgactacgctttggatcagttaaacatcaagaattcagccatgacatccagcaaatcctcgaccgttatcgataa

SEQ ID NO: 199749 - DNA, 342 bp, Klebsiella oxytoca
gtggcgataaacggtgatgctgcaactgttccactaagccctggtaaacgtctggatgggcttaaccatattgcagaattacgtgcaaaagtattcggcttcaatattgacactgagctggtacggtttatttcggatatgcgtaatccgcgggacgtgaacagattacagaatgagagggctctggcagccatattttttatggcaaagattccgacggaacgtcattgcgttaatgtgagtgacctgactactgacgaaaagagggagctgattaaagcaatgaatcattttcgtgcagtggtgagcttatttccaaaacggctaagcatgcctaattaa

SEQ ID NO: 199750 - DNA, 237 bp, Klebsiella oxytoca
atgcgaaatagagaaacccgcaccaccaaaactggaccggatgatgctggcctactccagctgtttaacgaggctcgcctggatgagcgtaaaaactgcgcctttgccgtttcgttacgaatagaggcgctggcgatctacatactgcagcaagggatgaacggagtggaagcggcagaattgcttcgccgtgaagttgcccgttatgacgctgaatcacggggagactggcactaa

SEQ ID NO: 199751 - DNA, 2382 bp, Klebsiella oxytoca
atgtctgagttaacaaaagataaaggcggcccgccggaggccgccggagggttcctatggaatgcccccaaaaatgcggttaacccctatctggaccctgcggaagttgcgccggtatctgcgctttcaaacctaatcactctctacgccagcgacaacgagcatgaacagctgcgccgtgaggcgatgagtgatgaggtctgggagcgctttttctacaatgaagcccgtgacccggttcagcgtgaaatggagcaggaccagctgatcagcagggcgaagatggcccgcgaacagcagaaatttaaccccgatctggtcatcctggctgacgtgtcagctgaaccgtcatatatcagcaagccgctgatggaccgcattgattattttcataatctgaaccgccctaaggcctattctcgctacctgcgtgaaacagtcagaccgtgcctggaacgtctggtgcgtgtccgggatagccagatatccacatcgtttcgcttcatggcgagccataacggactggaggggttgctggtattgccggaaatgagtcaggaccaggtaaagcgactatccacactgatagccgcccatatgagcatgtgtcttgatgcggcttgtagcgatcttttcgtcagcgatgacgtcacgccggaccagatgcgcagggcgtgggagcgagtggccgatgaggtcatgcggcttgacgtgatccctcctgcatttgagcggttacgacgcaagaaacgccgccgcaaccctgtgccgtatgagcttattccgggttcactggcgcgtatgctttgcgctgactggtggtatcgcaagatgtggcagatgcgctgcgagtggcgggaggagcaactgcgtgcggtgtgcctggtcaacaaaaaagcctcaccgtatgtcagttatgaggctgtgatccataagcgtgagcagcgccgtaaatcgctggagttcttccgctcgcatgagctgaccaacgagcagggcgacacgctggacatggaagacgtggtgaacgccagcagcagcaatccggcgcaccgtcgtaatgaaatgatggcctgcgttaagggactggagcttatcgcagaaatgcgcggcgactgcgccgtgttttacaccatcacctgcccgtcacgtttccacgcaacgctcaacaacggcaggccaaacccgaaatggacgagcgcgacggtcaggcaaagcagtgactatctggttgatacgtttgccgctttccgtaaggccatgcataaacgcggtatgcgctggtatggcgtccgggtggctgagccgcatcatgatggaacggtgcactggcacctgctgtgcttcatgcgcaagaaagagcgccgcgctatcacagcgttgctgcgtaaatttgctatccgtgaggatcgcgaggagctgggaaataataccggcccgcgctttaagtctgagctgatcaatccgcgcaagggcacacctaccagctacatcgccaaatacatcagtaagaacatagacgggcgcggcttggctaatgaaatcagtaaggaaaccggcagatcactgcgggataacgctgagcacgttaacgcctgggcgtcattgcatcgcgtccagcaattccgctttttcggtattccgggccgccaggcttatcgtgagctgcgattgctggcaggccaggccgcgcggcagcaggcagataaaaaagctggtgcgccggttctggataacctgcgactggatgcggtactggctgccgccgatgccggatgttttgccacctacatcatgaagcagggcggagtgctggtcccgcgtaaacatcacttggtccgcacagcctatgaactgaacgacgagccatcaacctatggcgatcacggtatccgtatttatggcatctggtccccgattctcgagggccgaatttgcacgcatgcgatgaagtggaaaatggttcgtaaagccgttgacgttcaggaggcgacagccgaccagggcgcttgcgccccttggactcgtggcaataactgtccccctgtggaaaaaatgaactactttgagtcggatttaccaggtgaagaacagccggaaccgttgccggacttcaatagcatgagcaaaaaagagctacgggagctaaatgcgaggctgcgacaggtaagaccgaagcggcggaagggttacaaacaggaaattaacgatcagctgcgcctgcagcttgaatatgagttgaagtccagagggtttgacggcaacgagcaggagattgatttactgctacgtggcggaagtatcccatcgggagcaggtctacgtcttttctaccgaaaccagcgtctgcaggaagatgataaatggcgacagtggtactga

SEQ ID NO: 199752 - DNA, 249 bp, Klebsiella oxytoca
atgaaaaatattgtcaaatttctagcattaatcctgcttgtgtcttcaggtctttggctgtacgtaaaacctgggttcgattcactcatagcaacaattgccgctttgatctcactggttggaacatttatcgttgataaatcttctccgaactcttttaaacagaaagtatcccaaaaatcggtgggtatccaagcaggaggaaatgtcaatatttcttcaaaagatacaagccagaaaggacagtag

SEQ ID NO: 199753 - DNA, 858 bp, Klebsiella oxytoca
atgtttgagaaaggttcagttcaaaaagttagtgaaggttcaaccgcgttacaggctaacggtgatattaatatcactaatggtttatcagctgctgatgttattcaaattttcgatatattatttcagaatcaattccctaaactacagcaagtggccaaagaacaggcaataaaaaatagtaaagaatttgaagcgatcgtaattaatgatttacatactaattcagagaaaattattattgaaaagtttaaggatcctgatgttcaggcattattaaatgatgcgttaatgtctactgcgcgtaaagggagaaaatcccacccggatttactatctagattgatcgttgaaaaggtttctgcagggaattcagattttcaggatatagttttaacggaagctgttgatattatacccaagttaacaaaagagcatatagtattcatttgtggcgtttttatattgaaacaactggttatgcaaataagttttggggaggttttatacctaatagagcgttttcatatccagtttgagaaggattttggtattaattttaatttgtctgaggcaaatttaaatcatattagttatactggtgcgtgcaacattaatcaattaatggggatggatgttgttgagtcttttattgttaagtataaaatgtttggctgtggtgatttgaaggcaggtgaatttaagttaaaggctttagcccctgctacatatcgttttttagaaagaataaacactccgatagttgggggagtatatttgactagtgtagggcaagccatagctataactgctctccataaattgttgcctttagaatattccacatggataagttga

SEQ ID NO: 199754 - DNA, 429 bp, Klebsiella oxytoca
atgacgcgcacgctggcagtaattctggctctggcactggcggcgctgggctggcagtcatggcgactgaataaggccagccacaccatcgaacagcaggacagtgacctgaaagtgaagggcgaaaggctggctaaaacgaacagtcagttgatcgccctgtccatcctgaccgaaaccaacaaccgggaacagacacggctttacgcggcggcagaaagcacaaacgcactgctgcgaagccgtcagcgacggattgaggatctgaaacgtgaaaacgaggatttgcggcgttgggctgatgctcctttgcctgctgacattatcaggatgcgcgaacgtccggccctcgccggaggtgcagcttaccgtgaatggttgtcccagggtgacacagtgccgcctggaaaagtcagcggcacgcactaa

SEQ ID NO: 199755 - DNA, 1503 bp, Klebsiella oxytoca
atggggactttatcaacaggggttgattcgaaatctacgttacaacttctacgacttgggcaatccgtagcggagtttgatgattcattagagaaatattttattgaaaatcaagcttatcactctttaattaaagatagagctgattttattgctggagacaaggggacaggcaagactgcagtttatagaatattgcaaaaaagatattctataacaccagaattgaaaaatgtagaagtaatagcgggctttaatcctataggcaatccagtctttcagcgacttgtgcagcaggatgttaatgttctgactgaagggcaatatgtaagtgtttggaagacttatattttatcgttaattggtaattggcttatcgatatagttggtggggatttttccgaaaacataaatcaattgcaaaaacttcttaatgaaacaaacttattgagcaaaggcaataaacctgaaaccatttttagtaagatagttaactctttaaagcaaacttttagaccggatacttctgaaacaacatttacgatatctgagactggtttacctatagtatctcaaaaattcaccttcggggatgttggcaaaagtgaaagcgctaaaataagagagataactcatgaagaagcgtttgatttattaaatgattgcttgattgacgttggttattcggtctgggttgcgcttgatcgtttagatgaagcatttcaagggtatcccaatattgaggtgcctgccttaagagctctattaagaacatatctggatttattagctttcgataagttaagattaaagatatttgtccgcaaggatctctttagaaaaataattggggatgggtttgttaatctaacgcatataaatgctagaaaggtcgagattgtttgggatgaagcagatttattgaatcttctgtctcgtaggattagagatagttctgacttcattgaaacaatggaggcacaggcagattctgatgaaactctgttttataagattttccctgaaaaggttgatgccgcagatcgaaaaccaaccacttttaattggataatgtctcgtataagagatggtaatgatattagagctcctcgaaatttaattgacttagttgggaaagccacagaggagcaaattcgtgctgactcgcgtgtgtcaagagtaataaagtcaggtgaacgattgataatgtctgaggcactcaggaatgcgttatctagattaagtgatcaacgagttcaggatacattgcttgctgaagttgggccagaaatatcagcatatataaataaatttactacggaaaaagcagagcataaccttgaaactctatcgggaattctagagttggaaggtgaacaattacaatatgctattaaacagctcatggagacaggtttcttggaggaaataaaggacacttggaaagtaccaatgctctatcgcgatggtttaggtataacgcaaggtaaagcattcgcttaa

SEQ ID NO: 199756 - DNA, 909 bp, Klebsiella oxytoca
atggccgttattgacctttcccagctgccgccgccgcaaattgtggatgtgccggattttgaaaccctgctgacagagcgtaaggcggagtttgtcgcgctatatccggcagaagagcaggaagctgtggcccgtaccttaacgctggaatcggaacccatcgtaaagacgttgcaggaaaatgtgtaccgggagttgctgctgcgccagcggattaacgaggcggcgaaagccgtgatggtggcctattccggcggggatgacctggacaatttaggcgcgaataacaacgtacagcgccgggtgattacggctgtggacgacaccaccacgccgcccacggaggcggtaatggaatctgacgcggattatcgccagcgcatcccggcggcctttgaggggatgagcgttgccggaccagtcggagcctatgaatatcacgcccttagcgccagcggtaaagtagcggatgtatcggctaccagtccttctcctgcagttgtcgttgtaactgttctgtccattgagggggatggcacgccagatgcagaactgctggcagtggtcagtaacgcactcaatgatgatgaagtccgtcctgtcgctgaccggctgagcgtcatggccgctgagatcgtcaattattccgtggatgcgattttgtatgtttaccccggcccggcttctgaacctattctcgcggcagcaaaagcgcagttggccacgtatatcaatgcgcagcgtcgcctggggcgggacatacgactgtcagcgctgtatgccgcattacatgttcagggggttcagcgtgtcgagttgcagcaaccgctggaagatgttgtcctggataaaacgcaggcggcattttgcaccggctttagcgtagtgatcggtggttcggatgaatag

SEQ ID NO: 199757 - DNA, 597 bp, Klebsiella oxytoca
atgaatagcagcctgctgccgccgggatcttccgcgctggagcgcaggctggcgcaggcctgttcaggtatcagtgatttaaacgtgccgctgcgcgacctgtggaacccgtggaaatgcccggcaaagttcctgccgtatctggcctgggcgttctcggtagatagctgggatgagagctggagcgatgcggaaaaacgcagcgttatcagcgaggcgttctggctccatcagcgcaaaggcacggttgccgccatccgacgagtgattgagaagatgggttattccatgtcaatcgcggaatggtgggaggtcgctgacccggcgggaactttccggctggaagtggatgtgaatgacataggtatcacaaccaggatgctggatgagctgaccaggctgattgacgatgcaaagccagtcagccgtcatatggcgcagatgaatattgcggtaaaggtgcgcggcgatattcataccggtgctgcgttatgttgcggcgagattatcagtatttatccggaggattatgagccggaagaaaacattacttataacggcgtgatttttcacgatggagattttaattatgggtga

SEQ ID NO: 199758 - DNA, 1764 bp, Klebsiella oxytoca
atgacgaaatttaatgagtcgccatcgtgggaagaagagattgagctgattgccagaggcgaacgtgtttccggtggtcaggatggcgtggcgaaccggccgctgaaagtgctggttaaccgcacccgctatctgaaagaacagcaggacgcgtttgatgtggatatttcgggaaaggttgaagcggttaaaacctttgcggaaggcgcaacgctgcattctccgcgtgaggaaatccttgatggcgcttaccgcctggtgtggacgggtgccttcccgaaagtcgttcctgcgaacagctcgccagccagcaccggcggcacagggggcggaaagtgggcgtatacctcagatgccgctatcagaacagaactggcctctgaaagcacaggcgggggcgggcgtctggtgacggtcttccggcagaaattactgaatgcagttaaaacggtcagtcagtggttaagtacgcagccgacctgtatctgggaatatgccgacgccattactgacaaacccgatattaatgacccgtcaacgtgggactggagtccggcatttaatgccgcctgcgcagataacgtttgtgtgaatctgctggataaggagatttacaccttaaaaaccccggtggtgattgaattttcggaagaggggtatgccgattattcgaggcttccccggtgccggaatggtctggcggtgattgattattctgctctggggaatggtggtgcgggatttgattttggccggactgtttacgataaagcgcagcctgcttatgaggcagcttttaccgttaaaggattaagcggacacgtcatcctccaggcgtttgaaggcattgtcttcagagggaatgagaataccgttgcgattaagctgattggcgctgacggggtgaaaattcgcaactgtatttttgccaggaatcgctatggcgtggtgttcaataatggcgatgctgccgggacctataccgagctgggggtaatggaggactgccgctggcgcgggagttgcctggcggcggctggttatgaaaaaggtaacggggacacttcattccacggtagcgggtttggcgataactgccacatcaccgcagcggcggggcgttcatcaattattatcggtgaaggttgtcagccctataacgcgccactgaaagccaatatctggacaactggcaccgcggcgccggtaatcaccaacctcagcaatctcccggctcatttctatggtgccattaaatgggaagggtcctataaaaccgtgttgtcatcgggtgggctggtctacttttacggggagattcttcactgggcggggatagacaaaggctccttacgtcaggcgcggcggggcgggccgacgagcgcggcaggtggaaacctggcattttcgggaatactggatatcgttgtgacccgctgggatatcgcgaaactgggtacgcaggcggttttcatggattacaacgaagaggcaaccgtgtcggtcagtggtgagtcctattttgcggtattcaaaatacagaccgcccgcagactgacaaacaactgcaccacgtcgccctttctgcttatcagcggaaatgtgaacccgctgacgaagttcaatattacccgtacgtcgcagggattgaggctgacgacaatagaagacaataccgagattgtcgtgtggagacagcgtggcctgccggataaatcatcaggcattaactacacaaccgcagattactggaacacattatga

SEQ ID NO: 199759 - DNA, 342 bp, Klebsiella oxytoca
atgatgagcgtatcggggctgtcgtcccatatccttgaccaggacttcatcaccgacggggtgacgagaacatacacgttttccattaacaccttccccgacggggccattgcagagctggcggtttccctgactactcagggggtaggaacctgctcataccggttgtctgttcataagcacaataatatcggtgcgggtattactacggtcagtaaatatgaatatggcggtctgtcgattgcattttcagcaacctataccacggtgacgctgacgttaagcgccgcagtggtcggtaatctgaaaatttcccccatattactgaatgcaaaccagtga

SEQ ID NO: 199760 - DNA, 276 bp, Klebsiella oxytoca
atgagcttctcagttataaaaacagtcactccgctgaaagtattcagttcgctgctcggggcggctattcggggggacagtgaagaaattaacgtgacttatgaaattacgtcgattatttcgctgtccggtacagaaggcgtcgcggaatattccgtagagccggaaggtgccgcgatgaccggccggggtgagtttccgtttatttactccggctctggtaatcccctggaagaagccgaaaacgcactgagagacagcctgacagcggggtaa

SEQ ID NO: 199761 - DNA, 2421 bp, Klebsiella oxytoca
atgtcggtaccgaaccagacaccctataacatctataacgctaacgggctgaccactgtctttgcctatgagttttatctgatcagcgccagcgatattcaggtgacaatcaacggcaatgaagtaacgtccggctataccgtgtctggtgtgggtaatactggcggcggggaggttacttttcttaccgccccggccaatggttctaccgtcatttttgaacgagttacgcctacgtaccggctcaccgattaccaggataatggtgacctgctggccgatacagttaacaaagattttgaccgtctctggatggcaatccagcgcgcgtttatatatctcggcgttgcgcttactcggcctttgtttggtggaggtccgttcaacgccaacggttaccgtatcgctaatctcgccgatccggtgaatgaccaggatgccgcgaccaaaaaatatgtcattgaaaacggtaataccaatttagccaggactctccgggtaccagagagtcatgtagaagagctgcccccagtctctgctcgtcgagattcgttgtttggttggaacagttctggcaagcctgtgccaattttctcaatgacggataccgcagatctggcattaaagttggcttctaatctcgttggtcttggggcgtcactatccggactggaatatggtgggacagttcaggatgcaataaaattcataacccctttcatgtttaagggactggtgatcgatgatgattgggcattagctattgtcgctgctgacacaatagccgctactctcggcttgcctcttatagggtttgaccagactttttccgtacggtctctgtcgcttatctctgaccatatcgaaggaataggcttcgttcccgtagctggatataccggcgcaggcccgatatttaaaattaatcaggttaccggaaaactttatttcaaaggcagttgtaagggctttacatctgtgggggctaaattcatccggggtgattattccggcattccgcaattaactctcgatggttgcgagttttctgataacggaagtctgctgcgtaccacctgcgttaacgccgtgaataccgcatctgattttgttattccggtcgttgatgcaacggggtttgtcgtcggaaattacatctggattggcgattcaaaatgcatgattgcggggatttcggacaacacgattacgctcgtcaataatggcagtgcgccaactctgtattcaggcggaaccggaaccggcagctataaagcgggacagttttttacccgtgatggtgatggaaagaacggtgcaacgattggcgagggtggcacagaggctggctggggtctcaccgtacagaatggtataaaactgatgaataatggctggttcggcctgtttcattacgtcagggccaaaggcgggacggtatctatcaaaggaaaggtagagggtgggaataatggttactgcgccatggggctggcttatgtccagggcggagaaatatcagggttcactttttacgaaaacgggaataatggccttgatatcttcgagacgaccggggatttatctatttcagacggtctctgttatggaaatggtgtcgatggcatatttgcttgcggcaatggtacaggtccaaaaataaccagagtcaagagccgtaataacttccgtatcggtatactggcttacggtcgcaccgcatcccctacgggattcaatattatagattgcgaatgtactgataatggactctatgatgtttgttatactggggttcgctctttaaactttgccgcgaatactattggtggtgccagcacagctttaaaaattgagggaagaaatggcctgcttaacccggacggcgtgacagtttctgagaataattttgctaaagaatcatcaatagaagatattaacgctaatatcggcggctataacgatggcggtagtagtggggctatctctgtcctgaataaccgttacaacggcagaaaccagaaacataccatcagcaactttaaccgctcacagagccgctttgtgcctgttggtcgcttgagcttcacttccagttataccgcagcagccggagcaacaatcagcgtcccgctggtattctataagccaaatgcgacgagcaatatcgatgtgctgggcggtcaggtggaaattcagatttgttcaaatccttctttactgaccatcgggacggtaaccagtgcattgcgtacagccggaatagagctgagtaatggtgcaacaacaaacggcaaaatccttgcaatggcagcgttcggtacgctctcgtacaacttcacactgacaacggcagggacagtttaccttaacgtccgttcgccatacggcgatggcgtcattcagttaacctggacataa

SEQ ID NO: 199762 - DNA, 201 bp, Klebsiella oxytoca
atgaggaatattgatgtgagtgtgactactagtaacgatgtagaaagttatctataccttgtactcagtatgtggccagtgttgataattctgtgtatcggaatgtctctggcattttatggcgtgctaatgcgtaaaactgcaattactttaatcatccttgcaattattatcggagcactgggctggacatatacttag

SEQ ID NO: 199763 - DNA, 1053 bp, Klebsiella oxytoca
atgaatttctctaagacatttacaataatgctttgttgttgtccgaccctcagttgtagcaatactgatacggtaatagcaccatatgaaaaaatattggagctagatggctcaaccactagaagttttcattcaatgttatattacccatcaggcgagggacttcataaccctgggtatattattgggattgaaacgtcgcctaaaaaaactatcggagggcctgaaaaacaatctgatgatggtttattaaacagtgacagttatctaaacagtgaaattaatagcacaaacaacactagaaataaaattgatggattcacgaagcaagaccgaaagtccatgtttatatctcatattataaaaaatgattttaacatcataaaagataaactaaacaatccctacattacaaataattactgctttgtttataacgcatacacctcacgacagttggtaggtgattcaggtttggatctaacaaaaataaatggatggaatgcttgcaaaatatccagttctattcaagaagcggaggatgcaaaattacactcattttataaaaatagtgattcaggcctaactgcgcttaaagaaaacctaaagcatgaccttgaaagtggagcttatagccacattctggtcatcgtcatgggttggaatacatcacaaagtgaggcggttagaaattttaatgacattactggaaatattattacggcttctttcgagcaacgaaaagaggctgatacgaacccgtcagccaaactaaatagaatggtagttaccaggtcacgggttattgaaccaaaggaagaaaaatacaaccgtgattttagacctctcgtgattggtataacgtggccttcatattggtcaactgggcttgttaatgtagtcagttatccaaacaaagcaaatgatgcagatgaacttggtctcatttggcttaataaaattgggtatacggatttaatggttgatggggcaccttcaccccatcaatctgataccaccctcagatggttgatagatcgactccgtagttga

SEQ ID NO: 199764 - DNA, 624 bp, Klebsiella oxytoca
atgagtgaatcaggggctaaacttcctgttatcgccataggtcatagtttcggtgcacgagctatgactcgagcgctatttagtagtccattgataaatgacgaaaaaatggtcactagcccagtaaatttagctgtttcattgcagggagcaatgagtataaacaggttctttccttcattaggcaatgaaggagccccatacagagattatgtatcgttagttaatacgaaaatagtgcttacagcatcgagattcgattcggcagttaaaatagcgaaatggactgatccggctggaggcgataaaagctataagaaagcttgtacagatcctgattactcaagagcatttcactgtatgactgcctcagatacctcagccaaaattaaaaatggtatattttcattatgtaaccgtggtgaaatatcaaaagaatgtaccgatccatttaagaatattaccgggccgcgaaagattgactacattgacacctcaaacggaataacagaattcaattcttttggtacaggtggaggtgcacataacgatatttatagattacctatgggacggttgctttggagactaattgaggtttatgcaatggaacaaaaccattga

SEQ ID NO: 199765 - DNA, 153 bp, Klebsiella oxytoca
atgtctgggctgtttttaaaggtccgctttacagctaaattaaaatgtccgcatgtaggttatgtttcagcctttgccgaagatgtctttgctccgggtctggagttgctgcagggcttccagcatgtcgttctggtccagacttcgttgtga

SEQ ID NO: 199766 - DNA, 204 bp, Klebsiella oxytoca
atgcattcatacgaggaccggatccgggccgtcgaactctattaccggtacggaaagaaagcctccgttgttgtcatggagttgggatatccatccacaaaacagctgagccgttgggttcggatttatgaagagaagggcgatttacccggggttaaagccaatagaacgctattctcgtgcacagaaaattgctgctgttga

SEQ ID NO: 199767 - DNA, 558 bp, Klebsiella oxytoca
atgctagtgaaagatgcaattccaatccttaacgaagccatatctgaattggaatcgattgaggcctcatggaaaaattgtagggcctgtccacattcaggtaaatgttgtgatggcgcattcattaaggttgtatttccagaagaagccaaggcaattgccgaacatctcatagcacatccagaaaaactggtatatgcgaaagatagagcctctcgaaggaaaaattgctacttccataacccacatgccaatgagtgtttaattcatagtgtacggcctattctttgccgatggactccctacactgcaactacgggcggtaactcttttgtagctcagattcgagatgagagatgtaatttcacgccggtcagaaagattgattcgcttaaagatataaaaccagggattattgaggttattccctatgaaggaactgtgaagcagcaaaaattccttcatcttcaaggaatcgaagcattacacccattactacggcgtgctcatgaggctatagatatggacgcggttttagctctttctctcaaaaaataa

SEQ ID NO: 199768 - DNA, 675 bp, Klebsiella oxytoca
atgtctcaatggcggtactgggcgggtagtctgaagcgtcgtgaaagaatttctgcgcgtctgggagatgtgctgagccagctctacctggcgtcggcggtcctgaaacgctatgacgatgaggggcgtaacgaagcggacttaccgctggttcactggggggtgcaggatgcgctgtatcaggccgagcaggcgattgacgatctgttggtgaacttcccgaatcgtctggtcgctggggcgcttcgcgtggcaatcttcccgaccggacgtcattacctggcgccttcagacaagctggatcataaggtagcgaaaatcctgcaggttccgagcgcgacgcgttcgcgtatcggccgcggtcagtatctgacgccgagcgagcataatccggttggcctgctggaagaagcgctgcttgatgttatggcagcagaccctatccaccagcgcctgtgcaaagagctgggcaagaatctgtcgtttacgcgtcttgatgaactggcccgcaacgcgctggcaaaagggttaatcaatcaggacgaggcggacatcctggtccgtgcggaaaccagccgactgcgcagcattaacgtcgacgatttcgccccggatgaactggcgacccgcccggtaaagctgccggaaaaagtgcgcaagatcgaagcggcttaa

SEQ ID NO: 199769 - DNA, 492 bp, Klebsiella oxytoca
atggcttcttttgaccgccaactccaattgcagatacttcaaattgcgctggagttttatccagacgaaattggctgcatacccaaagaactatcgtcactagacgaaaaaacactcctgcaaaacattgcctatcttcagcaggaaggacttataaccggtggaattgaagattcattcgccggtaagtctcctgatatcagattaataaccgcaacccgcgatgctgttaacctactaagcgaggagggcagcatttccgcctcccttaaaatcgtcaccgttaaattgcacgatgaaacgctgtccgctcttagggatttcattaaccagaacatttctgacccagaagaaaagaaagcgtatttgcagcgcttaaaagagcttcccgctgacgccacaaaacacatcgtgcttgaactactgactcaggggctgggtcagatcccgaacgcagttctttggctacaaacaatgctccgtcatcagtga

SEQ ID NO: 199770 - DNA, 204 bp, Klebsiella oxytoca
atggactacgaagatgagtttttcgcggagatgcacccgcagatagcgcaggttatcggaacggccgttatgcaactgctggttgagaagcagagcataaccaaagaggggattatcgagacgattcaggttctatggcaggatgaccaggttgacctggctgtagaactggcgctggatgtgctgatgttgccgaaagagtag

SEQ ID NO: 199771 - DNA, 828 bp, Klebsiella oxytoca
atgaccacaccatgcctatatagcattgttagatatgcgccttatgcggagactgaagaattcgcaaacattggcgtagtcatgtgcgcaccaaaagaaaacttctttgactttcagataactaagcgcaacgactctcgtgttcgaagctttttccatgacgattgtattttccctgtagcgaaagatactatccagagagagttgcagtttgcaaaagttcaggctagccagatcattgggcatcaacaacttgcgcagttttttcggtactttacatccaagaaagagtcaattttccagtttagctccacaagggtggtgcttagcgctaatccaaaggaagagctggaacatatatacaatagatatgtaaaccactctgactacaccaaagagcgcagggaagatgttttggcaagagagataaagcgaagcatcgatcgaattgatgggttaaaaaacgccttcaaaccagaatctattgatgggttttatgcaaaattcacaatgccattagttgccaaaaaacagaatttaattcaatgtgcaatcaaaccattggccttcacgcaatctgagccaggaaaaatgatggagcacagtgacacatgggtaatgaggataacccgagcagcagaagaaaacctactggcaacagaagacattctgttcactcttgaagttcccgactctccaagctctgggcagcgaaaagtaattgatacaatcaagagaacaatggacgctaagaagattaatcatacttctgctgataatcataaagaaactattaatttcgcgaagaaaatacttgcccatccctga

SEQ ID NO: 199772 - DNA, 750 bp, Klebsiella oxytoca
atggaactccaaaaaaataatgatggtgcaatcccccatgtcattgaaataattcgccgtatcaacgagggatcgactcagccgtttctttgtaagtgtgatgatgggaaactgtatgttttgaaatcaaaaccttcaatgccgccaaagaatcttgttgctgagtttgttgctggttgtttggcgagtgatatcggacttccgctaccagactttaaagtcgtgtttgttcctgaagaactaatagaatatacacctgaattaaaacgtgaaatttctaccggtcatgcgtttgcatcacagtacattgacggcgccgttgccctaacatttattcagtcaagaaacgaggcgatcatacccatagaacagcagaaattaatctatgtttttgataaatggatattaaatgcagacagaacacttacggataaaggcggcaacgtcaatatcatttatgatgttggcaacgataagtattatctaattgaccataatctatcctttgatcaaaatgcagaaccagatgattttcttgttcatgtctatgggccgggtaatcgcaaatggcagtatgatttgattgaccgcgtagagtaccgccaaaaagttgttgatagtttatgcaaagtcccggagatttttggcgatgtaccagatgactgggtagttgatgatgattttttacctttcgtcaatggcaccttagagaaaggcgaccgtgatgaattttggagtgcgatagcatga

SEQ ID NO: 199773 - DNA, 402 bp, Klebsiella oxytoca
atgatgaaagctatagaaatttcaatgtaccggcttagcaggctcctgaaagagacgggatggagtcaggcagaactcgcccgtagaataggtgtgacacagcaaactgtgcagcagtgggttaacggaaaatccacaccaaagcccgccagtattgatagccttgtaaaagttacaggtcatccaccctactggttcatgctcccacccgacgaaggcgatcaggtggtgattccagacgcaatgaagttaggccctatgcaattggacctgcttaagaccttcaatgcgttcccggaagaagaccagcagcaaatgctgtcagaaatgaaagagcgcaaagaaactatggataagaccgttgcccggtggcttgcagcccaaaagggcaataaagcttaa

SEQ ID NO: 199774 - DNA, 252 bp, Klebsiella oxytoca
atgaaagaagaattaagaaacaaaattacccagcgcttttctcaagctgaaattggtcggcgcctgggttgtatgcagcaatcggtgtcgctctggttaagtaccaaagttccagccgcacgggtaatccaactttgtgagcttatggagtggagcattactcctcatgagttacgccctgatatttatcccaaaactaccgatggtttgcctttagggatgactgtacctgagaaacaagaaggaatctga

SEQ ID NO: 199775 - DNA, 1125 bp, Klebsiella oxytoca
atgagcagcaaattgcatggcctcgtatgggagggttgcgcacaggcggggcttaatatttcccgtgttgctctgatggcccgccttgctgattacagcaattcagacggcgtatgctggcccgccattgagaccctgatgattgaaattggggccagaagcgagaccaccgttaaggctggactgaaggaattagtgaaggacggatggattacaaaaacagagcgaaaagttggcggacgaaacctgaccaacatttatcaaatcaacatcgaaaaactcgaatttgaagccgctcttggacgcaaaaaaataaaggacgcaagagcgaagaaaaagtcctcacgctgcataccagtagcaacagagggcaagggggcaaatattaacccgtcaaataatgcccccttaaatgatggcgacaagggggcaaattctgacccgtcaaaaaatgccccctcaaatttaagggggcaaattttgagggggtcaaaaattgatgaaaaaggcgatttaacccccccaataattgcccccgatccgtcattaactaccgatccgtcattaaaccccaataaaaacgcgcgcgaggggaattctgacggcgaacaatccaggcccgtgccggaataccccggacagccaggaaccaatttccctgctgccgaacaattcgggaaattcccgatgacagccagttgggtgccgtcaccagactttcgccagcgagtcgctttctgggggaaggttattcccgagaggctgaacctgagggctgagttaaacgccttcatcgcctactgggagccagagggcaaagtgtttcaccagtcgcagtgggagcaaaaattcgctaaccacctgcagaacgctaaaccaacaaaaccgagaggtgccaaccatgcaggactggagtcaggttccactgcaaacgcagccgtacagcgagcacatgcagcccgcgccgcacagctcagagcacgaggagagggcatggaagttctgggttctcatgctggaaatctactccaaccggtgggagaccaaaaacggctcggctccgtcggacctgtggattgcgcagattgggagcttgaccagcgaccagacgaggaacgtctgtaa

SEQ ID NO: 199776 - DNA, 1146 bp, Klebsiella oxytoca
atgaaaatcgtaatcgccccagactcttataaagaaagcctctcggccaccgaggttgctcaggctatagaaaaaggttttcgggaaattttccccgatgcgctctacgtgaaggttcctctcgccgatggcggagaaggtaccgttgaggcgatgattgccgcgacgcagggaaccgaaatgagcgcctgcgtgacggggccgctgggtgttccggttgatgcctgctgggggctttccggcgacggcaaaaccgcgtttatcgaaatggctgcggccagcgggctggggctggttccgcccgctcagcgtaacccgctattgacgacgtcgcgcggtaccggcgagctgattttgcaggcgctggatcatggggcgaaaaatatcatcattggcattggcggcagcgccaccaatgacggcggcgcagggatggttcaggcgctgggcgcgcgtctctgcgatgccaatggcgcggagattggcaacggcggcggtagtctgtgtagcctcaattcgatagatctctccggtcttgatgcgcgactgcatgattgcgctattcgggtcgcctgcgatgtcaccaatccgctgattggcgataccggcgcatcaaggatatttggtccgcagaaaggggctaccgaagcgatgatccgcgagctggacagcaacctggcgcactatgcggacgttattaaggccgatctgcatgtcgatgtgaagcaggttgccggcgcgggcgcggcgggcggtatgggcgcagcgctgatggcgttcctgaacgctgaattacgcagcgggattgaaatcgtgacccaggcgctgaatctggaagagcatatcctcgattgttcgctagtggtgaccggtgaaggccggctggatagccagagtattaacggtaaagtgccggttggcgtggcgaacgtggcgaaaaagtatcataagccggtaattggcattgccggtagtctgacccgggacgtcggcgtggttcaccagtatgggattgatgcggtgtttagcgtgctgaccagcgtaacgacgctcgaagaggcgtttcgcggcgcggcggacaatatttatcatgcgtcgcgtaatattgcggcgacattgcaggttgggatggcgacagaaggatga

SEQ ID NO: 199777 - DNA, 1236 bp, Klebsiella oxytoca
atggcattgcacaaaaccgtcgcattaagcgccgtggccgcagggatcatgttaagcctgggggccgcacaggccacaccgttgcttggcgcaacggaagcgacaaccatcaaggcgagtgacctggccgcgaaagaaaaagccttaaccgactttccgctcatgacatcggtaaaatcatcgattcaaacgctgccgaacagcgaagttgaaaaaatcgagccgggtctggcgactaacccggcaaacgtgaagcgcgtggaaagcattctgtccgaaaaggattgggaatatctgttcccgatgcgcgcggcagaatatacctactctaactttctgaaagctattggtaaattccctgcggtttgcgggacctataccgacggacgcgatagcgatgccatatgccgtaaatctctggcaaccatgtttgcccactttgctcaggaaaccggcggccacgaaagctggcgcgatattcccgagtggcgccaggcgctggtttatctccgtgaagtgggctgggttgaaggtcagaaaggcggctacaacggggagtgtaacccggatatctggcaggggcagacctggccctgcggtaaagataaagacggcgactacctgagctactttggccgcggcgcaaaacagctctcctataactacaactacggcccgttctccgatgccatgtacgatggcgacgttcgtcctctgctggataaaccggagcgggtggcggatacctggatgaacctggcgagcgcggtgttcttcttcgtttacccgcagccgccgaagccctctatgctgcacgtcatcgacggaacctgggtaccaaacgatcatgataaagcgaatggcctggttgaaggctttggggtcaccattcaaattatcaacggcggcgtcgagtgcggcggggcggaagagaacgcgcagtctctgaaccgtattgcctactacaaagagttcgcaaactacctgaaagtgccgattgctgatgatgaagttctcggctgtaagaatatgaagcagttcgatgaaggcggcgcgggcgcgttaccgatttactgggaagaggattggggatggagcccggacaccgctgacggcaagactaacgcctgccagctggtgggctaccagacgccgtatagcgcctttaaacaaggtgactatgcgaagtgcgtccagagccacttcaacgtcaatatcatcgacgacaccggctag

SEQ ID NO: 199778 - DNA, 354 bp, Klebsiella oxytoca
atgtataatgagcataagaaaaaatctattggtaaaaaactaaacaaaagaataaagaaaatagagaaggcggataaaataggcggtggtaaaggtggctattttgctagacatttagataatgattattcagttgaagataatattaaacctataccagaagaacgcaaagaagatgaatatacgaagctacagaagttttttgatgatgtgaataaaagaggtattgagctaaacaataaaaaagaagccatgcttaaactcgaacaagaaaataaaaaagcactatcacaacaacctaagcataaaccaaaagataacaacgaaaatgataggcatattaaatacaaataa

SEQ ID NO: 199779 - DNA, 261 bp, Klebsiella oxytoca; identical to SEQ ID NO: 24096

SEQ ID NO: 199780 - DNA, 864 bp, Klebsiella oxytoca
atgataatacaagataaccatactatagaaatatttaaaaatcaattacctgtaaagccttactgctccaacaacttgcaatcaggcttgagtatcaggaacaaaaatagagcacttgagatgctttaccttcaagcaaatcagccagctatacaaacctgtttgctgttcgatctcgatgaggacaacgctttctataagttcgatgaagtagggcttccggttcctacgttcatcactaaaagccctgattctggtaggtgtcattatggctatatgcttaaagccggtgtctgtaagactcaacacgcaaagctgaagccattgaagtatgcagctgctgttgaggctggtattgctgggaagttagcttctgatcgtgggtatgccgggctgattaccaaaaacccactgcatagccattggtcgccgttctggtcgggtgctgatttatatgagctggattatttagctgattttgttgagctggagacaccaaagaaggcaaaaaaatcagagaactacgggctagggcgtaatgttaacctgtttgaagatttaaggacttatgcttataggcgagttctgaaatttaaaaaggactcaacttatgaagcatgggaacgtgatgttttaagtatagctgaaggactcaataatcattgtaatgctttaaatccgctacaatataatgagataaaagcaactgcgagatctgttagtcgttggacttggaagcattttgatagtgctattttttcagatatacaatcaaacagaggtaaaaagaacttaggtaaaacaaaaaataccaacgtaaaatctgagatgttagaaatattaatgagcaagggggcattatga

SEQ ID NO: 199781 - DNA, 300 bp, Klebsiella oxytoca
atgcaaaaatcaaagcgtaagctcggctttttacgtggtaaaggctctatacctgaccaaaagcagctcgaagagatggatcaggaagtcagcagccagtttttccgtgacctgatggaatcagcacaggaagctgtcgaaatccacaacgggaaacgccctgcagctcgtagaacgctttttcatgtaaacccagtcaccaaatcagttatagaacgctcagaagcccgtacagacgtttttacagctactgatgcctctgacctcttcaaaaagctaaagctcgatagggacgactga

SEQ ID NO: 199782 - DNA, 318 bp, Klebsiella oxytoca; identical to SEQ ID NO: 24099

SEQ ID NO: 199783 - DNA, 648 bp, Klebsiella oxytoca
atgggattcaaaattgcagcacgagcattaaggcaattaggtgctgaactgattacttcagaccatatagcattaaatgagttgataaaaaattctttggatgcaaaatcaaaaagagttgcgattaaagtggataatccatttcttttagataaaactgctttagctaataaattagtaatgactcgtccagatagtcatattgagcaattagcattaaacatcactaataacgataaagaaatacttgaaaaatatacttattactttaatgaaggacttgttaataataaaatcgaaaagcatgatttttcttctcttgagagcaaagtaaaaaaagattttattatgaatttattaaactccctatataacgacttctgtatcttggatatagaggatcaagggaatggaatggattctaatattttagaaaatgcttttttagtcattggtactcctaataaatggttagtaaaggatgctgatgctccattattaggagaaaaaggcgttggtagactatcaatgatgagattggggcgttatgcttcagtcatttcaacagtatctggaagtgctaatcaatatgttattaattttgactgggaaaagtataatgacccaaatctatttctcgaagaatga

SEQ ID NO: 199784 - DNA, 600 bp, Klebsiella oxytoca
atggcaaaagcaaaagttttaataaacgatacagatgaagcagtaataaaaaacgcattagatgttgaagatatgaacgaagtaaacattaacgttacgagaaaaaagaaaactggatttttgggaacttattcaatagtttttcatgattctgtaaaaacactctctaaaatgaacttaaagcctaatgcatacaaaatagttatgtatctttttggcataatagaaatgggtaatattttagttaacttctcacaaaaaaagatagctgatgatctgggcttacagccgtctaatgtatcaagagctttcaaagagctttttgataaaggggttttaatcaaagatagcgaagacggacacgtttacttaaattcaaatctatgcactatgggtgttccgaaaaattttgatcaaaagagaatgcaaaacttacaaaaatcaaatattgaaactgaagattttaaaaatcagatcaatttatttactccaacaaacacaacaaaaataaaaactaatgataagaaagttatcaagaaagaaactaaagaaaatgtgttagagtttcctatgcaaaatgattgggttgatgttgaatag

SEQ ID NO: 199785 - DNA, 1284 bp, Klebsiella oxytoca
atgaaatcacagtttatgcatgtagaactctacagcagagaagagccagcaaagaagactataaataaaagtaaaaatataaatcataaatctgatgttagaacaacaaccgtaaacggtgtgttgtcagaaatgaaaagggaggaaggttttacatcccatttagaagccatagctgcaccggaggtgctctatgggtctataaatgccttagaacgctctatagagcgttatgaggctgaatataagactactgataaaaacggcaaggagaagaagctacgcaaagatgcatgcatcttgctagctggtgtagtttctctagatcgagctgatgaagaaatttgggaagaatataagacaaaatcaattgaatatttgaaaaataaatatggtgaaaatttaaaatgtgttgttgagcatacagacgaaacaaacccacattttcatttttacgttgttggaaacaaggatcaagatttaaatttgctgcatgatggaaagctagcagtatctaaattagcaaaagaagataagaagaaactacatcaaacagcttacacggaagctatgattaagtttcaagatgatttttataccaaagtatctaataaatttggattgagcagaacgggcgaggagccgcgagaacgctataaatcccgccctgattacttgaggtttaaaaaaagacaggaaacagcattaaatatattagccaatttagaagagtttgaaaaaaaagaatttaaaaaagcaaaaacaagaggtttaaacataggcattaaagattttgaccaaaatacattttggggcaaattagattggagggtaaaaagaattgagaaaaaaaacaaggtagaaattaaaaagttatctgacgaaaacgataatttaaatatcgataaatcaaatttacagcatgaattagatatgagtaaaattgagctttcagaggcatataatcaaagaaatgaagcctccagaaaaaatagtgtttatattgataaagtaaacgctctaaaaaaagaaaataaattattactcccatataaagatcaatttgatttgaaattacagcaggagaaaaagccattacaagcagaagtcaaagagttgacttctgaaaataccaatttgaaaaatgagaacacacaactaaaaaaagaaaatttagatttcaaagaattcattttaggtgttaaaaatcactatggttctaaatttcaagaatggtacgaagaagtattcaaccccaaaacaaaaacaaaacccaaattttaa

SEQ ID NO: 199786 - DNA, 294 bp, Klebsiella oxytoca
atgcttgctatgccatctatttatgaaggctttggtttgcctgtaattgaagctatggcttgtgggacaccgacgatagcatcaaatacaacatctctaagtgaaatcgcaggtgaagcatctctattagttgatcctttaaatgtgcaagatataagtgccgcaatgcatacattaatttccgacagtaatatacgtgaggagcttaagttaaaaggattaaagcacgtaaagcaatatacttgggaaagtacggtgcataaaataaaagcagtcttagaaattttgcaatag

SEQ ID NO: 199787 - DNA, 216 bp, Klebsiella oxytoca
atgacaaccgacgagattgaacaacatttcggcagcactgagaaagttgccgaattttttggcatcaccagtgaggccgtttaccagtggcgtaatcgccccggacgcttaatccctaaaggacgagctgctgaagctgcgtatcgaactgctggtgaactggaattcaacccagaacgttatggcaagaatacaacgcctaacgatcagaaataa

SEQ ID NO: 199788 - DNA, 558 bp, Klebsiella oxytoca
gtgggtatagaacctgaatggaaagtagataagcagccagcctggctggtggccgcaatcaaaaaaacgatcaccgagcttcctggcggatattcagaagctgctgagtggttgggtgtgaccgagaacgcgctgtttaaccggctgcgtaccgatggcgatcagatcttcccgctcggttgggcgatggtgcttcaacgtgctggtggttcaaaccacatagcgaacgctattgcacgtcactcgaacggtgtttttgtgccattggctgatgttgaagagattgaaaacggcgatatcaaccagcgtctcatggagtcagttgagtggatcggcaggcattcacaatacgttcgtaaagctaccgctgacggcgttattgatgctcaggaacgcgcccagatcgaagagaacagctatcaggtgatggctaagtggcaggaacatttgacgctgcttttccgtgtgttttgtgcgccggaaaagagtgacgcccgcgagtgtgcgcctccgggcgtcgtggcgaataaatcaatgtgtatggagaaatccgcatga

SEQ ID NO: 199789 - DNA, 1728 bp, Klebsiella oxytoca
atgcgtgaaattatcgttgataactttgctggtggcggcggtgcctctactgggatcgaactggcgattggtcgcagtgttgatattgccatcaaccacgatgaaaacgccattgccatgcacaagacgaaccacccggatacgctgcattactgcgagtccgtatttgatgtagacccggtggcggcgactggcggcaaccctgttggtctcgcatggtttagccctgattgccggcacttctccaaagccaagggtgctaagcccgtaaaaaaagagattcgagggctggcgtgggtagtcgttcgctgggcgctggcgaagcgtccgcgcgtcatgatgcttgagaacgtcgaggaatttaaaacctgggggccgctgctggaagatgagatgcgcccggatccagcgcgtacaggtgaaacatttgctgcatttgtcggaatgctttcgactggcattaatgcgaatcatccggcgttggcggaggtgtgcgagtttctttccattcagcccgatagcgagcaagcccggtctttgattcaggggctgggataccacatcgattaccgcgagttgcgcgcttgcgacttcggggcgccaacaatccgcaaacgcttctttatggtcatgcgctgcgacggtgaaatcgtacgctggccagcccccacccacggggatccgaaatcactggaagtgcagagcggcagactggcgccatggcgaactgcagcagagtgcattgactggtcgttgccctgtccgagcatctttgaacgtgctaaaccattggcggagaatacgcttaaacgcattgcgcgcggtatcgagcgttttgtgctgaataacccggcgccatttatcgtcaagtgcaaccacaccagcacccggacctcgtacgattgttttaggggtcaggaacttgacgtgccgctgcagactatcaccaaaacccacggttacgccgtcgttactccttttctgtctggtaatggggggagtgaatatcaggctaaaccccgtccgatgggtaagccagcacacaccattctgaaagaatcccgatcctgcgttgttgctcccgtcattgcgcgtcagtttggcgccagcaccgggcaccgcgccgacgaaccaaacggcaccgtcaccgctggtggtggtgggaaatctcagctggtcaccgcgtttctggcgaagcactttggcgggaactacaccggaccaggggctgcgatgggcgcgccagcccatacggtgacaacaacggatcaccatgctgtcgtgacctcgcatcttgttcatcttcgcggtacctgcaaagacggccgcaaagtggatcagcctgtaccgacggtcacggctggcggtctgcatctcggagaagtccgtgctttcctgatgaaatattacggcaacgaaaagggcggagtttcactgtcggagccgctggggacggtgacaaccaacgatcgatttggcctggttaccgttgatggtgatgattatcagattgtggatatcggtatgcgcatgctgcagccgcatgagctataccgggcgcagggtttcccggctggttacatcatcgatcgcgattatcgtggcaaccgttacgcaaaagacaagcaggtggcacgctgcggtaacgcagttcctcctcctttcgccgaggcattagtgagagcgaatctccccgaaatgtgtaacgtccaaagggaggtcgcatga

SEQ ID NO: 199790 - DNA, 1062 bp, Klebsiella oxytoca
atgagagccctgctaactccggaagtggtgccacgcttaggcgtggtactgtttaagcctggtaaagaactgatgaggcttttccgcaacgggagggtgctaatcgagtctgagccaaaaagtatggcggggctggaggctggtgccgttcctgacgcgcgccagccgctggctgaagataaggtattggaagactttttcaccagtgagcgtgtcatcaaagccgccgggggcttgccagggcttgaatactggcttcagcacaacattcgcgaatgccagtacccgcactccgattaccatcaccacgaactggtcaccatgcgtcatcctcctggtgcgatgatgctctgctggtactgcgacacccgccttcgagaacagaccactggcacgcttaccgcgctggcgcgccggaacgttatcgactgggttattgataccgccatcacaggcctgcaactgggacgagagcgggagctgtcactgccggagctgtgctggtgggccgtgtactccggcgccgccgatgctatcaccgagacgatggcacagcgaggtctgcgtcttcccgaggagccgttccagtcggtatataaagaaagcgatatccgaccttcagtaccggccaccagcattctgcaggaaaaactcccctcatcaggtgcagcgcaagcatgcaggcccaacgaaggagcgcaggcgcagcaggaacagccgaaggtgctggcgctggccgccgatccggaatcaccagaatccttcatgctgaaacctaagcgccggcgttgggttaaccagacttacaccgactgggtgaagcggcagccatgcgagtgctgtcgtcgccccggagatgatccgcatcatgtcatcgggcatggcatgggcggtaccgcaaccaaagcccacgatctcttcgtgtttcctctgtgcagagagtgtcacgacgagctacatgccgacgtaaatgcgtttgaagagaaaaacggctcacagctgcaactgttgttccgtttccttgatagggccatagcgatcggtgtgattgtaaaagcataa

SEQ ID NO: 199791 - DNA, 411 bp, Klebsiella oxytoca
atgatttatccgctctttattttcaaagccgatgacggcacttttgatggctactttcctgacatcgaaggttgcatgtttgccgggaacaacctcgaaagcgcattgagggacgcggagtcagctttcggtcagcatatggaagttttgactgaacaaggcggtcatgtgcctgcgccaagtgatccagccgattatctgggtgatgaacgtctcaccatggataacggcttcttggcgcttgtcgagattgacccatcaaaatacgaaacaaaagccgtcaaatttaatctcaccatgcctggtaatctattgactgcaatcgacagttacatagaaaaaaatggacggtacaaaaaccgctccgcttttctatctgagattgcaagaaaagagatagccagaggctaa

SEQ ID NO: 199792 - DNA, 255 bp, Klebsiella oxytoca; identical to SEQ ID NO: 94954

SEQ ID NO: 199793 - DNA, 285 bp, Klebsiella oxytoca
atgaagagtttcaaaattgaatacgttgatggcgctttgaccgttctggagacggatggtcagtcacggatgcaggaagccgtacatggcatccattttgagcatgtccagggcggccgccccctgctgaaactgacgattgcacatgatattgcaccggcctcgactcctgctccggctgctgagtcggctcaggaacctttagagggtgagctggtacaggatcaacaatctccgcctcccggcggtcgccgttcccgccatcgtcgtggaggtaagcaatga

SEQ ID NO: 199794 - DNA, 429 bp, Klebsiella oxytoca
atgatgtatcaacgcacggatctgacgctctccatgttctatgcatccagcgttgatgccgacgggaacaaagtggctacgttgacgatgcaggtcgtcgcggcagaagctggcgctgttcagaccagccagttggtctgcatcactgatgctgcgaagaagaagacgtacgccgttggcgagcagtctgtcagtaatggttctgacccgctgctggtggcgatcgagagccactggcgtcagagcactgacactgtggtgaaagggttgattgatgaagtgacagacttcattgcaggcaatatcaactcggtcagtacctggattggccagtacggcatgaaggtcctggaaggcgtgccgttgactgaacggctgccggagagtgttctgcaggctgatggacaggtggcgacagctgctggctga

SEQ ID NO: 199795 - DNA, 507 bp, Klebsiella oxytoca
atggcctttttgttgaataaaagtgatatggcctcctccataggtatctcagttcaggcatttgataaatggggtgtccctcctgttgagcgccgggggagagaggttttttatgacgttaaaaccgttctggagatagatcgcgagagacgacaacaaaaccagaaatcttcagagggtgaagacgatcttgaggaaaagttacttcaggcccgggttgacctgacggaagaacaggccatcgcacagcggctaaagaaccgggttactgagggtaagttgatcgatgcggcattttgtacctttgcgctaagccgggtagcgatggagctatccagtacgcttgatggcataccactggccatgcagcggcaatttccggagctgtccccacgtcagatcgatcacctgaaaacactggtggcgaagggggcaaacgcctgcgcccgcgttgatgagaaattaccggggtggatggatgattttatccgaagtacagatgaataa

SEQ ID NO: 199796 - DNA, 1932 bp, Klebsiella oxytoca
atgattttatccgaagtacagatgaataatatgatgcgggcagtccgggaggggctgagaccgcttatccgaccgctgccgatgacggcggtggagtgggctgacaagtactattttttgccgaaagagtcatcttacggcgccggagactgggtcaccctgccattccaggtcggtatcatgaatgcgatgggaagcgatttgatccgcactatcaacctgataaagtccgcccgcgttggctacaccaaaatgttgctaggggtggaagggtattttattgagcacaaatcccgaaacagcctgctgtttcagccaacggattccgctgccgaagattttatgaaatctcacgtggagcccactctccgggatgttgcctgtctgaaagcgctttccccctggctggggcgtaaacacagggataacacgctcaccctgaagcgattctcttcaggcgtgggcttctggtgtcttggtggcgcagctgccaaaaactatcgtgaaaaatctgtcgatgtggtctgttatgacgaactctcctcgtttgaaccggatgtggaaaaggaaggctcacccacgctgctgggcgacaagcgtattgaaggctctgtctggcccaaatccattcgcggctcaacacccaaaattaaaggttcctgccagatagaaaaggcagcgaatgagtcggcgcacttcatgcggttctatgttccttgcccgcactgtggtgaagagcagtatcttaaatttggcgacaactcgacgtcgtttggtctcaaatgggaaaaagaccagccggaaacggcgtattacctgtgtgagcataacggatgtgtgatccggcagtctgaacttgaccagactgccgggcgctggatttgtgataacacgggattgtggacccgcgacggtctgactttttttagtccggacggcaatgaagtcgcctcgccccgtacgatcacctttcacatctggacagcctacagcccgtttaccacctgggtgcagattgtctatgactggctggatgcgctgaaagatccaaacggtgtgaaaacctttgttaatacgacgcttggtgagacgttcgaagaggcagtggcggaaaaactgaaccacgaactgctgatggacaaggtcatgcattatgccgcgtctgtccctgagcgggtggtgtacctgaccgcaggtattgactcacagcgtaaccgttacgagatgtacgtctgggggtgggcgccgggcgaagaagcgtttcttgtggataagcaaattatcatggggcgtcatgatgacgaggctacccttctgcgcgtggatgatgcgataaaccgaaaataccgccacgttgacggcacggagatgaccatatcccgcatctgctgggataccggcggcattgatcaggaaatcgtataccggcgttcaaaaaaacacggcatcttccgcgttctgcccattaaaggggcatcggtatacggcaaaccgattattaccatgcctaaaaagcgcaatcagagtggggcctatctgtgtgagatcggtacggatacgaccaaagagatgctttactccagaatgggggcagacaccgctccgccagataccgcaaccccctacgcttttcacttccctgacgatccggaaattttttctgaagtggaggcgaaacagctggtggccgaagagctggtggaaaagctggtgaacggaaaaatcagactgctgtgggatgcaaaagggcgcaggaacgaagcgctggattgcctggtgtatgcctatgcggcattccgggtttccgttcagcgctggcaactggatctggatgttctggcagcatcgaggaaaaacgaagggcagagcactctttctcttgaacaactggcggcaacgctgtccggaggtattaatggcaacgaccactga

SEQ ID NO: 199797 - DNA, 207 bp, Klebsiella oxytoca
atggcaacgaccactgaattactggaagcccgctcggcgctgcatgacctgatgacgggcaagcgagttgccacggtgcaaaaagatgggcgccgtgtggagttcactgccacgtcggtgggtgacctgaagcggtacattgcggagctggaatcgtcgttactggtgagctcaaaacgtcgaccgccggcgggggtgagattgtga

SEQ ID NO: 199798 - DNA, 1488 bp, Klebsiella oxytoca
atggcggactgggtcccccccgctgaaagcgtggatgcggcgttacttccgtcactgagactgggtaacgcgcgtgccgacgatctggttcgtaacaatggtattgcggcgaatgccgttgccctgcacaaggatcatatcgtcggtcaccttttcctcatcagttaccgcccgaactggcggtatctcgggatgcgggaagccgcggcaaaaagctttgtggatgaagtggaatgtgcctggaccgaatactgtgattcggtttttggtgaaatagacattgaaggaaagcgcacttttactgagtttatccgggaaggggtgggtgttcatgctttcaacggtgaagtgttcgtccagcctgtctgggatgctgaaaccacgcaattgttccgtacccgttttaaagccatcagcccgaaacgcattgacacaccaggtcacgctcagggtaaccgccagctcagggccggcgtggaaatcgataaaaacgggaaagcgctggcctatcacgtcagtgaagatacatggcctttttccggcaccgggcgctggacgcgggtacctaaaactcttccctcgggcaggccggccatgatccacgtgtttgaaccggtggaggacggacagacccgtggggccaaccagttcttcagcgtgatggaaaggctaaaaatgctggacactctgcaggcgacacagctgcagtctgccatcgttaaagcgatgtacgcggccaccattgagagtgaactggattcggaaaaggcgtttgaatacatcgccgcggcggatggggacaacggcccgctgatgaagatgctgtctcagtattcccgttactatcaggcaaataatatcaaactgggtggtgtgaaaattcctcatctgtacccgggcgatgagcttaacctgcagaccgcgcaggattctgataacggattttccgcgctggagcaggcgctgcttcgctatatcgccgcagggctgggcgtgtcctacgaacagctgtcgcgagattattcgcaggtcagctattccagcgcccgcgcatctgccaacgagtcgtggcggtattttcttgggcgccgtaaattcattgccgggcggatggccacacagatgtttgcctgctggctggaagaggcgctggcgcggggcatcattcgcgcaccgcgtacacgtttttctttctgggaggcgcgctcaagctggtgccgtgcggaatggattggtgccgggcgtatggccattgacggactgaaagaggtgcaggagtcggtcatgcgtattgaagcaggcctgagcacgtatgaaaaagaactggccatcatgggggaagattaccaggagattttccgccagcaggtcagagagtccgaagagcgcaggctggccgggttgtcgagtccggtctggatagcgtccacgtatcaacaacaaattcaggacagtcgcaagacagaggaggataaacgtgcaacgtaa

SEQ ID NO: 199799 - DNA, 1494 bp, Klebsiella oxytoca
gtgcaacgtaatctcccgcacatatacagccaggccacgaacgccccactgttacttgaacccgcctacgcgcgggttttcttttgcgctctgggtagggaagggggcgttaataacctgcggatcccccagagtgaggaaagtcttgataccacggatatgacgcaggtcaccacggcctttatgtctgacggcaagcggcaggcgcgtttctatcaggtggttgacggtatagcggtactgcccgtcaccggcagtctggttcataaactcggtggtatgcgcccgttctccggcatgacgggttatgacggtgtgctgggtcggcttcagcaggccatcgccgaccctgacgtgaccggaattttgctggacatcgacagcccgggtggacaggcggccggcgcatttgattgcgctgacatgatccaccgactgaggggggaaaagcccatctgggcgctggccaatgatatggcctgttcggcggcgatgttgttagcggcggcctgcgatcgacgtctggtgacgcagacatcacgactggggtcgattggtgtggtcatggcccataccagctacgccgggcaactggagcaggacggcgtggaaatcacgttgattttttccggcggccataaggtggatttaaacccctatcagtcactaccagaagacgtgcgggctgactgccagaaacgaatggatgacgccagaacgatgtttgctgaaaaggtcgcgcaatacacgcaactgtctttagatgacgtgctggcaaccgaggcggcggtgtatgacggcgcttcggctatcagtgtcggactggccgatgaaatggttaatgcggcagatgccgtgaatgtgatggcatccgctatcagaaatcccgaaaaaaccggaggaaatatgtctcaattatctgcagcggaagctgttacccaggaaaaccagcgtgttatggggatcctgacctgccctgaggcaaaagggcgcgaggcgatggcacagatgctggccagccagccggggatgagtctcgttcaggcgcaggctattttatcctcagcgccacagcaaactactgaagcggcggtaagtgtgccagagcgcattatgtcccttgatgaagctgtcggtcgggaaccgctggcacaggctctggcggcgacgccgggcatgacactggagcaggcgaaatccttgctggcgctctccccaaaagctgcgtcattgtccgacagtgtcatggcgctggaagaggcctccggacgtgaggaactggcacaacagttgtcatcggtgcccggtatgacgctcgagcaggccaaaagtttactgtcggctgcgcctcttcctgccgccggaaatagcggcgttgcggcaggttcctttgagcagtttatgcagcaacattctcctgcgccggttcaggcgggtgcagacagcagtaccaccacagaaagccagatgctcaacatgatgcccggtaactaa

SEQ ID NO: 199800 - DNA, 339 bp, Klebsiella oxytoca
atgtcattcaaaaccaccacagagcagcgaatcgatccacggatttttgccggaaacgacccggcgcataccgcgactggggcttgcgctatcacaacagcaacgccagtgctgaccccgctgatgctggatggcaccaccgggagcctggttgcctgggacggagaaaacgccggcactgcggtcggcgtgctggcgttgccacttgaaggcggcgaaaccaccctgacgtactggaagagtggcacctttgccacggaagcccttgagtggccggaaacagtggatcccattaaaaaggtgaatgctttcgcgggtagtgcgattagccacgcgtaa

SEQ ID NO: 199801 - DNA, 1029 bp, Klebsiella oxytoca
atgggattgtttaccacccgccagctgctgggttacaccgagcagaaagttaagtttaacccgctttttctgaccctgtttttccgccgtaccgtgaacttccacactgaagaggtcatgctggacaaaatcacgggtaaaacacctattgccgcctatgtgtccccggttgttgaagggaaagtgctacgccagcgtggcggtgaaacacgtgtactgcgtcccggctacgtcaagccgaaacatgagtttaattaccagcaggcgattgaacgtctcccgggtgaagatcccgctcaactgaatgacccgctgtatcgccgcctgcgtatcctgactgacaacctcaaacaagaagagcacgccattgtgcaggtggaggaaatgcaggcggtgaatgcggttctctatggcaaatatgtgatggaaggggagcagttcgagaaaatcgaagtggactttggtcgctcggcttccaacaacattatccaggcccccggggcgacctggtcagagcaggatcgtgagaccttcgaccctacccacgatattgatatgtactgcgatcagtcttccggtcttatcaatattgctgtcatggacggctcggtgtggcgtctcctgaacggcttcaagatgttccgcgaaaaactggatacccgccgcggctccacctcccagctggaaaccgcgctcaaggatttggggtctctggtgtctttcaaaggctactacggcgatctggccatcgtggtggcgaaaacggcgtatgtggacaaagacggtaccgaaaaacgctatcttccggagggcacgctggtgctggggaacaccgcttctgaggggatccgttgttatggtgcgattcaggatgcacaggcgcttgctgaaggtattgtgtccgcatcgcgttacccgaagcactggatgactgtgggagatcctgcgcgagagttcacgatgatccagtccgccccgctgatggtgcttccttccccggatgaattcgtggtggtcacgatcaagtaa

SEQ ID NO: 199802 - DNA, 375 bp, Klebsiella oxytoca
atgtcaaaagaaaccgatctgaagcgtcttcaggagctggcaactgcgctcggacgtacacctgacctgtctggtagcgccgccgatatccgacagcgcgtggcggaatgggaggaggaagcgctggcactctccggagatgaaggcgacggcagtgatgacaacaccatcgatggcgaacttatcacccgtacagaagagaaaccggtggcttccggatggcgacgggttaaggcgcggcagacatttcacacccacgcccgggaagccgacagcgatcgccgtaaggaacttattctcccggatgaagtggtccgtgtgcctgaggcagtcctggcacgactgatcgcggccgggttggtggatgaatactga

SEQ ID NO: 199803 - DNA, 354 bp, Klebsiella oxytoca
atgtccggtttcgacaatctcttcgatgcggccatttcccgggctgacaaaaccatccgaaccgtgatgggagtcaccgtgaaagtcacttccggggcgctttcaggtgcggaattcactggtgtctttgatgatccttccgaagttggttatcccggtgccggtatccgggtggaaggcaccagcccgtcggtatttgtccagacctcactggtcagcctgttgcggcgtccggatacgctttccattaacggaacggactactgggttgacagagtcggcccggacgattgcggatcctgttatctctggctgggcaccggacatccccccgccggaaaccgccgccgatag

SEQ ID NO: 199804 - DNA, 423 bp, Klebsiella oxytoca
atgtttttgaaaaaagagccctttgagtttaatggtcagtccaccacactcaccgaactgtcggcactgcagcgcattcattacctggactatctggccggggaagaaaaagcgctggcatcttccgacgaagagctgagtgaacaggccatgacgacccgcctgattggcatgagtattcgcaacagcgcccgactgatttcgtattcgctctggcacaatgatccggaggggccctccgaggatgaactgttccatcaggttttgagtacgtggcctgctgaggctatcgggaaggcagaaatcgccgttaaaacgctgtcgggaatgctggcaccggttgccgaagaagcgccatccacggatgaagatgttgatgccaccgcgctgggtgatgaaccggttacggcggaaaagccctag

SEQ ID NO: 199805 - DNA, 273 bp, Klebsiella oxytoca
atgcttgctggcatgacgtcctctgagctgggcgactggcatcacttttaccgggagcgttattttcaggacgcgcaactcgatgcgcatttttccagtctgctttataccatttccaccttcttctgcccggatccggatatctcccctgcacacttcagcctgttgtccccctcaacggagtctgcggcagagaatgtacaggatgatgacgccatgatgctggccgcagaaggaataacaggaggcacccgctatggcccagcagattag

SEQ ID NO: 199806 - DNA, 3171 bp, Klebsiella oxytoca
atggcccagcagattagcgaccttgttattaacctcgatgttgacagcgccacgtttacggagcaggtcgcgcggattaagaatcagctgtcagggctgggcgatgaagcggaaaaagttcagactcgccagcaacgagcagaggctgcgctggccacggcggcggcgaatcgcgctgccgcgatgtctgatatgcagtcccgccagtcagcggcagcggcagggcttagttcggaaatgcagcgggtcagtgaatccgtagaagaaacgcagcagcgcgtggcggggttcagccagcaacttcgggataatgctgcccgggctgccgtactggcccggcagcaggatgcactggcggagtcgttctttcgtcagattgacggcgttcgttcactgagtggggccacggattccttaacggcggttcaggagcagttcaggaaggcgcgcgtgcaggggaacatcacgcagcaggattatctggcgctgatatcccagaccacggcccggcagaaggaattacagcgggctgaagaaaaagccagtcagtcgcgggcccgcttcctggaacagcttaaatcgcaggttgaagagcagggactatcccgcaccgaattactgaacctgaaagcggcacaactcggtgtgactgaacaagccgcgccactgattgcccggttaaaagaacaggatagcgaatggaaaaaagggacgctcagcgccggacagtatcgccaggcactccggatgttacctgcccagtttacggatatcgccacctcaattgccggcggaatgccgctgtggatggtcctcatgcagcagggaggccaaatcagcgattcgtttggggggatcggcaatatcttcgagatcctcaaagaggaactactgggcgtcaaaacttctgctgatgagtccgaagcgtcgctgtcggaaaatgccaatgccctttctgagaatgcggagcatgccaaagggttactgcgctttcttacgcctggccggatcatcgttggcggttttgccacggcactgaccgcggtatcggttgccgcctggcaggcagagcaggcaaaccgatcgctgtaccgcgccatcacgataaccggtggaacgtcggcaaccaccacggctcagctgtggaaaatggcggatgaaataggggacagcaccaacgccagcacagcatcagtggcggaggtccttgcccggatcgccgggacggggaaatacagcacagagcagttgcgcatcgtggctaaaacctcgcagcaatggtcgcaggtcatggaggatgatgccgccagaattgaagctgcgtttggctcaatcgccaaaagtccggtcaaagcgctggctgaactgaacaaagagtacaatttcctcagtgttgcccagttacgccatattgacgaattagagcgtacaaagggtaaacaggccgccgttactgaggggatgaaactgtttgcggacaccatgggtgaacgcatgcagcagattgataatgccagcacacctctggagcagatgtgggacaacatcaaaaaatggacggcggatgcgtggcggtgggtgggtgaccataccattggtgcactgaacctgattactgacgtggttgccggtacggttgagcaggtcaggtatctacttaacagtggcgatacagccattcgcgaatttgtgctcagtgcacaaaaggccgcacaaaaaataccggggatgggggatgttggtaaggatgcgattaagcagaaccaggaatatattgaagccaacaagaaacagaatgcggaattactgaaatccattgctgaacgtgacgcccggatccgtcagggggaaatgggatacgtaacccgtgcacgggatgccagggtggccgccgggccgggccagcaggatgcggtgtcgaaagcggccgatgagattgagaaaaaccgtcgaaagaaaggccagacgcgtacgtctgcaggcgtcagtgctgttgactcagcacgggaagaactgctggtgttgcaggcgcagttacgcacactacagcttcataaaggactgaacgacaccatcagtcagcagcgaaaagacctctggaccacggaagcaaaatttcaggttctggaagaagccgcccggacccggtccctgacgaagcaggaaaaatccctgctgtcgggtaaggcgcaggttctgcaactggcacggcaaaaggcgctgctgggcgatcagattgttgcacaggaacagctgaataagcgcatggatacggcgcaaaaatacgtcactcagatggcagaaaagcagcaggctctggtgggtggagccaccctcagtgaccgtatggcccagaggcaactggcaaaagcccagctcgctgccggctggaaaaatggcggcggctctcttgatgatgccggataccggcagcaacttcaggctgcgaataattattacgaagcggaggatcagcttcgtggtaactggctgagtggcgtggaaaaggggtgggctgaatatcaggactcggcgacgaacgtttatgacgccatgaaacaggtttcacagtcaacattcagcgggctggccgatcagctcacccaactgaccaccaccggcaaagcgagctttaaggagttcacgtcatccatactgaagatgattgttcaggtcatcaatcagctgatcgtggcctatacccttcaggcggccatggggtggatcagcggcgattccagcgcctcaaagtctggtcagtcgtttgcggttccgtcgtatcgcccacccaattatgatgtcggcggttttaccgggcatggtggtaagtatgagcccgcaggcgttgtccaccgcggcgagttcgtattcaccaaagaggcaaccagccgcatcggcgtgagcaacctttaccggatgatgcgcggttatgcctccggcgggtatgtcggcaacgcttccagtccagcaagtgtgtcccctggcggtgtgatggtcaacatgggcggcgtctatatcagtagtggcaacgaacagcagtctacgcagcggtcagcgattgacagtaacggtatcctcaagcaactgaaacccgccatcattagtgtcgtcagtgaacaggcccaacggcccggcacgccactctggaaggcaataaaagaagggcgttaa

SEQ ID NO: 199807 - DNA, 600 bp, Klebsiella oxytoca
atgaaggaaatgaaaactcaaatagaattgagcggaattcttggtaaaacttttggtacttcccatgagcgtataattactacggtaggagaatctattcaggctttatgctgtacaatagaagggtttgaaaagttcctaagcaatagcaaagaaaaaggcctaacctttgctgtgtttaaaggtaagaaaaatattggtaaagatgacttgggctttcctgttagtggagaagttatccgaattgttccggtagttattggaagtaaaaaagcaggtattcttcaaacaattttaggtgcagtacttgtagtcgctggtgtgcttgttacgggactctcatatggatgggcggctccagtagggcaagcgatgattggcgctggtataggtatggggttaggtggtgtagttcagatgctttcacctcagcccgcaggtcttgcccgtaaagaatcccccgacaataaagccagctatgcctttggaggtgtaaccaataccgcctcacagggttatcccgttggtttgctttatggtaagcggcgaattggcggcgcgattatttccgccggtatctatgtcgaagaccagcaataa

SEQ ID NO: 199808 - DNA, 675 bp, Klebsiella oxytoca
atgggcttcactctgccgcgtacatccaatggccgtgacttccaactggttaaaactgtatcgggaaaccagttccgggataaatgcgggctccatcgcatcggcataggcgttatccgggtcagaccacgaaaccagcgcattggtgtagcgggccttacttgtgctgctggaataccgcggactaccaataatattcgcgcgcgtatagttgaaatcgacatcacgcggcatatcggcctgcacgataatctgttcaccactccagcaagtcatcccccggaaaatagcagcgaaatcacgcagtacggtgtaggcgtcgttacgctcctgaacatagacattgcagatataacgaggctccatgccatcgccgcccctaccatcgggaaccaactgatcgcaatactgtgcaatcgggtaaagtgcccatttggagatattcacgctggtgagacgatcgccaagaccgaaacgatcagagacaacaatgtcgtaataaatccacgccgggttgtcagtccatgcccatttgaacccccctgtccatgtgccggtatattcgcgcgtttccgggttatagttgtccggaacgcggataacacgcccacgcggctcgcaggagatttgcgggatcgaaccattgaactggctggagtcaaactcgatatataa

SEQ ID NO: 199809 - DNA, 5532 bp, Klebsiella oxytoca; identical to SEQ ID NO: 56102

SEQ ID NO: 199810 - DNA, 489 bp, Klebsiella oxytoca; identical to SEQ ID NO: 34914

SEQ ID NO: 199811 - DNA, 1212 bp, Klebsiella oxytoca; identical to SEQ ID NO: 169796

SEQ ID NO: 199812 - DNA, 219 bp, Klebsiella oxytoca; identical to SEQ ID NO: 34913

SEQ ID NO: 199813 - DNA, 264 bp, Klebsiella oxytoca; identical to SEQ ID NO: 34912

SEQ ID NO: 199814 - DNA, 1206 bp, Klebsiella oxytoca; identical to SEQ ID NO: 169795

SEQ ID NO: 199815 - DNA, 369 bp, Klebsiella oxytoca; identical to SEQ ID NO: 169794

SEQ ID NO: 199816 - DNA, 222 bp, Klebsiella oxytoca
atgagtttaagttttattgcaagagtcttgcgccaattggcaattatgtttgtcctctccgtgcttattgtggccggatatatctactatgccggtaaacagcatcagcaggcagcaatcaacttttggggtgagcaataccagcctgatgccatctcgacgcaaattgattgggggtttatcgggtcgcgcggaaaacctcgccgttcagggcgaggatga

SEQ ID NO: 199817 - DNA, 330 bp, Klebsiella oxytoca; identical to SEQ ID NO: 34921

SEQ ID NO: 199818 - DNA, 654 bp, Klebsiella oxytoca; identical to SEQ ID NO: 117486

SEQ ID NO: 199819 - DNA, 285 bp, Klebsiella oxytoca; identical to SEQ ID NO: 117491

SEQ ID NO: 199820 - DNA, 264 bp, Klebsiella oxytoca; identical to SEQ ID NO: 117494

SEQ ID NO: 199821 - DNA, 432 bp, Klebsiella oxytoca
atgagtctcttgcggaccgcctcgtgctgcgcattctcagaattcgtatgtacccacgcttcatccgtatgtctcgctaggcttatgcgattcagcatccatccgctgatctggaaatcctggtcgattgtcattgccgcaggggttctaggagcgggctatccattgggcctgcgggccatcacggcgggcggtccgacgcgctgggtcggcctctgtgtggcagtgacgtgcatggcggccagcggcgcacttttgtggctcgcgctcaagcggattccgatcagcgcggcctctgtagcctgggcaggaatcgggctacttggaaacttgggtatcggcgccctcttgctaggcgatctcgcatcagtgacgcgctggtctggcaccgccctcatcgcagcaggcattgcctgtcttagtttcgtttga

SEQ ID NO: 199822 - DNA, 3105 bp, Klebsiella oxytoca
atgaagatcaccgagatggcgctgcgcgccagtcgacttacctactttgtagcgcttatcattttcgtcgccggcatcgcgaccttcctgaattttccttctcaggaggagccgactgtcacggtccgcgatgcgatggtcacggcgttgaacccggggctgcccgccgaacgcgttgagcaactcattgcccggccgatcgaggagcgcttgcgcgaactggcagaggtcaagcgcgtgacgagcaccgtgcgcgcaggcagcgccatgatccaggtcacgatctgggaccgctacaccgacttggcaccgatctggcagcgcgtccgggccaaggtcgccgattcgaaggatgccttaccacagggcacgatggggcctttcgtcgacgaagacttcggccgcgtcgcggttgcctcgattgcggtcactgcaccaggttactccatgagcgagatgcgcgtcgcgctcaagcagatgcgcgaccgcctgtacaccgtgcctggtattgagcgcatcactttctacggcctgcaggaagagcgcgtctatctcgagttcgatcggcctaggcttgcgcgattggagctgacaccacagggggtgatcgaccaactcgtcaaacagaacgtcgtcgcttcgggtggacaaattgtcgtcggcggcatcaatgcaaccttggcggtcagtggcgaagtgagtgacgctccctccctgcgagcaatgccgatcgcgctgccgcgaccgcaaagtagtacggcgcccatgccgacgatcgcattgggtgaactggcgcaggtgagtgtgcggccagccgatccgccggagtctgccgccatctacaaaggccagcccgcggtcgtcatggcggtttcgatggcctctggtcaaaacgtggagcagttcggaaaagcgctcaaagcacgggttgcagaccaggagaagctgctgccggcgggtttcgatctgtcatacgtcactttccaggccgatgtcgtcaagcacgagatgggcaaaatgaaccacgtcatgatggagacgatcatcgtcgtcctcggtgtcgtcgtgctattcctcggttggcgaaccgggatcatcgtgggcatgatcgtgccgttgacgatcctcagtgcactcatcgtcatgcgcgcgatgaacatcgagcttcagaacgtctcgatgggcgccatcatcattgcgctcggcttgttggtggacaacggcattgtgattgccgaagacatcgaacgccgcctagccggtggcgaagatcgtaagcatgcctgcctcgaggcgggccgcacgctcgccattccgctgctcacgtcctcgctcgtgatcgtgatcgtgttctcgccgttcttttttggccagaacgccacgagcgagtatctgcacaatctcgtggtcgtgctggcactgacgttgttcgcatcgtggctgctgtgcctgactgtcacgcccctgttgtgctaccacttcgccaaaccccaccacaagcaggagcatggcgacgcgtatgacacccgcttctaccgtggctaccggcgcgtactggagtgggttctccaccataaggcggtctatgtagcgtcgatgatcgcggcgcttgccattgcgctgtatggcttcaccaccctgccttacgatttcatgcccaagtccgaccggcttcagttccagattccggtgcagctcgccccaggtacggattcgcgcgaaacgctcgcacgcgtgaagcagatcagtagttggctgggcgacaagaacatcaatccagaagtctccgatcacatcggctacgtcgccgatggtggacctcgcttcatccttagcctgaatccaccgctgccggcatcgaacatcgcgtacttcgttgtcacactgaagccgaagagcgacatcgacgctgtcctcgcccgaacccgcagctactttgcgcacgcacatggcgacgtgcgcgccgagcccaagcgcttctcgctcggtgcgaccgaatcagggaccgccatctatcgtgtcagcggtccggatgaggaggtattgttggaggctgcgtccaaaatcgaagcagcactgcgcaagctgcccggaaccatcaacgtcaagaacgattgggatacgcgcattggccgcatcgacgtaaaggttgaccaggaccgcgcgcgtcgggcgggcgtaacgactgaagacatcgctggcgggctggatgtccgctacagcggccgatcgatctcggtgattcgcgacggtgacacctccgttccgatcgtcctgcgcagcatcgtaagcgagcgtcgcagcacggcagacgtaggcgcgacgctcatctatcccagcaacggcggtccggcggtgacgctggcccaggtcgcagacgtatcgctcgcgagcgagccatcggtcatccaacggcgcaatctcatccgcacgatcaccgtgcaaggacagaacacctcctacaccgcccaggagatcgtcaaccgcctggtgcctagcgtcgctgccttggacctgcccgcgggctactcggtcgaacttggcggcgagatcgaggaagctgccgaatcgaacgccgcgctgtcgacctacatgcccctcgcatttctggcgatgctgatgctgttcgtatggcagttcaattccttccgcaagctcggtgtgatcctcgcgacgatccctttcacgcttatcggcgtggtattggctctgaagctaaccggcacacctttcagcttcatggcgaccttcggcgtactggccttgttcgggatcattgtcaacaacgccgtgctgttgctggaacgcatcgaccagggcttagcggaaggcctgccgcgccatgaagccttggttggggccgcgatacaacgacttcgtccaatcgtgatgaccaaggtcacctgcatttcgggactggtgccactcatgctcttctccggaccgttatggacagggatggcgatcgcgatgatcggtgggctggcgctcggaacgctggtgacgttgggcttgattccgttgctttacgaagtcctgtttggaatcaagcgaattgggccgtggagcctgagtgccgccaccgcgcatggagatcgctcatga

SEQ ID NO: 199823 - DNA, 1167 bp, Klebsiella oxytoca
atgagtcgcgtccgtagagctttcatgaccgcgtgcgcactgcgctccttgacggttgcttgcacactattcatttcgaccctggtctcagggtgcggaaactcgcaatccaccgtatccgagcctccgcgcgcagtgaagctcgccgccgcgcagtcggatcttccgcatagctcccgcatcgaattgactggctcggcgcgagcaaccgagcgcagcatcctaggatttgaaacaggaggacggatcgccaagttgaacgtcgacgtgggtgaacggttcgcccgcggtcaagtcatggcagaacttgatgcggaacctgaccggcttcgcgtgacgcaagcgcaagcatccctggcggccgccgaagccggcctgatggatcgacgtgtacagacagatcaacagcgccggttgctcgaaagcgaagtcatctcccctgctgcgttcgagagcgccaaggcgcagctagcggtcgcagagggccaagcgcgcactgccaaggcagcgcttggcctggccgaacgagcacaacgtggcacgatgatcgtcgctcctttcgatggtgtcgtggcggaaaagctggctttggcgttcaccgacattgctgctggtgcgccggtatttcaggtcgacggtgtgcgcagtggcactgagatcatcgcgaacgcgtctactacacaggcacctcacatagatgtcggccaacgcgcagaactgttctggagcggagccgaacaaccaatccgagcggtggtacgtcgtgtcggtctgcgcgccgaaaatggctcgctcctacccgtggtgctagtgcctgaagataacgcgcaagcgcgcgcacttcggccaggtattcccgtacaggtcgtgctcgacgcacctgcggcgacctccaagacctctcggcccgagactgtatccgtcccttatgcctcgctggtgctcggcacgaagccgggtgaggcttccgtcttcgtctacacccctgcagataagaaggtgcaccgtcgcgcggtgcgcttcacgccggcacaggaaggagacagcgcgcgcgtcctcgctggacttaagcccggcgagacggtggttgccgccggaggcggatggctcaccgatggacagccagtgacaccactggaagccaccactcaattgaccaagcgctaa

SEQ ID NO: 199824 - DNA, 264 bp, Klebsiella oxytoca; identical to SEQ ID NO: 117508

SEQ ID NO: 199825 - DNA, 507 bp, Klebsiella oxytoca; identical to SEQ ID NO: 117510

SEQ ID NO: 199826 - DNA, 273 bp, Klebsiella oxytoca; identical to SEQ ID NO: 34916

SEQ ID NO: 199827 - DNA, 1236 bp, Klebsiella oxytoca; identical to SEQ ID NO: 96875

SEQ ID NO: 199828 - DNA, 573 bp, Klebsiella oxytoca
atgactactttaaatcaagctgtaaaaattgaatcacccgttgcaagtatcagccacctgttaccgttcgaacagaaacagcacattgaaaagctgtatttccaaaaggttcaacaggccactgaccgcatgagtaaagctgagtctgaatatcaggatactgtagaatcccgctcagtgctgattaatcagaaagtcaccgaatacctggctaacccttcagagcgtcacggttttaaagttgttcaggtttacccaacgaaccagcagcaagttatccagtcaatggctgagcgggggtacatggttcaccgtgtatctgttgggatggtcacctttattcgtatgccaaagaacgctaaagataatccccttcagggaattactgaaaaggcaaccgctgaagctgaattaactattgataagatgattgaacgtttgaaagtgaaagctgctgaggcaatccaccagcgaaacaagattgtgattgaagcccgtaaagctctggattcaattaaatcatttgaaagctatttaaacgtgattgtaactgactctgaagggagagagtaa

SEQ ID NO: 199829 - DNA, 801 bp, Klebsiella oxytoca
atgaacgaaattgttaaagagccagtaagtcagatagctcagtcatttagagacagaatttcaagtccattatgggggtatgtttttttctcttgggtatcctgtaactggactaatatcttatttgtctttatgagtaaggaagatatcgagactagaatacatgcagtactcattcagcctgatttatgggtgaattactttttgactcctcttttaataggggtgatgctttttgtgtttatgccatttgcgcaatggggtttatctctatgccacaactggatttctaaaaagaaaaaagaaagtgataaactaagtgcgctggaaaagtaccaggatgatattgaccttgccgataaaaaaattgaggctgaaaatgctgaaagcctgtcaagacagaaagaaaatgcaaaaaagaatttggttgaagctagaggtcagactcgcttgtctattttaaatgctagaaaggctaagattgataatgcgattgaggggctaaaaaacgcttacgctgaatcgcaaaagaaactagatgaaattaattatgagctaaaaacaatagaagataaggttaatttaaaattggagcaatatcagtccgcgagtgaaagagtgaatgcaatcgctgaactgtattttacttatgaaaaccttgaatcaagggaggggtttgtttcattcttaaatgatataaaagaaaagaaccttatcgcgccttcttttcttagtcggaggtatgatttgatgttagacaaggaactaaagaatctggatgaaagcaaaggtaatgaataa

SEQ ID NO: 199830 - DNA, 195 bp, Klebsiella oxytoca
gtgaaaagtacaagcgacctgtttaacgaaatgatccctcttggccgcttgatccagatggttaaccagaaaaaagatcgcctgctcaacgactatctctcgccgatggatattacttccacccagttccgggtgctctgttccattcgttgcgaagtgtgtattacccccgttgagctgaaaaccgtgctttag

SEQ ID NO: 199831 - DNA, 1593 bp, Klebsiella oxytoca; identical to SEQ ID NO: 199427

SEQ ID NO: 199832 - DNA, 261 bp, Klebsiella oxytoca
atgccagagcggtaccagtatcctgtcgacgaaggttttgcggatcgtattcacaccccggaaggggtcagatccctggttgtaaaatcacagctgatggagttgctcagggagatggagcgagacggccacgatgtcagcggtgcggcggcggaactggtggcactggttaactatgtgactagctcgcagttgtcgatgcgggagctgcaaacacacctggatttctgcgcaatgcagttgcggcagcaactcagatag

SEQ ID NO: 199833 - DNA, 1428 bp, Klebsiella oxytoca
atgacagtttcaacgcaggtaagccgtaacgagtacaccgggaacggcgccactacccaatacgatttcacgttccgcatcctggataaaagccacctgctggtgcagacactggatacctccgaaagcatcgtgacgctaacactcggcaccgactacacggttaccggcgtgaaccgttacaacggggggaaggtggttctgacatcagcgctaccagctggttacaaaatctctatcgagcgcagcactcctgttacgcaggaagccagcatcaggaaccaggggggatttttccctgagatccacgaagatgctctcgataagttaaccatgcttgtgcagcaggcatacgggtggtggtctggtctatctcttaggaagccatcatggctcgctaactattacgacgcgcttaacaaccgcattcgtaatctgcgtgacccgtcacaggcgcaggatgctgctaccaaacattatgttgatgatcagattaacaacaccaattcagcctggcaggaaggcgatcgggttcttgaccagaaaatagacgccaatttcagaagaacaatccgggttcctgaaagtgatgtggcgctggttccgtcggttgaggaaagaaaagactcattgtttgggtggaatagttcaggcaggcccgttcctattttttccatgacagatactgctgatttggcaatgaaactggcatctgataccggtggaacattggtttatcttaagcagggtggtgccgtccaggatgccattaattatgttacaccagtagcctacaaaaatatggtgataaatggggactggtctgcggctttggttgctgctgatttaaaggcgcgagatcttgggtggggtctggatgggcagggtttagaatatcagcttggtgcagctatcacccttagatgtgggttatataaaaatataaggttaaccccccttaatactttcagcggggccgcccccatttttgttgttaacatgaatacagggaaatgcattcatgattctgtagaagttattggatttaaactaactggtgctaagatacttcagagtagttatataggtgaaacggaagcgattttcaaaggcatttgccgttataactataatggcaatttaatcagaactacgatgactgccgatgtcaataccgcaactgcctatgtgatcccggtcgtagatgcttcgatcttttcagctgaggaccctgtttatattggtgatgggcgctataaaatcctgtcaatctcaggaaatgacatcacactatacaacgatggaactggcgccactatttttgactcaggaactcgatatcaacaatatactggtcagtacgttactaaaaatcaggggtacgataataatgggatacgtatagggatgacctgcccccacgattag

SEQ ID NO: 199834 - DNA, 312 bp, Klebsiella oxytoca
atgataaaggacagtaaggccgaggagctggaagcgaaggggctgtatcgcagggcagctacacgctggcaggaagtcatgctgttatgcaccgaggacgatgatcgggaatgggtaaagcgccgccgtgaaacgtgtctggagaacgtgaagcgcccgcccgtgaaggctgagaactttggcgacctgcataaagctgtcaccgaaactcagcaccgcatggggatagcgcaaccgaacggtaactcattccggttaaatggcggcaagaagcaacgacaggccaccagcgggggcgatggttcgcagtaa

SEQ ID NO: 199835 - DNA, 579 bp, Klebsiella oxytoca
atgaaaaacgatactgtgatccagttaagtaaaaaaccgctgtggaaaaggaatatagccatccatgaggcaggtcatgcactggctgcgtggttaagtggatcacggcagattcaaatagcactagctgatgagttcagaatagccaggttaagcaacgggcaagaggtggaggactgcgcggccgtatgtaattacacacgcggtacatccgcagttattccgcgactggttatctgtttttccggcgtgatggcggagcacgtgtattcaggcgatgacccggaggaattacttaaaaagggcggcagaggtgatgccagcgatataagcgaaatactgaaggaatgccgggcgagaggatcgacgcagggcgagtgcgatagtctttacaacagagcttacgacatatctttaaagatggtgaagcgttactggtgggaaataatcgcgctcgccaagatgacagaacatgcgagccatgttcccaataataaaataggtatgcttctgaatttattttattcaacaagcggacgtaatttctcctttgatgagaaagaatttaccggtgattaa

SEQ ID NO: 199836 - DNA, 261 bp, Klebsiella oxytoca
atgaatacagtcgccgtaattgaaccagaaacaatcccgacaggtgacgcaacggcagcggtgcgctatgccagtgaattgcttgagttatggaatctttatctggacgggccattacgtgccgccaatccgctttatggcgccagacttgcgacattaatcaccgagttgagatgcgcaaccattagaaccgagcgcaaagttaatcgcctggctgatgagataacgaagatgcgtgagtaccgggagggcagcgcatga

SEQ ID NO: 199837 - DNA, 261 bp, Klebsiella oxytoca; identical to SEQ ID NO: 199836

SEQ ID NO: 199838 - DNA, 837 bp, Klebsiella oxytoca
gtgatactgcgtaaatcagccgtccaagaaggagcctttaatctggctggcctgttagcaaatgttaacccgcagaaccttataaaacctgatattcatcgccgcgccgtagcgacaaattacgacattttagaggcgttttctgggctgagaattgggctgcgaatcctaataaatcctaagtttttttcgcatttcgtgaccagtacgcgcgagaaagttttttctgacaactttacgccagtggaaaattattccgctgtcttgagttttcggagcatttcgcgcccgtctggggagttttcggactgcataaaaaagggcagcgcctacaggtcagaccaccagcgggggaatcagtgttatagtcctaacgttgctgcaaaatcagtaaccgggcgtgagaacctgagcaagcaaaaggcgataccagacgccgaaagcgtctttttttgtatcgtagccacagcgcacctatccaatgcgggaaagatccgcaccttgtctatggtggcgttagtggggctatcttcggataggccggtttccttttgcaccggtattctcacccccgctaacgtcaccgccattttagagcgtgagaactcaggcggtgactccttaaagcaaaaggaggctgccgctatgctggctactacccctacccaaaatccgcaattcatctggctaatcgcagccgttcgccgcgatatgccgacaattaccgccaaaatccatcatattgctgccgaaagcgaacacgaagcccgccgtactctggcgcgggatcacgtctgtttctttgcaggccgtatccgtctggaggtggcagcatga

SEQ ID NO: 199839 - DNA, 174 bp, Klebsiella oxytoca
atgcgtaaccaaaacccccagccgggaagccgttacaaggattcgcacggggctgtagtgaccgttgagcgcgtcgagcataaccgcgtgacgttctaccgcgacggatatcagcacccgtgcgtacagcctattgagcgattcatgaaggaattccgggaggtagcaccgtga

SEQ ID NO: 199840 - DNA, 810 bp, Klebsiella oxytoca
atgactatcgaaaaaagccgattcagttcgggggccgccccgcaacccaacgttaacacgggagtaattaacggcaacgacttcgccgctattgtcccggttattaccgggcagattggcgggcgtgaagccaatattgtgagcgccagagccttgcgtaaggcgctgggggtggggcgagacttcaccacttggattaaagggcgcattagtcagtatggttttgccgctggtgtggattacatcaccgttgaaaatttgagctcacccgtttcggggagcgcaaaaactcgccagcaaatagagcatgattacctgctatcgctggatatggctaaagaagtggcaatggttgagcgtaacgagcaggggcgagctgtgcgccgctatttcatccagtgcgaggaagcgctacagctgagtgcgccggaaatcgccgctcagtatcgccgccagctcaaagcccgtatcggtgccgccaacctgtttaaaccgatgtgcgtagcactggaaagcgcccgcgcagaacagggtaaacagacgcaggctcgccactacagcaacgagagcaacatgatcgcccgtatcgtgctgggtggcatgacggcaaagcagtgggcgcaggcaaatggcattgctggcgaaccacgggacagcatgaacgccgcacagcttgaacacctctcctatctggaaagcaccaatatcacgctaattgagctggggcaggactacgaccagcgcaaagctgaattaatacgactgtctcagcgctggttagcgaaacgtgcgggggtgaaccatgcgtaa

SEQ ID NO: 199841 - DNA, 924 bp, Klebsiella oxytoca
atgagcaaaaaagaagaccacggcagtattaaaatcccacctatggaatactttacgctcgacagggcggccagtattttgcaatgcgatacagatgatttacttcactatggagttattggggctataccgttatgcgtaatgatgaggggttttccctctgccttgatttttgtgggcggcaaagatatacaagacccaatcgagttttacaacgaacacaaaggaaactcatcatttctttttcgtgagaataactacatatctgaatttaattctgtgctcaccgagcatgacgtatacaaaacagatggggggtttattttatttaggggattggcacatgggctatggtgtcttggacatggtgaaatagaaagcctcctttattctaagagggcaacggtgatagatacgacaattttcaggccgttcggatgggatactttccgcgagaagactggcctttcgtgtcatataattagcgatagatattttaatcagagctggctaccgacgctaaacagacaactagccgaaagcgcagggtttcagttaagagagagccgaaagcccgcgattaatgagattttgacaacttccgatctatttattgccagagataccattttaaaactcaaagacgcaatagacacaggcgagccgattaaaagcatgattaacggaggtgttattcccttaccgccgacggaaatgaatgtaggaaaaccagtaaaaacaacagaaaaacagatgagactaattgtcgcattacttaaacgtataggcttaaccgatagtgatttaaaaggaagcattacacaactgagaaataaagctaacaataaaggtgaggagctaccactcccggatgatgataagacgcttattgattggctgcgaaaagggggagtcaaccgataa

SEQ ID NO: 199842 - DNA, 258 bp, Klebsiella oxytoca
atgtttacgatagagaaagaagttgcggttaatcaggtgacggctgatggtattgcggttggcactgcgatgctcaaagttaccctgacatacaccatcgagaggatcgagcttgaaggggcgaacggtatcgctttttacactgttacgtctggcgcggatgctgagggagtaagaaattacatcccatttacctattcaggaagtggcgatccgctgtctgaggccgaggaagcgctaaagttaagagttaaatga

SEQ ID NO: 199843 - DNA, 1656 bp, Klebsiella oxytoca
gtgaaactcacggggaaatattacgtcacaacctttccccacaaagtcacgctgcccggtgatgacggaaccgcttacccgggatgggtggctgcagggaatgatgcaaatattgctgcggaatctgaaaatcatatttatgcggcgattcgactttatcccgactccgttattatcggcgacagtatgcagaactgcgcgttaatcggagactgggattcggatacgcctgtgattaacaataaccagcacattggttattttatttccggtgactcatcagacggttatatccgcccgcagctggttaatcacggtgtgcgcaacttctttatcggtcgctacgggaatggcgttcttgaccggtccactgaagataatttcctcatccgtgattgctgtctgacgggctggtttatgggggccgactccgtttgcaacggtttcgttgtcgcccgtgattgctataccggcgacgcatacggcggggcatggacgcaacgaaatgccgcggtcacgattccgtatctccctccctatccggcggcagagattttcaaagtaggctgggtcgatgccatccggtatacgaaataccatttttatggcaagccacggctgtttggcccggccgatcaggcgattgatacgtggttcgatacgtatatctataaatccgccaactctgcgcgaacctccgcaggcggcaggctgacaaacaacaccgccagcggctattcagcgcgttcgtttcctggcattgcgggccgggcattcaccgttctcagtcgttacggccgtgcggtgaacggggtctgccttgacgatgtgaaagtgctggggacccaccgcgtcccgttctacaccgacgcaggcagttacaacgtgattcacacgtcatacgttgaaaagacctgtctcgttgacaccacaacgacaacgattgccggtaatcagttctataccgactatcaggacccgtggaatgcgacactgacaaaagcgcccgcgatggtttgtgagggtggtatcactgtcgacagaactgtcgtttcggctggcgtggctacacatccgttcagccagaaaccaacaaccatcaacggcccgctcattatcaatccgttccgtgataatacagaggactacacggcctcgcagattgcagagtggaacagcgccgaagggaaaacggtatacctctatgactggcgccgtcagtacagcgtccagcgcccgatacggttttttgataacacacaggaagcattccagtattacaagggtgtctggacgccggttgtcaaatgcggctcagaagtcgtgacgctgaataccaccgtgggaacctaccgccgctcagggcgtttagtgcatgcgactttcagaatcgaaaccacgtcaatggcgctgacgacaggtggcgccgtagtgatatcaggactgccgttcactgtcgcagcgttgagcgatggagggttgaccgtttctccggtcctttgcagtcgtgctgggtcatccacaatactggcgcaaacgaatccgaccacaaaagagattctactgttaaccaatagctcaccgactgttttctcaattacaggcggtacaggtttgacgatttacggctcagttcagtacgttctgacagaataa

SEQ ID NO: 199844 - DNA, 705 bp, Klebsiella oxytoca
atggtacaagatccgcaatcactagcccctttcttcaggcaattcgctctggacaataacaaaaaaaacgccgagtgggggcctggatatcgggaactttttggtcgagttcagcgtgaaaacccagatttcaccgatcaaactatcatggatctttggtatacacgcgacaacagggttgccagtctgcgacaaggcgggatgtcccatgaagaattccttcaaactaaagatgatctccgtgctctcaccagactcattgcctctggttgtacacttgaggtttttgaactggcgcatcaacgcttacagtctcttaaagagcaaggaaagctgaagaagttttaccgagcattgtgcagccgtacatttgcagccttctatccctcgcaaataaccagcattatcaatgagggggccttcttccgtgtttataactactgcaacaaccgcttccaactgaatttgcctaaagatggtgaatggtctccatcaaaatggttcaagcttaatctggcccttaaagaaacatttcatcgttacgttagtaacgaaccagaagatattgaactcaatatgtgcctctggcatctttatgcatctgaaattgaagaagatagtaatagctcagagaacatagaatcttctatctcaagcgatgatgatctgacctgctccccgttgattagtacaccccgatgttag

SEQ ID NO: 199845 - DNA, 204 bp, Klebsiella oxytoca
atggaagatacggtcctctcaaattgtgaaaggctggatgctgagctgagtgatatcgatgccgtattagatatggtatcggtggcgatggcatccccggaggccagtttgcatgtggctcaaactatgcgcctcatttgtatgtcacgtcggatgttgcagcggtgccgggatctcaacaaggttgaaggaagaagccactag

SEQ ID NO: 199846 - DNA, 366 bp, Klebsiella oxytoca
atgaaaaagaagcgatgcacactcaacgggaggaatgccgtggctaaaacccctgcagaacggcaacggcagcgccgtgaacgtttaaagcagtccggcaccaccagacgcgattgggtacttgagccggaggaactgcgcatgctgggcgaaatttgcatccagcgccgcccaggcagaacgccgtattcagaaaatgaagtaatcggcctgttaatccgtaagaactacaaagagcttcagaagagcctggcgaacacatgtcagcgatgtggccaggcgctgccggtgtctgaatgcatcttcgacggcgaaaattcatgcttactgacgactgtcagactaaagctggccattaaggcgtga

SEQ ID NO: 199847 - DNA, 246 bp, Klebsiella oxytoca; identical to SEQ ID NO: 180600

SEQ ID NO: 199848 - DNA, 477 bp, Klebsiella oxytoca
atgacagatatcacccgactgattaacagcattaagcgccgcacgtcctcagcaagagagcttggctacgatgtcctgttcgtggcacttgatgatttggatgtcctggctgattcgctggagacggcgctgcgcgcaaacgccgcccaggccgctcacatcgagcagctgcaggacaagtttaacaaacttgcagcggagaatgtggcgctgaaaagagttccggaaacagacagcgtggcaatgttgcttgctctggattcgttccgcagcgagccattgccggatgtcggtttgcaaaaggcgtttgaaagcttgatgtatcaccggatgactcccgccaccgacgcctacctggccgggattaaggctgatggggtggaggagtgggtttccagcagagatggccgctggaatggcacgacagaagaggtgcttaatttcgccaagcagctgcgcgaaggagggaaagtatga

SEQ ID NO: 199849 - DNA, 609 bp, Klebsiella oxytoca
atgcttacctaccatcaatcaatttttaaaatgattatggcaaattggctgaacagcgatcatgtcatcatcgatactgagaccaccgggcttatggcttctgatgaaattatcgagatcacgataattaatatgcgtggtgagattctgttaaacaccctggtgaagccgagccgccctattccgccagaagttaccaaaattaataacatcaccaacgaaatggtcgctgatgcgccagcatggtgcgatgttttcccggctgcgctgaaaattattcgtaagcataaatggctggcatggaactccagttttgatgcccgcctgatggtgcagacctgcctgcagaccggattttttgatgacctaaagcctcacctcatcacctccatcatcatggccattgagacgcgccacattgacgccaaagcggtttatgaccagtggtatggggagttcgacgagaagcgcaaaaacttcaaaaggcagagcctggctacagcagctgcgcgccacggcattccaaccgctggcgcccatcgcgcgcttgccgattgcctgatgatcctcggcgtgctgaaacaggtttgccagccggaggtcgcatga

SEQ ID NO: 199850 - DNA, 3975 bp, Klebsiella oxytoca
atgaccttacaagaattctatgcggctcgcttcggtagcgatccgtattcattgcttgaagcagcgcgggatgagctgtcagagctggccacaatggctggcattaactgggcagcatgtgctgataacattcagttgaacccgcgcggcggggaagaacgttattcaaaatataacggtggcgcccccgaggctctggaaaagagcctcaaagggcgtgtggaaatctactcccgcaaggaacaacacaaaagcggcatcagctacccattcgtcaactttgtccagaaagggcatgacgaaggttcctggagcggcttctccttcctgttcgccgaataccgccgtgaacaacaaagaaatcatgcgaccgtggtcgcacaacctgctgaagaactggcgcgtattgaacgccaggcagaagcccgcaagcgccgcgccgaacagcaacggataaatgaacttaaaaacaatcagttagagcaggaacgattgctcggatggttggcgttccacagtgcatgggaacatgcgccagctgaggacgggtcgtggccttacgcagtgaaaaaaggcattcgtgacgtattcagcgcttgcgatattcgtcgcgtgaccagtcacgacaacgcaaaatggagccgtggaccgactacatacatggcgattccgctggcccacctggacggacgcaaagacggacaaattgtcggctggcagcgtatcgaccagcgcggcggtaaattccagaccagcgcgatcaccagtggtgatttcgtcggggcgtgctttgttatcggcaacctgaacggcgcgcaaaatattgcagtggtggaaggtttcgccaccggcgcgtccgtatggctggctacccgtaaggacccgaaaaaaagctttgatgctgtcgtggtcgcagtggccgcaaacaacatgacccatgttgttgagcagctggtgaatatgtacccggcagcaaaaattacctgcgccctggataacgaccgcaaatcatcggctgaaggtaaaggcaacacaggcctgcgcaccggatacgacatcatggagaagttttccggcgtcaaatgtgtttacccaacttttgaggatgaccctgagcaggaatgcagcgattttaacgacctgcacagcttgagagggctgaaggaagtcgctcgccagttaacgagaaataatctgagccgtgcaaccgacctgttgtcgattacgctgaataaactgcgtactctcccgcggctgaacagacgtacttttgccaaagagctgcttcgcgccgtcgatattggcatgctgacatgcccggtaccaaacagcccgaaagaacttatgcgcctgttcagcagcacgctgcgagatatggggatcgcagaaatttataacggtaccgttaaagatcacattacgcgccggttgaatcgcaaatgccgtgccgcgcaaacatcacgttcgttcagtgaacgcatcaccaacccgaaccttcgcccgtcacacatcacttacaaacggtttgaaacctccaggatgactgatgaggttatgacatacgccgcacagctgcagggcatcgttattgtccgcgccgggatgggctctggtaaatcgacaggtctcctgcgtccactgatgctgcagtccacgcgtggcgtttccgtcgcgcaccgcgtatcccttataggcggcctgcatgaaatgatgaccgaagggaaaggcgctaaagccgacattctgcattatcaggatcccggctatcaggaaatggcgccatatgccaacaagctgactatttgcatcaactccatacttaaaggctgctggcaaccgctgatgcgccagcatgacttcttcggcttcgatgaagcaacacagggcctgcgtgccattctggccgggcgtgcgatggaaaacccggtaggcgtattcaacacgcttatcgacgcgctagcgcgtactgaagagcatgccattatggtggatgccgacgccaacgatctgcttgtcgaccttgctgaactggcgatgaagcgacgcgaggagctgggcctacctgcctggctgcaaattcacgtgattgaactcccggtcgacgttcgcaaccgcgaaaccaacaagcctatccgcgtattttataccgagaaaaatcggatcatgaccgaggtcatcgctgcagtgcaacgcggcgaacgaatcatgctggccaccgacagttcgacgttcgccgaagacgttaccatgcagctgagactccatttccctgacaaaaagtttctctgcgttaaccagaaaaacaaacaggagaaggaagtcgacgatttcaccaaccagcctaaagtgatggtgaaaaaatatgacggcctcatctacagcccgtcgatatcttcaggtgtatcgattgaggagaaacacttccaccgccatttcggcatgttctgcggcgaagtggtccccagcgacgccatccagatgctgcgccgcgaccgtacagctcaggaatacatcatcggtttcgacaagcttcgcggtaaacgtgaaaccgatccggaaaaaatcaaacgcgcctacgcgcaggccttgctcgaaacggctggccactccgggctgctgacagacgttgtctttgacggtgaccgaatttcactcggtgtggctaactcttcattcatgcagctcaaaattaaagccgccgcgctcgaggcgtcggccagaaatgattatgccagcaacatgatttgcatcatgcatgatgatggctatcaggtcgcgcctatggctaccgacgcgcttgcaaacagcatcggtaaggatttacgtaaagaagcccgtgagctggtctttgagcagcttatggaacgccacctgagtgtcgatacccctgaccaaggcgaacacgatgagttgataaaaaaacgcaccctgtctctggatgagcaggcccagctggtccgctgggacatcgaaaaggagctgcagctggatgtcgacgaggaggcgttaaaattctatttcgacggcggcctgaaaaaagtgcgtctgtttgaaaccatgcagctggatgagataaccgcgcgtcgccttgaccgcgaggaagcgttgatccactttacctacgcttatcgcgtcgccggtcgctggcagcaatttgtcacaacagctatgacacgagaacaggccgacgaggagttccacgctaaattcccggccataaccgattaccgcgtcaaatctacaccagcggttgaaataggcatgcgtggtttttacactctcaaatcagcaacgctgcgacagtacttccgcgactgtggtattgatccagaaacactgaccggtgaggccgacatggacgccctcaaacgcgccagggataacctgctaaccccggaacggcgcgatctgctgaacaacgttttgcgcataggtggcttcaacacagagaagggcaaaaagaaagcccctgaagaactatgcaaaggcatcctggagtctatggggttatccagtaagaccagacgcgccagagatggtgatgctcgacctacaatgcgttctatcgactcacagtcggtcgagttcctcatgaatattgtggagaagcgccgcgaagcagggttatcaattcacgcccgcaaggtcgaaaaaaccaccatcgaagtggatcgcgatctggatctaaatatagatatacatggtaaccctcgatccaaaacaagccacattccggacaccccgcaatcagtaattattcaggcactggaggctatcccggtgacggtgccggaagcgtgggcggagaacgcgttgccagcaaccgaaatggaggcggtacgcctgtggccagtggccagcatcgcgagaacgttcgcctcgctgtacatgaccgaatttatggacctgctatcagtacgcgagataaggctgctgaaagcttttctgagccagcggcaagccgtggcgatataa

SEQ ID NO: 199851 - DNA, 249 bp, Klebsiella oxytoca
atgggaaaacaacgggaatgccttgtcctcgtggagggatatgacccttatgtggtcaaggtcagccacgacgcgacaagctatagcgattataaaaccggccgggaacttccattcacgataattcggatgaacgggttctcagatagtgagggcgtttattgctgcattgccagcgataagagcatggaagacagcacagacgaagccagggcgcttctaaaagcctacaaggtagaacccctatga

SEQ ID NO: 199852 - DNA, 330 bp, Klebsiella oxytoca
atgacgtcaacacctgagtttttgaacaagctggactacagacagcttcagttctgccgtgatgagtgcgaggccagaatcagggccatagaggaagaagagaaaaaggtagcctgggcggttactgatggccaaattaattatggttggtatcgaacagaggactacctgaaagctgtcgaatgtttagcacgtgaagcagatgagcgctggaaagaagaagataaaagcaaccctgaaccgcgcaattggttgaatttttgtatcagggggcagcggctgccagtgtctgagtatgaagcgttatttgccgatggccagtgggggtga

SEQ ID NO: 199853 - DNA, 339 bp, Klebsiella oxytoca
gtgatagtggtgtatgacttacaaaaaatgatggacggtgagctggtccgtttacaacttgagattaagaaagaacaggataggcgtttagctgaaaagatgattcctgtttttggggtgaaaaccagcccggcaaatcagtacgaatttgctgatccggcgcaggcgatttcctgtgctgcgggattgctggataaggtactcgacgaagttagggatgacatctctaaaggtggattacaggggtggaacggtgatttgctacgtatctatgttcagcatgtaagcgagagtgattttgctatattgcagcctcatttgagggataaaaaatcatga

SEQ ID NO: 199854 - DNA, 336 bp, Klebsiella oxytoca
atgatttatcgcagaggatgggtgccggtgcttcatcgttatcagctggaaaagaagctgaaggatgaaggtttcgacaattacgaagaaatcaccagtttcttatgtggaggccgcctggaggatgagcgtagccattttgcctatcaagtcgtcgataacaccgaatgggtagaacgccgtgacgcgacgttctggcagcgtctgaaccgactgtggttcgtgccgctgtatctgttaacaattccgttccagtggcttatccgtgggcgtatggggtttgaaacgacatctaaaacaggcgcattcttcagccggttaaccggtttgaagtag

SEQ ID NO: 199855 - DNA, 228 bp, Klebsiella oxytoca
atgccacacagcaatggcaatgaaggtacccgtttggtctggtcagtagtaaccggggaaaagaccggaggcgaggagcctcattttgattatcctaccgccctgcaggcgcttatcattgaggcgcagagttacttgcaggagatacagaaaaatcctcagctggagccgcgtccaattggtcttttttgcgaaaaaataccagatgaggaatttttaggtcgttga

SEQ ID NO: 199856 - DNA, 783 bp, Klebsiella oxytoca
atgaacgcactatctgttttctcgtttcaggaaaaccaccccgttcgggtggttctggttaatggcgaaccgtggtttgtggctaaagatatctgtgatgcattgaaactagtgaactcacgaaaagcattgtcatcgcttgatgatgatgaaaaaaataccgtaactttaagtgacggtaatcgtgggaatcctaacatgtccattatttctgagtctggcctgtacactctgatcctccgctgccgcgatgcggtgaagcagggaacgacggcctggcggttccgcaagtgggtcaccaacgaggttctgccagctattcggaaaagcggtgaatacagctacgtcgaacccgcgccaaaaagcgccggtgaaccattggactggcggcaaaaggaagaattacgcggcctgataaacgatatagcccaaagttttcggtaccacaacgcatggaaaagtggtgtatggctggcgctacgtcgcgcctgcaggaatccatcccccaatccgattacggttgacgatctcccggccatcactgccgagttgcgccggatattaacgtcggcagaaaccgcgctggacaatatgcggacctacgagcgggaatttttgcgtgaggtggttcgtggggcgcgtcggagtgtgtcgcgagaggaattatcaatcatcgaccttggctcagaggtggagaaggtgctgccagcgcatttcgagctggccatcaataaactggaggccttatccacaaaattagaggctcctgccgtctcttcctga

SEQ ID NO: 199857 - DNA, 1923 bp, Klebsiella oxytoca
atgcgtaaggtgaagattggtgagctaatcaattcgcttgtgaacgaggttgaggctatcgacgcctcggatcgtccacaaggcgaaaaaacaaagaaaattaaagccgcagctataaaatataagaatgcattatttaatgataaaagaaagtttcgcggaaaaagcttagagaaaagaatttcggctaatactttcaatgcctatatgagccgggcaaggaaaagatttgatgataaattacatcataactttgaaaaaaacgtaataaaattatccgaaaagtatccattatacaatgaggaattatcctcatggctttctatgcctgcggcatcaattcgacaaaatatgtcagctctgcaagccaagctaaaagaaataatgccattggcagaagatttatcaaatataaaaatcggtgcgaaaaacagcgatgcaaaattagccaaacttgccaataaatatccagaatggcaatttgctattagtgatttaaacagtgatgattggaaagaaaagcgagattatctttataaactcttccagcaaggctcttcgcttctggaagatttaaacaatctgaaagtaaaccatgaggtcctctatcacttgcagcttagctctgcagagcgaacctccatccagcagcgctgggccaacatactcagcgagaaaaagcgcaacgtggttgtgattgactatccgcgctatatgcaggctatctacgatataatcaataaacctatatcttcgtttgatttaaccacccgtcgaggtatggcccctctggcgttcgcgcttgcggcgctatctggtcgacgaatgattgaaatcatgcttcagggtgaattttccgtcgcaggtaaatatacagtaacattcttagggcaagctaaaaaacgctcagaagataaaggtgtatcaagaaaaatatatactctttgcgacgctgatttatttgtgagtctggttaaccaacttcgctcctgccctgctgctgcggattttgatgaagtggttaaagggtatggggaaaatgatactcgctctgaaaatggtcgtattaacgctattctagcgacagcgtttaatccgtgggtaaaaaaattcttaggcgatgaccgccgcgtttataaagatagccgcgctatttacgcccgcattgcctatgaaatgtttttccgcgttgacccacggtggaagaatgtcgatgaggacgttttcttcatggagattctcggtcatgacgatgaaaacacccagctgcactataagcagtttaaactggcaaacttctccagaacctggcgtccacatgttggcgaggaaaatacccggctggcagcgctgcaaaagctggatagcatgatgccagatttcgccaaaggcgacgccggggttcgtattcatgaaaccgtgaagcagctggtggagcaggacccatcgataaagatcacaaacagtaccctgcgaccatttaacttcagtaccaggctgattcctcgctacctggagtttgccgccgatgcattgggccagttcgtcggtgaaaatgggcagtggcaactgaaggacgaggcgcctgcaatagtcctgcctgatgaagaaattcttgagcccatcgacgacgccgatctcgatgacggagaccaggaagatgaaacgctggatgacgatgagatcgaagtagacgaaagcgaaggagaggaactggaggaagtggacgacgctgaagaggccgaggaggctgagcaggaagagaaacatcctgccaagccaaactttaaagcgccgagggataatggcgatggtacctacatggtggagtttgaattcgatggccgtcattacgcctggtctggtgccgccggtaatcgggtagaggcaatgcaatctgcctggagtgcctacttcaagtga

SEQ ID NO: 199858 - DNA, 783 bp, Klebsiella oxytoca; identical to SEQ ID NO: 199856

SEQ ID NO: 199859 - DNA, 231 bp, Klebsiella oxytoca
atgaatcaggtgcagttaaacacccagggcctgcttgaatcgattgaggagcgcctagcgcagatagaagcgctggtttcctccgcccatcggacgatctccagttacgaggcctcactgcatatgcaggaggcggcagaattactccaggttgcccgtgagctggtacaagaggcccgaagctgttcttcctctctgtcagcgcagctgaccgccagggaggccaaatga

SEQ ID NO: 199860 - DNA, 165 bp, Klebsiella oxytoca
atgttcaaattcaggttcgcggcgatctgccgtaccgataaaaaatcccatatccatcatctgtccactatcgcctcatccgagcacgaagcccgtcgccagttcgccagccgttttgttctcgttctgtcagcccgtatccgggttagcggggtggccgcatga

SEQ ID NO: 199861 - DNA, 228 bp, Klebsiella oxytoca; identical to SEQ ID NO: 199855

SEQ ID NO: 199862 - DNA, 336 bp, Klebsiella oxytoca; identical to SEQ ID NO: 199854

SEQ ID NO: 199863 - DNA, 339 bp, Klebsiella oxytoca; identical to SEQ ID NO: 199853

SEQ ID NO: 199864 - DNA, 330 bp, Klebsiella oxytoca; identical to SEQ ID NO: 199852

SEQ ID NO: 199865 - DNA, 249 bp, Klebsiella oxytoca; identical to SEQ ID NO: 199851

SEQ ID NO: 199866 - DNA, 3975 bp, Klebsiella oxytoca; identical to SEQ ID NO: 199850

SEQ ID NO: 199867 - DNA, 609 bp, Klebsiella oxytoca
atgattgatcgtatgaaaacacgaggcgaacgactgaaagcacgccgtttagaattgaagatgacactgaagcaagtcgcgcaaagtgtcggtatctctcttcctggcgtccaaaacttagaacgtggcgacgttatgccgtcgctggagatcgggcttgccctggcgaaatgcctgcgcaaacctgtgcaatggatactttttggtactgaatctgatcctgaccgcgttcctgttattggcacaacagagagtggtccggatagcgactggcagccaggagaacctaccaacacagaacgattcctgccatttgttagccaacgggaaaccgtttatgcgctcactgtcgggaaccaggttcagcacagctatcagccgggtgacgtcgtcctggttgactcagctctcacgccagttccgggtgaggatgtgttagtttgtgataaagacgggaaaatctcgatacagcggttagcgcgcttcgacgatgagcgctactacttagatggcgttaactctcaacgagttatccatgagaaaagtgatcttcaatttgtgcaccaaatagtcggtacgatcaaatcgttcatgatagagggtagatga

SEQ ID NO: 199868 - DNA, 738 bp, Klebsiella oxytoca
atggaacttgaacgaatccgcgcttgtgtggccacggccctttcagatctgcattacctccagcgcggaattttagaagttcagcttgagcagttacgtcttgccaactccggcaggtttactgataagccaacccgggtcattcaaatgggcgagaataataaatacgagatctcggtcgcggctgagcaggttcgttaccatgttgggaaaacgtttaagcaatcctcaatgctgctgactgaacttgattttcagacggctagttggcgcagagccattgagcagttaaatcgtgaggaaattgcctggctgcattattgctatggctgtaagcctaattttgaaaatgatgaagttatatgccagtggctatggctggattttcttatcgctcattcaaagcctgatttcaaaaaaatgaaagaggcgacaaagaaaaagatgcgaaatttaacttattacgctatccagcgggttaaagcatcaatattacgtggagagtatatggacccactgcgtgaggatgagcatatgagtcttttgcttaatatcaccgtcgatagctggcgtaaggattataaaaaacgctggctattaatgaaatcacgatgcctgcatctgaatagcatcgcgttatttaacgcagcggagaagcgcagtgaaatcatcaaccgccattgtacaggaagtgccaacgtgcctgtgccagcagattatgcacaggaagcccggtaa

SEQ ID NO: 199869 - DNA, 135 bp, Klebsiella oxytoca
atgaactctgaactattcaactacagcctgaaaacgctacaggtgctgaacgttgtcgcagatttggttttatcagtggcgctgtttggctttgggtacggccttcttaacttgcttgagtggtggcttgcatga

SEQ ID NO: 199870 - DNA, 477 bp, Klebsiella oxytoca; identical to SEQ ID NO: 199848

SEQ ID NO: 199871 - DNA, 174 bp, Klebsiella oxytoca
atgtatcagttcaaattcgcggcgatctgtcggaccgaccgtaaaaacaacattcatcatttttcgactattgctgatagtgagcatgcagcgcgccgccagctttcctacaagttcgttctgtttttccaggcacgcctaccagtatcgggaggtgcaatatggatcaaatga

SEQ ID NO: 199872 - DNA, 225 bp, Klebsiella oxytoca
atggatcaaatgaaaatgaacgaacatggactagctgaatcgctagaatctgtactctgtcagatagttgctttgctaaatattacccagaatgcacttgatggaagtgaaagtagcatctatgtgcgagatgctgtgcaaatgctaagtgctgcacgtaatctggctattgaagcagagcaataccgagccgaatgggaacagctaaccctcggtaataggtag

SEQ ID NO: 199873 - DNA, 1209 bp, Klebsiella oxytoca
atgctgaagcgacaggccttcaaattccagctaagaccaaatggtcagcaggagcgcgatatgcggcgcttcgcaggggcttgtcgcttcgtttttaaccgcgcgctggcatttcagaatgagaaccgtgaagccggaaacaaatatattccctataccaaaatggcttcatggctcattgagtggaaatcagcgcctgaaacacaatggttgaaagaatctccctcacagccgttgcagcagtcactgaaagatctggagcgcggctacaagaacttcttccagaaacgcgcagcgttcccccgcttcaaaaaacgagaccaaagcgatgcatttcgctacccgcagggcgtaaagctcgatcaaaccaatagtcgtatattgctgccaaagttagggtggatacgctaccgcaacagtcgtgaagtcactggcgaagtgaaaaatgtcacggtcagccagtcatgcggtaaatggtacgtcagtatccagacggaatacgaagtgactgctcccgctcaccatgcaaagtcaatggtcgggttggatgccggagtcacgaaacttgccacactatcagatggcacggtatatcagcccgtcaacagctttaaagtaagccagcgaaagctggcagtgctccagcgacaattaagccgcaaagtaaaattcagcgcaaactggcagaaacagaagaaaaaaatccagcgtctgcactcgcacattgccaatatccggcgcgactaccttcacaaagtcaccagtgaaatcagcaaaaaccacgcgatgatcgtcattgaggacttgaaggtcagtaacatgtcgaaatcggcaaaaggtacggcagagcggcacggacgaaacgtcagagccaaatcaggcttaaaccgttcgatactggatcagggctggtacgaaatgcgccgtcagcttgagtacaagcagctctggcgcggtggtcaggtactggcgataccacctgcctataccagtcagcggtgtgcctgctgtggtcatacggcgaaagaaaaccgtcaaacgcaaagtaaattcgtgtgtcaggtatgcggctacaccgagaacgccgatatcaacggagcacgtaacattttagcggcaggacatgccgtgcttgcctgtggagggatggtgcagtcaggccgctcgtcgaagcaggaacccaccgaaatgattcaggcgagagcctga

SEQ ID NO: 199874 - DNA, 1077 bp, Klebsiella oxytoca
atgcctgatcgctcaagtaatccgcccaatgcatatcaacaactcaataatcctggcgcagcaatcactcagctgaccagagacattgctgagaacaatgcaaacgcgacccagaagagtatttccagcattggtaccctggcctcaggacccgtattagagctttctgatagtgctcaggatgtgctgtatgctctttttttccgaggtgcactcgtatctggtgatattccttcaaaagccggcgcctccgcactgcgttctctgggatttgccgagaccggccatacagccacgccatacaaaggggaagactatttcacctggctgactcctgcggggtatgcgttcgctattgggtatctggttaaaactcgcttcggcaaacagcctgcaaatgcaaaatcttccgggcagccctcggttcatccggaaggattaagcattaacaaagccatgattaaagggaagatcagtagcgcagcctatgtttgcggcaataccatcgaggaggaaacgctgtcgaaggttctggccaattcactgcataacgttccccatgagaaagctggcgatgttgctgaactactggccagggccgttaagtctgcgtttagtgcgctggggcatgcatccggtgaacaggaaaaggaacggcctaaagaatcggacttatccgtcggtactttcaaagtttatagcgagggagaggtgaaggtggcttcaggctctcccttagctgctgaaatagaagccgggcgtgaagatcgcaaaacagcagggaccattaatttaaaactggagctggatacctctgatgccatcgaaagcattaatgggctgagcaaagaaatttcagatcttgttgatactgcaattgccaactcgctcaaaccgggtggacgtctgtacaacgtcgtgcgggaatcttcgtttaacagctcgaatactaccgcccttaactcccgtgtgactgatcttgaatcttgtctcaacagcgcatgtgttttgattagtgatttgtcttgccgtatttcagaacgtatcactggtgacgtacatgccagcccggtctaa

SEQ ID NO: 199875 - DNA, 285 bp, Klebsiella oxytoca; identical to SEQ ID NO: 180585

SEQ ID NO: 199876 - DNA, 432 bp, Klebsiella oxytoca; identical to SEQ ID NO: 180584

SEQ ID NO: 199877 - DNA, 423 bp, Klebsiella oxytoca
atgcgatcacctggtggcggacgcaaatcgaataacactggaaatcaggttagttctttaaccagagcggtttctccgccggatgaattactgggcgatatggctatcgatgcctggaaacggacgtgcaaaattcttattaaccgtggcacgttcgaaatggaagattgttatttgctgatggaatactgcaacaccgtgcagctgctgtacgacgccaaccaggaaattaaaagcgatggccttggtgatgataccgctgccggcggtcagaaacttggtgcggcagtgaaggcgcgtagccgttatatcagcgaattaattcgactctccgttgtgttaaagctggaccccaatagccgcatcctgaagaaacagcccggagataatgacaaatccagcggtgagttcgacgagttttaa

SEQ ID NO: 199878 - DNA, 1710 bp, Klebsiella oxytoca
atggccgcatatccaaacgtcaatgtggcgaacaaatatgcgcgggatatcatagacgggaaaatagtcgcctgcagagctattcggctggcatgtcagcgccattttgacgatttaaaaaaatcactcgataacaattacccttaccggttcgacagagatttagctgagcgggcctgccggtttgttcagaaattaccgcactctagtggcgatttggcggggcagaaattaaaactggaaccttggcaaagttttattttttgttcgatttttggctgggtcacgaaaaaggataaaaaacgccgatttcgcgaagcgtatatccgggtagccaggaaaaacgggaaatcgttttttgctgccgggattggcacctacatgttttgcgctgatggcgaaaacagcgcagaagtgtattgcggtgcgacaactatggcgcaggcgaaaaaggtcttcaccccagccaggcagatggccagccgcctgccggcacttcgctccagatttgatatttcggtatggaccgacagcctgacacgcccggatggttccgttttcgcacctatggcggggaaacccggcgatggtgacagcccacattgcgcgatcattgacgagtatcacgaacacgatacggatcatatgtacgaggccatgacaatggggatgggcgcccgttcgcagccgttaacgctcattatcacgacagccggctcgtcactggagtccccttgctatgacaaggacaaggaagtcaaagaggttatcgaaggcataacccgtaatgatcgcctgtttggcatgatttacgaactggatgctggcgatgactggaccgacccgaaaaacttaatcaaagctaacccaaatctggacgtttcggttaagtacagcgacctggttgagcttctggaagtagcgaaacaggttcctcgcaaggttaacgccttcaaaaccaaacgcctcaatatttgggtatccggtaaatccgcgttctacaacatggagcagtggaaggctgctgaagaccccgaccttgagctggctgattttgcgaatgacagctgcaacatcggtctcgatctcgccaaaaagctggatatgaacgccggaatacgactatttacgcgggaaattgaaggtaaacggcattattactgcatcaaacctaaattttgggtcccggaagacactatccatacaaccgatccaaaactgctgaaaactgctgacaggtatcagaagttttatgaaatgggcgtgctggaagcgacggatggcgcagaggcagactatcgcgagattctggccagtattatcgatatgcaggacgaaaaccgcattgacgagattgatatcgaccctgcaggcgcaacagcacttcgccaccagttggaggacaacggatttaccgtagtcgatatccggcaggattacaccaatatgtcaccggcgatgaaagagcttgaagcggctctggccggtggtcgattccaccatgatggcaatcccattctgacctggtgtatcagcaacgttatcgggaaatttatacccggtagcgatgatctcgttcgcccgacaaagggagacaatcaaagcaaaatcgatggagctacagcgttatttaacgccatgactcgcgcaatgctgcacgaaagcagcggcggcacatcggtatatgatgaggaagacatagcgtgttaa

SEQ ID NO: 199879 - DNA, 255 bp, Klebsiella oxytoca; identical to SEQ ID NO: 178776

SEQ ID NO: 199880 - DNA, 2502 bp, Klebsiella oxytoca
atgaaaaaaagcagaccaccagctttttacctgcgacgtctgggtatttacattgctattgccattttgggttctacatcaccggtagtggcggtagaatttaatattgatattctggactcggaagaccgggaaaatatcgacttatcgcgcttttcccaggccggctatattatgcccggaacctatacgctcagcatgcgtttaaatgagcacggtatttctgaccaggaaatttcttttattgaaagaacccgtgacgatgaggtggttgtagaaacctgtctgacgcctgcgcaggtcgaacttctcggtctgcgggatgacgcgctcaacatgattaagtggctcgacgaggggcgttgcgctgatttttccgctcttgaaggcgtcgtcctgcgcggcgatctgtcagaatcttccctgcaaattgcggtcccccaggcctggctggaatatcaggatgcttcgtggctgcctgtttcccgctgggaagagggcatccccgggatgttggttgactataacctgaataccaacgtcacctggcctcgtcagggtaatcagagccagagtgccagtatcagcggtacaacaggtgttaacctgggtgcctggcgcctgaggggggattatcaggggagctattacaatacgaccggacgcgcggataaaaattcacgtaattttgactggagtcgtttctacgcctatcgcgcattacctggaatgatgtcaaaactcaccgtcggtgaagactacctctcttccgacctctttgactcatggcgctataccggtttgtcgctggcgagcgatgaaagccagctgccacctaagcttcggggctacgcgcctgaagtatccggtattgcccgtaccaatgccaaagtaacggtcagccaacagggcagagtcatctacgaaacgacggttgccgctggcccgtttcgtattcaggaactcaacagcgcgctgaccggacgcctggatgtgcgggttgaagagcaggatggatccgtacagaaattcgcggttgaaacggctcaggtcccttatctgacgcgtcccggccagctgcgctataaaatgaccaccggtcgcccgcgcgattataaccacagcacccaggggccatactttgctacaggcgaactctcatggggtcttactaatgcgtggtcgctgtacggcggtggcattttttcccaggactacaacagtctggcgttgggcgcaggtcgtgatatgaacgccttcgggaccctctctgctgacgttactcatgccagcgcgcgtttcccggatgataaaaacaggcaaggacggtcctggcgcctgagttattccaagcggtttgatgaaatcaacagcgaagtgacatttgctggttaccgtttttccgagcgcaactatctcaccatgggtgaatatctggatatgcgctatcgggaaggctacgtcgggaacagcaaagagctttataccatccaggctaccaagaactttgccgacctgcgcctgtcgacgcacatcaactggtcgcatcagacttactggaaccgcccggcgacagatcgctacagcgtgtcgttgaataaatattttgacctcggcgactggcggcatctgtcgttgtccctcaacgccgttcgcagtgagttcaatggccgtaaggacgatagcgcctatatctcactgacgatgccgtttggttcgggaaccgtgggttataacggcagcataagccgcgaccgctatacacaaaatgccagctggagccaaaggctggataacaacgactattacagcatcaacgctggcaacagcgtcggcggcggggaaggaactcgcagccagatgagcgggtactactcgcacctgggcaatatggcggatgtcaccaccaactttaactgggcgcagagccagtactcctcgtttggtatttccgccagcggcggtttgaccgcgaccgctgaaggcgtggcgctgcaccctggtggggtacagggggggactcgtctgatggtcagtactgatggggtaagcggtgttccggtgggctttcagggccataccaatgcttttggcatcgcggtaatccctggggtgccaaattactatcgaacccgcgctgagattgacgttaatcgtctgccagacgatgtcgagtctggcggaacgccggttgttgaactcgccctgactgaaggggccatcgggttccgtcgttttgatgtgctgaaaggctctaaggtcgtggccatcctcagccaggaagatgggcgccatccgccattcggcgccacggtacataacgcaaaagatcgcgaactggggatggtcagcgacagcggactggcctggttgaccggcgtgaatccggatgaacgcttaaccgtgcactggagtggttccgctcagtgtgaagtcgtactgccacgggttatccctgcacagcagctattgctgccgtgcaagccggtcactcgcggctga

SEQ ID NO: 199881 - DNA, 1146 bp, Klebsiella oxytoca; identical to SEQ ID NO: 199776

SEQ ID NO: 199882 - DNA, 132 bp, Klebsiella oxytoca
atgactctgatgactctgatgactctgatgactctgatgactctgatgactctgatgactctgatgactctgatgactctgatgactctgatgattctgatgattctgacagctccgatgattcttctttaa

SEQ ID NO: 199883 - DNA, 267 bp, Klebsiella oxytoca
ttgggaagaaatgacctgcttattcgcaccttccctaaggaaaagctggcagagctgatcaagaaactcgcgctgacggaaaaggatattcagattcacattcgcagcggcaacattcgcgatgaagtgaccaaactggccgatgaactgaaagcggatgtggtgatcatcggttcgcgcaacccgaatattcagacgcatctgctggggtcggaggcggcaggaatcgttcgctatgcccatgttccggtttttgtggtgcgttaa

SEQ ID NO: 199884 - DNA, 231 bp, Klebsiella oxytoca; identical to SEQ ID NO: 129443

SEQ ID NO: 199885 - DNA, 1500 bp, Klebsiella oxytoca
atggcgatgtatgaagtcggtaccgtcacgggtgccgcgtcgcaggcacgggtgacaggtgcgacaacaaaatggtcacaggaggcgctggggatactgcccgggtcgattctagtggtctaccgcagcggtagtgctgacctgtatgcgatcaaatctgtggacagcgacacgcaactgacgctgacccggaatatcaccaccgcattttccggtgccagttacggcattattaccgctgaaaccgccagcacctcgtcgtttgctaaccagctggccagcgcgtttgcattctggcgtagtgtggtggagggctggtcgatggccctgaccggcagcggcgatatcaccctgactgacccgatcaccggaaagcaggtgaccgtgccggcgatagccgggatggcgaaggcatcagatcttaacgcgctggcaaaactcaccggaggaaacaaactcgacggctcgcaggttataaccagcgataatgccggttttattctcggtaagaactcagatctggctctgctcaaaaaacaggggcaaggcgggacaattgccgttggctcgggaacaccgttcagggttcagcgttcaagagcgaccactgtatcaccggcagacacctttgatgacatcctcgttattgatgccaataaccaaacgacactgcctggcgcgctgtctgccggcggcaatatcgataacacgtcgaagggtaaagtgttgacgcaggcgattgagctctcatttagcacgccatacatcgactttcattttaactacagcaccgacgacttcaccgggcggattatggccactgccgccgatcaaattagtgtgcaaggtagtcattggcgagttgacagggatcttcgtgttggtggcatggcagatattggaggctggacgcaatgccgcgacgacctttcggccaacaaaacagactttggatcccctgctattggttcgttggtttcaggcggaaggattcgatctcgaatgctcgggcgcggcggtaacgttgacacctccggggcgtggggcggtttctatcttgaagagtacgtgggaaccgaacacaggattgtcatgtatatggacggcttcgggagaacggacgcatggtcattccgcgcaggggggacaatctctacacctaaaggcgacgtcctgaccactggttccgacgtgcgcctgaaaacagacttcacacaagcgtctgaaaacgcctcagagcgcattgagcgcttaggggtgtgtgagtaccggatgaagggggaaacgcgccggaggcgtggttttatcgctcagcaggctgaaaaagctgatgatctgtatactttcctcggcatcgagcaggagattgatggcgaaaaattcaaggtgatgaatgtggattacacggcaatcattgctgacctggttacggtggcgcagggtttactggttaaaaatcaggaactggaaaggcgtatatctgtactggaggggatctga

SEQ ID NO: 199886 - DNA, 1164 bp, Klebsiella oxytoca
atgtcgcttattaatttactgcatgaatgtatcagccgcgggcaggagatgacgcaggccattgctatagctcaatttggtgatgatagccccgaggctcgccgtatcactcgtcgctgggggataaccgaggttgctgatttaatcggcgtttcgccgcaagcaattagggatgctgaaaaaaatgggcgactaccaccacctgattttgagttacgcggtcgcgttgaacgtcgcgccggctataccatcgaccagattagccatatgcgcagcattttcggcaatccgaatcaacggcctgcagacaaaaatccagctgtgttagctgttatgtcgcacaaaggcggcgtttataaaacctcatctgcagtgcatgaagctcaatggttagctctgcaaggtcaccgagtgctactcattgaaggtaacgatccgcaagggaccgcctcgatgtatcacggctatgtaccggatttacacatccatgccgaggatactttgctcccgttttaccttggtgagcgtgataatgcggaatacgctataaaaccgacctgctggccaggtctggacattatccccagctgcctggcgctgcaccgtatcgaaacggatctgatgcaataccatgcccaaggaaaactacctcatcctccgcatctgatgctacgggccgctatcgaatccgtatgggataactatgacatcatcgtcattgatagcgctccaaacttagggacaggtacgattaatgttgtttgcgcagccgatattatcgtcgtggctacccctgcagagctatttgattattcatccgttctgcagttcttcaccatgcttctggaccttcttaaaaccgttgatttaggtggttttgagcctgttgtacggctgttactaacgaaatacagtctgaccactggcaatcaatcgcgctggatggaagagcaaatcagaaatacatggggatcgatggtcctgcgtcaggttgtccgagtgacggatgaggtaggaaagggccaaataaaaatgcgcacagtatttgaacaggccgcgaaccagcgttcaacgcttaatgcatggcgaaatgcagtctctatttgggagcctgtttgccaagaaattttcgatgacttgattaaacctcgttgggaggactaa

SEQ ID NO: 199887 - DNA, 966 bp, Klebsiella oxytoca
gtgaaacagcgctctattttaaaaaatgcccccaacatcgacagcattatgagcaagacgcaccaggcgcccgcatcacagcctgtgtcaccgatggtgggtgatttgcaacgccagcttagttcattatcgggaaacagtattatgctgcctgtgtgtggacgtaacgttaactttaagctggaaactatcccagcggataaagttgaaatggcgacgatggtttggctcggtaatgaacgtgatcaagacctgctcaacgaaacgtccttggccgatctcgttccgtcattcctcacttcggggcagcagaacccggcgttcgctcgcaaaactgcaggcatcatagaggttgctgatggttctcggcgccgaaaaacagccatcattacaggttgcgattatcgcgtattagtcggtgatctcgatgacgaacaaatgcagtggctctctcaaatcggcaacgattatcgaccaacaagcgcatatgagcgggggaaaaaatatcagcgccgcctgaaagattttgacggcagcgtaaaagctttagctgaagcagaaggggtggaccgcaatatcataacccgctgcatcaacacagctggcctgcctaaagatatcatcgccatttttcaacatcctggtgagctatcagcccgtgcggggcatgacttgttcaagatatatcagggaaacgagaaagctatgctcgatgcggcgcagcagctgctacgcatgaagaagcagggtgaaaagttcgaacctatgcggatcatccaggcattacaggattttattaagaccaatgcaaaagatacacaaaagaccgaaaaagcatatggtgaaggggttgttgcgaaatataacggtaattacattaccttaaaatttgataaccggaagattccatccagcttaatgaaaaaaattgaggcgttgcttgagtcagagttagaaaaaaaataa

SEQ ID NO: 199888 - DNA, 1500 bp, Klebsiella oxytoca; identical to SEQ ID NO: 199885

SEQ ID NO: 199889 - DNA, 735 bp, Klebsiella oxytoca
atgatcctctacgccgaccgcttctcgctgtttaaccgtaacaatgcgacggcagtgccggtgatgattgccgaaggcaatgaactgtatatcgatacggcacgtatcaaaaacagttccctgacctcaaccaaaatcgcggacggttccatcacgaacgcgaagatcggcaacgtcatccagtcaaacgactatgtcgacgggtcacgcggctggagcatcaacaaggatggtggggcgcagttcaacaatgggatcttccgtggtcacattgaggcggcaagcggcaagttcaaaggcaccctggaagctcagtcatttatcggtgatatcgcagtagctcgccgctacgatgatatggctttccgccgcaaccagactgttcagcgtaacggggcataccagaaccgtggatatgggatgacgattgttctgtcgtgcacactggtttaccacctcactggcgcgggcaatgtccagcagtcgtattctgttgatatcacgttcaacattggcgggcaggaagtaacgcgtcgcttctttgccaacgccggcggtttccaggctggcgacttcactcaggaattccgcttcgctgctgatctgctggctgataacaacaatgtcagcttctttatcaaggcgcgcggcaacgatgcttcgattgactatagctgctcgatccagaacatcaccgccacggcgttccgtacaaacagcaattcattcagctaa

SEQ ID NO: 199890 - DNA, 447 bp, Klebsiella oxytoca; identical to SEQ ID NO: 138561

SEQ ID NO: 199891 - DNA, 261 bp, Klebsiella oxytoca; identical to SEQ ID NO: 16909

SEQ ID NO: 199892 - DNA, 1089 bp, Klebsiella oxytoca; identical to SEQ ID NO: 16908

SEQ ID NO: 199893 - DNA, 918 bp, Klebsiella oxytoca
atgataagtttatcaccaccgactatttgcaacagtgccgtggaagcttatatcgaacgcgtcagccgggccaaccgctttgaatatggcaaagtgcgggtcgcaggctgcgtcggctgggcgctatgcgcctcgataaccggcgtgctgttcggcatcgatcccaatatcaccttctggatcgcctccggctttgcgctggtgctcggtctgctgctctggctgtcgcggccggaaagcagcaacagcgcccaggttatcgaggcgctgggcgccaatcgccaggccttttcgctgcgtacggcggcagagctgctgcgtatgccgcgcttctggggctttatcgtctatgtggtgggtgtcgccagcgtctacgacgtgtttgaccagcagttcgccaactttttcaaaagctttttcgccagtccgcagcgcggtaccgaagtgtttggcttcgtcaccaccggcggcgagttgctcaacgcgctgatcatgttctgcgcgccggccatcgttaaccgcatcggcgccaaaaacgccctgctgaccgcggggatgatcatgtcggtgcgtattctcgggtcgtccttcgcctcatcggcagtcgaggtggtgatcctcaagatgctgcatatgtttgagatccccttcctgctggtgggaacttttaaatatatctcttccgcctttaacccgcgcctctcggccaccctgttcctgatcggttttaatctgtcaaaacagctgtccggggtggtgctttccgcctgggtgggccggatgtacgacaccgtcggcttccatcaggcctatctgatcctcggctgcataaccctgagcttcaccctgctctcgttcgtcaccctacgcggcggcaaccgtctgctgccgaccgcagagacgcagagccccgcctga

SEQ ID NO: 199894 - DNA, 915 bp, Klebsiella oxytoca
gtggtggcaaacctgatacaggagaccagtccctctggtaacacacactcctacaagtacgacggcttccatcaccggacacaaacgaccgatccactcgggaaggtcacgcaggtgctctacaaggataccggcgatgtttaccgtgtctccgaccctcgttcgcgcctgacctactacagctacaacggctttggcgaagtgactcaggtccggagcccggacaccggcaccaccgacattacctatgacgaagccggtaacgtggcaacgcgcaagacggccaagggacaaaccacaagctacagctacgacgcgctgaaccggatcatcgaggcatccagcggtgtcgctggcgaatcgccaattctgtacgggtacgacgaagcaacctcaccatacggcatgggccgcttgacctcagtcgatgatggcaacggtgtccggagatatggctatacacccgaaggatggttggcttacgagacctgggaaacccacgggcagagccttactacccagtaccaatacgatggtgcaggcctcatcacgaagatcacgtatcccagtggtcgtgaggtttcctacacccgtgatttagccggtgacgtcatcgaggtggcaacgacacaagcaggcaccacaacaagcctggcaagccagatcgagcgagcgccctttggccccgtcaccagtatggtcagatggaacggcatttcagaaagtcgctctttggatctcaattaccgagtcaccggcatcgacgctactagagtgcattcgctggtctatcggtacacgccagactcgttgatttcagccatagacgacaatctggggtcgtctcagaaaacggaatctatggtcactcccgtttttgcaacaccgattttgacgataaattggcttgcttga

SEQ ID NO: 199895 - DNA, 639 bp, Klebsiella oxytoca
atgctcaagccacacattcaaatcagcaaggctttgaaagtctggtgccccttgccacaggcgttggcgggaatcctgcacgttcttctcaatctggcctttctcccaacccgatgctggattacagaactgcgcatcaaacaggtagtggctgaccatggcagtgaaccgctgattgaccctgcgctctttgccacgccccaccgaatccacagcggtcttcatgttgtcgtagatgccgcgcttgggaatgccaccgaagatttgaaaggcatgccagtgggcatcaaacagcatttcatgtttttgctggtagtaagcccgaagcacaaaggcccggctgtgggccaacttaaactgggcaatctgaagtttgacctgtttgcccgctatgcgggcaaagtcctcactccaatcgaattggaaggcttcgccacaagcaaagcgcaaggggatgaaacaacccttgcccgaggtttgcgccttgaactgttcggaatctttccactgtcgggcaaaggcacacactcggtcataagacccggtaaagcccaaagcgaccaaatcccggtacatgctgcgcaggtttctgcgcagcttctttgtctttttgtgctcggtggagagccactgccttaa

SEQ ID NO: 199896 - DNA, 165 bp, Klebsiella oxytoca
atgttctgcgaattgctgaccacatcgttgccaatctggctgacattcgagctgagcacgccggctgcgtttgccagcgcggaaaccccgagaccggagtacatctcagcaaccttgtctgacagcttcaggcccaggttgatatacgcctggccggtccactga

SEQ ID NO: 199897 - DNA, 579 bp, Klebsiella oxytoca
atgagaataaagtttgaagttctgcccgtccgcgccggcagccgtcaatccggtttcccaggtgatggtttgccagtcagtggtcagcgtgactgttttatcctcatacgtactgtccgtctggccgattttgttctggcgacggatcagcagactcatcgcgccggaaacacctttggccttcaccaccacccgatacttgcgctggccattcagcggcaccggcttgttgttgttggagaaaatgcctgggctggtagtggtcgtccggttcagccggacccccgctttcccgtccccgaaatcgccaaaggtcacaccggctggatactgaatatcccaggccgtgctgccctgcagaaaatcaaagttcgggatcaggttgtcgccggcgttgcgggtggccgtcagcacattcgccagatttgtcagctgctggctctgtgtggtcagtttcccttccgcctctgtcacccggttatcgaccgaagtcagtgccgttgcatcggccttcttcgacacattgctgttggtcgtgttcaggctgttctgcaggttcgtcagctgctggctttgtga

SEQ ID NO: 199898 - DNA, 270 bp, Klebsiella oxytoca
gtggacggggaaaacggtgataaatggatatttctgaagagcatacaccacgggacctttcttcagctcaagggcgatagcgatcctgcctttcaccttttggtgcaactcgttgagccagatatcaagtgcttccggagtgtgttcaaccacctggaatatgcgctcgccgtttttaaactgaacgcagacatcgtgttttttatccgcccagtccagaccaacatgagcagcaaactgattaatcgcagtcatcaccagctcctttaa

SEQ ID NO: 199899 - DNA, 882 bp, Klebsiella oxytoca; identical to SEQ ID NO: 180798

SEQ ID NO: 199900 - DNA, 396 bp, Klebsiella oxytoca; identical to SEQ ID NO: 100678

SEQ ID NO: 199901 - DNA, 663 bp, Klebsiella oxytoca
gtgatactgatttcctgtccgaccaggttcgactggccggcggacattttcagcgccttgttacccgagtgcggaacctgtaaatcggccaccgtcgcggtactgctccagccggtaaagcccgccgcgccgcgctcaaaactgccgttgacaatgaggttgcccggcattttcccgctggcgtcaatatctgctgccgtctggctcaggctgttactcagttgcgtcagagaatccccctgcgcactgagtgttttgccctgctccgtgacctggttctgcagggtgttcatcgcgcttgcgtccgcttttttgttcacgttcgcattcgtcgtggccagatcgctgctgagttttgtcagcgcgctgttagctgccgcgatgtcattcccctgctgcgtcaccgtgccctgcagctgcgtcaccgttgtcgtgtcagcctttttactcaccgtatcgtttgtcgaccggaggctgttctccagcgaggtggtacgcgtgccgatgctgctgagcgtatcgccctgctggctaaccgtggtggtcagtgaatccaccgcttttgcagtcgcatctgcggttttctgcgcactgttcgccgccgtcacgttacgcatatgccagtcggcagcgtaccagacggtgccgaacgggctgctctga

SEQ ID NO: 199902 - DNA, 249 bp, Klebsiella oxytoca
atggtattgatggtgctggtcagcgacgtgatgctctgcgactggctggtgatggtgttttccacctggctgacgcgaccggtcagtgaactcaccgcggacgtgtcagcctttttacccagctcagtattcatcgtggtcaggctgttctgcagactggtgagctgctgcgactgcgaatccagtttaccctcggcagacgtcatccgggtggtcaacccggtgacagcgctttgttctgctttctga

SEQ ID NO: 199903 - DNA, 231 bp, Klebsiella oxytoca
atgtccaccatcgcctgcgtgaccttgaagcgccaggtggttctctgccaggtcgcggagggtgatttcccgccccccgccatgagtggcgcaccggtgctcgtatctggccgaacggcggtgccaacatacagattaaaattcgccgtgccggcgccgcaggcaaccagtgcgctgatctcaatcacatcgttaagcgtggccgggaacgcggcaaagttaggatggtga

SEQ ID NO: 199904 - DNA, 297 bp, Klebsiella oxytoca
atgcgtctgctgggtactggtgatactggccaccgatttaaccgtattgtccagcgtcgtctggtttttgatgttggcagccgcctgggcgtcaatctgcgactgaagcgaggtattcaggctggcctgtgtgctctggctgtcgctcagcgtcttcgccatgttatcgacgcgggagttggcgttatccactttcgtggccagtgccgtctgctgctgcgcctgggcagtgattttcccttcggcatccgttacgcgcgccgtcaggccgctcacggcactcaccgtcgcgtctga

SEQ ID NO: 199905 - DNA, 198 bp, Klebsiella oxytoca
atgggcatactattgacaatggcaaatgatgaagtttatgacatgaatcatcttgatgactctgttgccagtggcttcaatacctctcactcatcgcatcaatgctcaatcatcaactttgaagttgagcttaaaaagaaagattacattgaggcaatggaaaggattgcagctgctgaagatgaatttgattggtaa

SEQ ID NO: 199906 - DNA, 1581 bp, Klebsiella oxytoca
atggctgaccccgctgaagttataagtatatcgaatgcaaacgagagtgatatttatgaaaaggataaccgtagaattgatgaaaaaataaaagatagaagatcacaagaattaattataggtttatgtggggcaataggttcaggggttaaaaaacttaaagattctgttataagcgaattaaaaggggtcggctataaggtatgccatattagacttagtgacttaatagcagatactcaaggtgataaagccagagaaataaaagcactaacaggttttagtaggtataaactattacaggacttaggagatcaacttagaaataaagataaaaataacatgacagtcgtagctgagatggctattagagagattgtcacattacgtaatgctgagtttaaagatgaaacaactaaaggtggcttggcgaaaaccaaaaaaaaagtagcttacgttatagatcaactcaaaaatccggccgaagtcgaattattaagaactgtctaccgaaataatttctatcttattggcttattacgaaataaagaagaaagagtccaaaaccttcgcgatgaaccaatgtcattagaacaagtaaatattctaattgaaagagatagaagtagtaaagatgttaatggtaaatcagtagattcagggcaacaagttgaaaaaacactatatttagcagactacttcatcaaaaacatcgatcaagtagcagatataaatgcttccgtaggtcgctttttaaagctaatccatggcgttggaaatctaacgcctactcatgatgaaacaggtatatttactgcacattccgcatcgttccgttcggcatgtttatctaggcaagtcggctcttgtataatggatgatgacggaaatatattggccacgggatgcaatgacgtaccaaaggccgggggaggactttatacttccaatacgaatattgatatgcgttgttataaccgctctacttgttttaacgataagcataaagacattctttgtaaagaaattgaagcgcttctcaacaaactaaatgttgagtcatcagatacaattgcaaaaaaaataatgtctgaaacaaaagcaaaatcaattatagaatattcgagagcaattcatgccgagatggattcaattatggcattagctagaaatacaaacattagctctgtagataagattatgtattgtacaacattcccttgccataactgcgctagacatattgtagccgcagggatcaagaaagttatttacattgagccttatgaaaaaagtcttgctttagacttacataatgatgcaatcactcaatcagataccgagagcacaaagaaagttatattctccaactttgaaggtgtatcgccttctcgatatgagtcctttttcaaaataagtagaataagaaaagaagaaggcaaaattaagaactatgaaataacaaactctccacatgttgaccctatatatttggatagttatatttcttatgaaacaagaatttctaaagaggtcacaagcaagttaggtaaacaatctattcctgattttgataaataa

SEQ ID NO: 199907 - DNA, 1191 bp, Klebsiella oxytoca
atgccttctgatatcccaattaatagaagtagttctggcatttcaacgttgaatgcactttctaaggctttaggtttttcacttcctgagcttgaagaaattagaaatataccattagagaaaagatattttaaattagaaaagcctaaagctgatggaagtttgagggttgtttatcggcctcatcataaattaaaaagattgcagcgaagaatcaactctagaatattccgtgaacttgttgtgtggcctgattttttatttggctcagtgccaaatgacaatgacgaagagcaatccctaaaaagggattatattacttgtgctgaacaacattgttcagcgaaatcaattcttaagatagatataagaaacttttttgataatatacatcgcgatttagttagcgatatcttcaatgatttctttagcataaagtcagaggcgaacgagtatattgtcgatatttgttgtgctggagattttattgtgcagggggccttgacctctagctatattgcttcactgtgcctgcatgatattgaaactaaagtatgtcgaagagccagaaggaaggggttaacatatacgaggctggtcgatgatataactgtgtcgtctaaagtttatgattttgatttttctcaaataagaaagcatattgaagatatgcttgctgaaaaagatcttcctattaatcctgataagtcaggtgttcatcaaatttctacaaagccacttttagtgcatggcctgagaatcgatcacagcaaaccaagacttccttctgatgaggtgaagcggattcgtgcttctttgcacaatctaataaacaattcatcaaaaaataataataagacatctctggcatacagggttgaatataatagatgcatgggaagaattaataaattagggcggcttggtcatgaaaaacattctgtatttatggggaaaatcagaaaggtgcgaccaatgccatcgtataaggatattaaagagtgcaagaaaaaactaaaacggttggaacatctttattcgaagggattgaataaaagtgaaaaatatttcagggactttcaattggtagggcacaacatatctcttattaatagaagtagctcattttccattttggcaaaagaatttagaataagattaaataaggtcaagcctgatgttgaaaaataa

SEQ ID NO: 199908 - DNA, 714 bp, Klebsiella oxytoca
atgttgaaaaataaaatatccagcacagataaatttataattactgtggttgtaatctgtttaatattagtgggaatcttatgcttttcatttttcagaacgatttatggactaaatctttataaattagacttttgtttgcaaagtaaatgtattgacttttttgcaactaaaattaccggtgttgttgcgcttgctcaattctttggatggtttgttacattaattgcagcgcttggtggagcgattattgcgctaagaacatatgttactggcatagggaatagtaacatcactaatcacattgcgcatttctctatgtttagagattttgtaaattcagaaattaataagaggaaaaaaatatccccggacacaatagatatacatatgtggtataatgttattttcccagaatccaagtctggaaatttaatgtacagtcagatatatcttggccttttaaatgaaataaagagtgttgttgaagatgcgaactttcacatttcaactttaacagggaagtataaatatcaaacacatcagcgtaaaatgatagaatctctttctaatgtaggtgtatctattaataatgggccaaaaaatgtatttattgatatggaatatgaagcatttagccttatggattcagttaataacacatttgtcagtggtcattatttgttttgtgcacttgaaaggaaatatagctag

SEQ ID NO: 199909 - DNA, 756 bp, Klebsiella oxytoca
atgacaaacgagcaagcagttattcaagctgaggccgaaatagaaagactgaagcaggcctatgtagaatatctgaacccaattgttattaaaatgcatgagagaaaatcccctccttccctcaatgaattactaacctgtcagaaattaggctcaagctattttaattttattgaaaacttcgttggaagtagtgggcttctaggcgctcacgctaatggtaaatgggttactggtttcgccgagacttgccatagtgtattaaatgcatttgttgttcatgttaacttccttcggagtcattctgaaacattacaaggttctttaaaagagccagatgagtctgcttatgcaaacatgcagaggatgactaaagaatatctccctaaagaaaaatgggtaaaattaaaagatttatttctaaataactctctgccaatagcaggattcgattactctggagcaaatgacttgaataaaactccgaaatggcaacttatattaggacttattatcggtttattatttgccataataacactttgtgctgcaatatttattcccaatcctacaccaacacagttcttcgtattccgaggtttcttcgcagtctcattggctgctatagctgcaattatccctggtctcttaacagtagaatcaagatttcaaaaattttctatacgagcaacaggcgctatagctgtttttataattgtttggctattgaaccctccgcaattattgggcggttaa

SEQ ID NO: 199910 - DNA, 252 bp, Klebsiella oxytoca
atgaacaatgatctagaattagctcgtataataaagataaaatttggcaccgatccgaatagcccaacttctcatcagcttgaaaaaatcaaaaaagatatacaaagcctggtatcaaacggcattacgccatcagagaaagattgggctgaaattgtcaagaaacactgccaaagtgcaggaacttatatatacaaaggtgcagacaacgctgatcttatcactttaatgcaattagcaacaaagaaataa

SEQ ID NO: 199911 - DNA, 558 bp, Klebsiella oxytoca
atggttgcaggcgttcacagtatctacgggttatctgcaatctgtggccgggtagaaaccgcagcaatgccacatcgcggcacattccccgggttgcggcgtaaacgccttacccgggctaccggtccgcagacggtgatgaaccgtagcccggctaagcgcagcgcaagccgggtagaaaccgcagcaatgccacatcgcggcacattccccgggttgcggcgtaaacgccttacccgggctaccggcccgcagacggtgatgaaccgtagcccggctaagcgcagcgcaagccgggtagaaaccgcagcaatgccacatcgcggcacattccccgggttgcggcgtaaacgccttacccgggctaccggcccgcagacggtgatgaaccgtagcccggctaagcgcagcgcaagccgggtagaaaccgcagcaatgccacgtcgcggcacattccccgggttgcggcgtaaacgccttacccgggctaccggcccgcagacggtgatgaaccgtagcccggctaagcgcagcgcaagccgggggtggttgtcgtag

SEQ ID NO: 199912 - DNA, 480 bp, Klebsiella oxytoca
atggctatcaccacaacgctttactatccatccgattacctgcctggccctcttaaagatagttttgggttgaagtctttatctcctctaaagagtaccgctatggtaactgggcgacgccgacaacggcgagcctacacttctgtaccgaccaacacggatattgcatggattttcaacgacgctcaggctcaggcttttgaggcctggtatcgggatgttctttctgacggggcggcttggttcaacatgccattacttacacctgtagggatgaaaaattatgtatgccggtttaacgatatctatgagggtccgacaccagagggcgggatgtactggcgttattcagcatctattgagttatgggagcgcccattacctccggctggatgggggcattatccggaatggatagtcggcagctcgctgctcgatatcgcgctgaataaggagtggccaaagcatgacgcagattaa

SEQ ID NO: 199913 - DNA, 2418 bp, Klebsiella oxytoca
atggctggcaaatcccttggcacattaacaattgacctgatagcaaaggttggcggatttgttcagggaatggataaagccgaaaggtcatcccaaaaatggcgcgaacaggtaaaaaaagatgccaaagaagtaggggcatccatagccgccatcggagtcgctgccgcaactgctgctgtaggtattggtgttgccggactttctattgtaaagaacaccgctcagcaggttactgaggcagatcgttgggccaaatcgttaaaaatgtctactcaggatttattatcctggcaatatgcagccgagcaagcaggactaacaggagataatattgctgacatttttaaagatattaacgataaagtcggtgatgctgtactaaacaaatctggtgaagcggcacaagccttagatactctgggactatcggcggaaaagttatctaaacaatcaccagataagcaactgatggctatcagttctgccctgcaaaaaataccatcacaggcagggaaaacaaatatccttgaaagtcttggaaacgacctgtcaaagatgcttcctttgtttgacaacaacaatgaaaagttgaagcagtttatccaactttcaaaagattttggcgttgctccgcctcaggaagatattgataatcttgtcaaggttaatcagtttttccaggatattgagaccagtgcccgtggcttgaaaatggaaatcgcttctggcctggcaaaagtcgatctctcaccgttgcaagatggtcttgatgatattcgtgatgtatttaccgaccccgcggttcttcagggaatttctgaccttgtaggtgaggcaatcagcctcgctggggtagttggaagaattgctggtggcttgggtgctattgcatcctacacccgctctcgcgttggtgccgtgtcagggaattacgatgcttctgaatatggtgacgtgcagcagcgtattgaatttctgaacaataaaggtaaccagagcaaagaacaaaaagaagagttagactttttaactaagcgccttaattttctgcgagcactaaaaggtgctacacctacaccagaagaatcacaaagggctgctaagggtatgcaatccctacttgctgatatgggtgtagagcagccttccgataataattataacctcggacagaacgaatctaaccagaagcaaacagagaagaaggacccgactgcggcaaagttgcagaatgcttttaagtcagtcgagcaatcatatttgcagcaaattgcattggtggaccaactcactggaaaaacaaaaaatgccacagaagttgaaaagttgcattttgatattgcttcaggccgactagttggccttaataaggcgcagcaaacaagacttgaggggcttgcctcagaggtagataaatataatgccctgtcaaaattccgtgatttacaggatgagttattaacacctgaagaaaagctccttaaaaccacgaaagaacgctttaaagtcctgaaagatattcagggattgcccggagtcagcaaggaagaagtaaaaaaagcaaccaaagctatcaccgaagattcatttgccgatatgcctaactttagtggtatagaccccatgtttggtgggcaactcggtgagctaagaaaagtcgatgatgcgcagaaagagcagggaaagtggtatcagaaccaacttgatttgcttgaacagaaccgacaggcacgctctgaccttaatgaagaatgggacgccagagaacttgagttaaagaaaaaacaccaggatgaaatgaacaggctcgacgatgcccgtaatcaactgatgttaagtagtgttgttgatggtctgggatcaatggttgatatgactcgtactgcttttggggagcaatcaggcatatataaagcagcatttgctgttcaaaaagctgcagctatagctcaatcaattattgctattcagcaagggatcgctatggcggccgcaaatccatttccctacaaccttgcagctatggctagtgttgcagcctcaacagcgagtatcgtatccaacatttctgctgtggggatggcccacgatgggcttgatagtgtcccagagacgggtacatggctcctgcaaaaaggcgagcgagttactactgctaaaaccagcgcaaagctggatgccactctggatagggtcgcgactcagtcaaccggaagcggcgctatttattcgcctactatcaccatcccaataaatgggaacccctcagatgcaactttggcgctggtgcgcaaagccgcagatgagggggctgaacgggggtatcgaaaggcggtgaactcagttgcaagtgggcagggtgatttgcaccgagcattaaccagcaaaactaactctgggaggaaaatcggctga

SEQ ID NO: 199914 - DNA, 504 bp, Klebsiella oxytoca
atgaaaatgaaaactagatacttattattgattatcatatcagctatattttctggtaatagcttcgctgaagatattgaaatgatatcgggatggggaatcagtaagcaaaaagacctgatgacggataaccttaatgttatcgttgggttacaatcggaaccatataatgaagctggaagcatggctgcaatagctgttagatgttttaataataagacggagcttttaatacatgctgatggatactatcgacgtccaacgtctaccgtaatgatgagattcgatagtgaaaaggcaacatcagccccgtggtcagtatccgaagggggaaaggcccttttttctaggagtccgatagataccgccaaaaagattaccgaacacaatagcttaatcattagatttcaaccatatgggaaagggcatattgatgctaaatttaacctcgacggggctgatttagcgatagatgaagttagaaaagcctgctcatggccataa

SEQ ID NO: 199915 - DNA, 357 bp, Klebsiella oxytoca
atgaaaaaaatattggcagtagcattgggtgcgcttttgttgacagggtgtacggtacgcgttgcggacctgactgtagctagtaccaaaaactacaatctgaatggtggcaagttctataaaggtaagcgtgtaaccgcagaagatagctatccagttatcatcttccctaccgggattcctaacgtgaagactgcagctgaccgtgctattgagaaagatcgctgtgctgttggcctgtctgatgtcgttgttactcagttaaatcacgccttcctgttcggtaagattggtctaagggtcgaggggaacttgatcattgaccgtagcctgccgggttgtgaaaacgcaagctga

SEQ ID NO: 199916 - DNA, 1743 bp, Klebsiella oxytoca
atggtggagaaaaagaagaagacccgctcaaccagttcttcggttgatcctgccacgcagtatgcgctggatgtaacttcaggaacggtaatagcggggcctgatattcgcaatgcctgccagcggcatttacgtgatttaaaagagggaaaaaaacgcggtctgacctgggatgttgaatcggtgacacgtgctatcagcttttttgcccaggtattgaagctgaacggtggcgaacacgaaggtgcgccatttatccttctgccgtggcagtgttttatcgtcggctctgttttcggctggaagcgtgaaaacggtacgcgtcgtttccgaacggtgtatgttgagtccggtaaaggttctggtaaatctccgctggccgctggtattggcctttattgcatgatggctgataaagaaccccgcgcagaggtgtacgccgcagcgacgaaaaaagaccaggctatgatcctgtttcgggatgcggtggcaatggttgatcagtcgcctgcgcttctgtccaggattcagaagtctggaggggccgggaaagagtggaatctggcgttccttcaaaacggttcttttttcagaccaatcagctctgacgacgggcagtcggggccacgccctcactgcgccctgattgatgagattcacgagcataaagataaccgcgctgtagagatgatgcgtgctggcacgaaaggtcggcggcaggcattgatttttatgatcactaacagcggtcacgataaaaccagcgtctgttacgactatcaccagtacgggcagaaggttgctgctggtcagcgcgaaaatgatgcgttctttgcctttatctgttcactggatgagggcgacgatccttttaaagatgaaacatgctgggggaaagcgaatccctcaatgggacatacctttctcccagactatttacgtgagcaggttgaagatgctcgtggtatgcctgcgaaagaaagcctggttcgcagactgaacttctgtcagtgggtggatgcagagaacccgtggatcagcggcgatatctggatggcctgtgaaaaggacatcagtattgagcagttacggggtaaaacctgctatggcgggctggatttatcgggcaagcgggacctcacatcactttctctttattttcctgatatcagcgtaatgctgacagaattctggacccccaaagatactttgtacgatcgcgctcgcgttgaccgggtgccttacgatgtgtgggagcgagatggtcatatccatgcccctcccggtacggcaattgactacggttttgtcgcaaaacgtatggctgagctggcagcgatgtttgacatacgaaaagttgctttcgaccgctatcacattgattacttaacccctgaactggatgacgaaggtgtcactgttcccctcgtgccgcacggccaggggtttggtaaatcggcggaatcaggattgtggatgccgcactccatagagctgtttgaacagttgattatggagaagcggatcagcattgttctgaatccttgtctgcgctggtgtgcggcgaatgccgttattgaggaagataaaaacggtaaccgtgttttcagcaagcgcagaagtaatggccgtattgatggcgttgtttctggtgcaatggctgttggtgcagcagaaggagatgaagaggatgaaggcgatattgagggcttttttgacgatccgatcatagtgggtatctga

SEQ ID NO: 199917 - DNA, 882 bp, Klebsiella oxytoca
atgagcaaattattcaaattcaaaaattggtttagtgtagaggaaacagccaacagattgacctcaagtctcggagaaaaagtatctgtttcagattgttttcagttggcaattgatgggcatattacaatttctgccatgttagatgagggaagatatgtcatagcggctcaagttataaaaaatacacaaagaaaggtcttcgagaaatggatcatagaaacccgtgatgatggagcaataataaggagtcctgcgggagagcatttttattcaaatgagcagttagactatgagtatgaagacattgaaagggttagtgacgtttttaagattactcatggaatctatgatctcccgatgcttggggctgaatctttggatgtcatgcacgcatttgatctttccagggggcaatcaccccgtgaatttcataatatggaggggccgtttttattaactgattttgggttggtaaatgtacttaatacatttaatgaattttccataaaatgtgatgataacggtaatcctaaactatttgataaaacatctaagcagtttgttgattttagtaggaaaaattaccattcatttttctatcctgctgatgagatcggtgatgtggagtttgttttcaggaaagaaaatattgaaaaattcgagagagaagcagccataggtactgaaaagacccttgtcttggaagatagtctcatgctaattggcgctatgattaacgcccttaagaaggctgaaccgacatcaaaaagatggactcaggaggcacttaaggcggaaatgttagataaggggttaaagctgagctctcgcttagttgatgattatttttcattagcaaataaatcattcaaatcatag

SEQ ID NO: 199918 - DNA, 849 bp, Klebsiella oxytoca
atgaataagcccaccagcttccccctgccggatcacacttatcgcaaagctcacagggaaggtggtgagctttgtatcgacggcgcacaaccgtgtgacgttcaaccgcgagggctacaagtttccatgcgtatagcccattttgcgtttctgactggcctgatgaatgcaaaagctaacactttgctggtggtgtgtcaccgcgtgaacctgtcaaaacctgtcacattgcgggccactgatagtggcgtacaaaatgcctggcggaatttagcgatcagtacgcgcgatggacatcacacctgcagtaatgagttttcggagtccataaaaaaggacttgatgttctacatcatgccggtctatggttataacgcaccagcaaaatctggtgccgggattggcgtcctgacaactctgaaggcgacacatgacgcgccaagcgtctttttttgtgccgttagtctgactcaccctttttttgagcgttggtatataatccagcgcctttcaagagcaatggtggctcaggcgggggcttcttcggaagcgccggtatccttcagagccggttacgccaaccctgtctgggctaccaccagtgaaattggcgtttccggtggtggcgttacccgctatctgaaggaggctgccgccatggctactacccatacccaaaatccgcaatttatctggattatcgccgctgttcgccgcgatatgccgacaattaaaacccaaatccatcacatcaccgcacattctgagagcgaagcccgccgctctctggttcgggatcacgtctgctttttcgctggtcgcatccgtctggaggtggctcatgcgtaa

SEQ ID NO: 199919 - DNA, 1041 bp, Klebsiella oxytoca
atgattacagagaaagccacattcaccttttaccaggttagaaacgcaggtttctatcgtgcaggagccagtgttccagaatttggttctctaggtgaaacgcttatcgatttaaataactgggccgggcaaaaaatactaaaagaaacaaaaacatttgaagctgatgaagatcggtacccggcctatctagttgattctaaaaatgttggtgatgattgggtgttacttctctggaacgaagttccaagtaatggccagcgcatgccatctttgagtgaggatgcagtgtatggggctgatcctgaggtgataatgaatcctattcgtgaaaggactatcccggggtttgccacttacttttggttcattgctgacagaaatctcatggccacagtaaagctgcacaataaggtgacagcgcaggctaccctacaaaagtatatccagtgttttttaaaacaatcttctgaacatgctaaagcggaagtcattgaacttgaggatggttcacatgagcttaaagtcactgggtatatgttggatgtaaatgatgctcaagaagagcgtaagcattactaccctagattcaatgccaatttgataaaaaatccaggtaagcacgaagaaataagacaaaaagcgaactttatcagtaaaatagaaagagttatcgagttagatcttaaccgtcatcccgatttggatttatggcaaaaattattggataaattgcatgttggtgcccagcaaggacctggggtatcaaccaaggtaaaatatactctatccccagatgtaggtcttgctgatgtaaatcaaatgattttggattgggataatgatccatctgaagtgaacgattatggttttgtctttaaaggagaaccaagcaagacatattggttaagtaattcgctctctaggacgcaatttgatgttcgtatcgagagagagaacgatgaaatcgtcaacttacaatctttactagtcgaactaagggcgaagaaagatctaattttgaggggctcaggcttataa

SEQ ID NO: 199920 - DNA, 510 bp, Klebsiella oxytoca
atgaaagtaaaagtgatgttgttcatttgtatacttgctcttgtatcaggagcaggatactttggccggcatataactttttcgattcagtggcctttgtttgaagcacttagaactacagcatcgataatttttgctgttgttggggcatggttcgcgattatctatccagaaagattaaagaaatcttttcgtggaggtgattcaagcggtggcggtgcaggaatccataacctctttacgcctattgttcattcgacagctatcctcgctgctgtactgctcgttggcattggtgctccgttattaaagcaatttgattgggtaatggagcacaagacagttttcagaggactatcttacggattattggtattcctcacgttatggcagcttttaactgtcgttttaagtcttactggccccgacatccttaaacgatttacttcgaagcaagaagcttccaagagagctgcaaactcgatgctcaaccccaaaaacaaaaactaa

SEQ ID NO: 199921 - DNA, 459 bp, Klebsiella oxytoca
atggcagttgcaaccctaaacagcgtggcggactatctgctgtgctttgctcaagagcacggggatgttatgacgccgctgaaactgcagaaaatggtgttttacgcagatgcctggtacatggctctgaacgatggcgaagagcttatcgccgatcggtttgaggcgtgggtacatggccccgtagcaagggatctgtacatccggtttgctgactataagtggcagccgatcaccggtgaaataaaatgcccggaactcactaaggacgttaccgagcatctggacgaaatttataaagtctttggcggttactcggcttatgagctggagcagatgacccaccaggaagagccgtggctattggctcgcgcagggataccatctgatgttccgtgtcgaaatgatatcgacaaagacgtcaccgctaaattctaccgcggcatgatggatgcctga

SEQ ID NO: 199922 - DNA, 438 bp, Klebsiella oxytoca
gtgggtagaggaaagattaaggcaagtaagattccggtggcgggtaatcaaatcgtcgccggaacacccaaccccaccacgtcaacacttagcttttctttccagtacatcgatcccgcacatgctaagtttggtttttccggccaggctgcggcttacttctgtaaagtactggaacgccttaaagatatctccagcctgacgtcgcttgagtttacgacaaaccgaaacgcggctctcaaatcgcactgtattgactggagtacgacctctgagcctgacgggtttacccaccttaacgagcagttccagagctatacgccttatcagtttgcaatatctcgcaatgagcatgggcgcatacacggttttttcattggcaatgtgttttacgtcgtgtggctcgatcccaaccatcagctataccccggcgaatag

SEQ ID NO: 199923 - DNA, 240 bp, Klebsiella oxytoca
atgggcatatttctcatcgagataagggtgccgactaagctggttttatctgcgagacagtccttcatgcccccagggggtgaatctaaaggtgcggttgccgcatttttaaccaacaacagggtaactaacggttgccctgttcgtctgaaagattccctcttacatccgggatattaccgcatgtacgtgcccaccattagtaaccggtcaaccatgagaatgacctgcacaaaatga

SEQ ID NO: 199924 - DNA, 1326 bp, Klebsiella oxytoca
atgagtgcggggaaattgccggagggctggacacaggcattgcttggtgactatttatatcttaaaaatggtttggcatttaaaagtactgaatacgttcctccaatgaacagttcatttccagtaattagaatctctgacttgaatggtacatgtgcctctgacaggtctgcggttcacgtccttcaagaggttgatggctttaatattgaaaagggagatctacttatcgctatgtcaggggctactacgggaaaaataggcgtctatataggtagcacccctgcctatcaaaatcaacgtgttgggaatattaaattacgctcacataagtatggtaatgaacaatatagaaactatttaatttcatcaatatcaaaaaaaattcttgacgaagcttatggtggtgcacaaccaaatatatcaggaaaaactatagaagccttctccttctatctcgcccccctttccgaacaaaaaatcatcgccgaaaaacttgatacgctgctggcgcaagttgacagcgctaaagcacgtctaaataaaatcccacaaaccctgaaacgttttcgtcaggcggtactggctacagcagtagggggaatactaacttacgaatggcgaataaatcaaaatatcactgagggacagccacatccattaagtaaagcaggaactatcattgccgggcaatctcctgctagctcccaagtaaataatttaggcaaaggcgtcccatatgttactggtcctgagcaatgggatgggagtaaaatacttcatcataagtggactgaataccctaaaaagatttccccagataattctatttttgtcacagtaaaaggggctggtgtgggaacaaccttccctgggtgtcattgtgcaattgggcgagatgtttatgcttttgtacctaatcaggaaatgaattacaaatataccctttatgccattcaagcagctgctgcagatgtcgtagttaaagctaaagggttaatcccaggtctaacaaaagctgatattttggaacattatgtctatattcctgtaattgaagaacaacacgaaatcgtccgccgcgtcgaacaactcttcgcctacgccgacaccattgaaaagcaggtcaacagcgccctaacccgcgtcaacagccttactcagtcgatcctggcgaaggccttccgcggcgagcttaccgcccagtggcgtgccgaaaaccctaatctgatcagcggtgaaaacagcgccgccgccctgctggagaaaatcaaggccgaacgcaccgccagcggcagtaaaaaaaccacgcgaaaaaaagcctaa

SEQ ID NO: 199925 - DNA, 915 bp, Klebsiella oxytoca
atggctgttcctacctatgacaaattcatcgagccggttttgcgtttcttagcgacgaaaccggaaggcgtgaccgcacgtgatgttcatgaagctgtggctgatgccatgggacttgatgatcgccagcgggccgaagttattgcgagtggacagctcgtctataagaatcgcgcaggatgggctcatgaccgactgaagcgggcagggctttcgcaaagcttgtcgcgcggaaaatggtgtttgacggctgaagggatgaagtgggtggctgctcatccaaagccgatgacagaacaggatgtcaatcactttgcctttgattttaatagcgtaaagcttaagcagcagcccgatgccgttgatttagatccgcagccacaagtattagaccatgaggagcttgccaaaagtagccctgacgatcgtctggagcaggctttaaaagaaatacgtagtgcggttgcagatgacgttctggaaaacctgcttcaggtatcgccctctcgtttcgaagtgattgtgctggatgttttgcatcgtctgggttacggcgggcatcgtgatgatctgcagagcgttggtggtaccggcgatggtggaattgatggcgtgatctcgcttgataagctgggcctggagaaagtatatgttcaggcaaagcgctggcaaaataccgtcggcagtgcagagattagaggcttttatggtgcgttacatgagcaaaaagcgaaacgaggcgtgtttatcacgacgtccggcttttccgctcacgccagagactatgctcgtaaagtcgaagggctggttttggtcgatggcgaaaggttggtgcatcttatgatagaaaatgacgttggtgtatcatcgcggctgcttaaagtacccaaactggatatggattattttgagtaa

SEQ ID NO: 199926 - DNA, 585 bp, Klebsiella oxytoca
  misc_feature (180)..(183): n is a, c, g, or t
gtgcggcataattacccggaggcgatgctgcgcatctgtccgggctacggtatggcagacggcggtggacctgtagcccgggcaggcgcttgcgccgcccccgggagcagagcgcagttcggcataatttcccggaggcgatgctgcgcatctgtccgggcgacggtatggcagacggcnnnnttcccggaggcgatgctgcgcatctgtccgggcgacggtatggcagacggcagtggacctgtagcccgggcaggcgctttgcgccgcccccgggagcagagtgcagtgcggcataatttcccggaggcgatgctgcgcatctgtccgggcgacggtatggcagacggcggtggacctgtagcccgggcaggcgctttgcgccgcccccgggagcagagcgcagtgcggcataatttcccggaggcgatgctgcgcatctgtccgggcgacggtatggcagacggcagtgagcccgtagccccgctaagcgcagcgcgagcggggggacatcacaatactttaaacccgtgcgtgccatcccgcttcagctgttcaaccaggccgaactcccagtcgaggtag

SEQ ID NO: 199927 - DNA, 1053 bp, Klebsiella oxytoca
atggccaaaagagggatccgctatcagttgtttatcctgacatcaaaagtagctatcagcacactggttctattgtcagttgtttacagcacttatatcacggtgttttacaatggacatgacgaatacagctggatacccactatacatgactgggttctgacgttgatttccggcgtactttcttccgttgtcgcactggggtttgcgtggctttttgccaggaaggtcattatccccctcaatgccgtcgcggcgagcgcccgtaaaatcgctgaagggcaacttagcgaaagagtcgcccataatgtgggggaaattttcgaaacggcttcgctgattaacgacttcaattccatggccgataagctggaaattatgtccagcgatatgaagaaatggaacgcggctattgcccacgaactgagaacgcccgtcacggtattgcagggccgtatccagggtatccgggatggggtatttgacgccagtagaccgcagtttgaaatattgctggatcagataaaagggttatcgagactgatagacgatctgcgagtactgagcctctcggacagcggccagttatatctctatcgtgaagatcttcagcttgatcagttaatagccgataccgtggcgctttttgcggatgatttccgctccagggaaataagtcctgcgattgaaactgatgctatttcagcatttctcgacaaatttcgctttgttcaggtgctgactgcattaatgggtaatgcgattaaatattctgatcccggaaagcttctggtgacctgtcacatgaaaggccaccatattttcttaaccgtcgaagacgaaggtccaggtattaatgcaaaagatggtgacaaaatctttgatgctttttatcgctccgatagcagcagaactcatgaaaccgatgggtccggactgggtctggccgttgtcagttcaattgttaaagctcacggaggaagcgtgaactatcgcacaagcagactgggtggaagctgttttgaggttagattgccggttggcagtaagtaa

SEQ ID NO: 199928 - DNA, 696 bp, Klebsiella oxytoca
atgaagaacatcaaggtgttgttggcagaagacgagagtggaattgccgacatacttatggcttatctggcaaaagaaggctttaacgtcatccatgccagagagggaaaggaagccttgtcactgttttattccgaagcgccatcattcgttattcttgatatccgcatgccgcttatggatggctggcaggtacttgcacaaatacgccgagaaagtgacgtgccggttatgatgctcaccgcccttgatgcggatgttgataaaattcaggcgctgcgcaccggcgcagatgattacattgttaagccttttaatccggctgaagtggttgccagagtccatgtcattctgcgccgcatgccttattaccattctgataaagaccagcagtcgttcagcacccggaacatagaggttaatctgttaaaccataccgtgatcatcaaacatacacagacggacattggcgatctgctcacgtcgacggaatataaaatattgctgcatctcatccgtttccccaagcgggtattttcccgtcaggagatcctcgagcattgtctgccagaaggcgatgccagcgaacgcacggtcgacagccacatcagtaagttacgtaaaaaatttgaacaggctggcctgacagtggtgcctgaaagcattcgcggtttcggctacaggttgggtgactga

SEQ ID NO: 199929 - DNA, 1122 bp, Klebsiella oxytoca
atgatgccaaaacatactatgaaaatcagaaatccatctttgctgttgctattactgctgttagcagcatgcgactcaggaaccaatactggggagcagacacaggaaatgcctgccagcgtcaccgtacagacgcttactgccggaccggtagagtatgagcagacctttcccgggcgggttgcggcctatcgtattgctcaaatcaggccacaggtcagcggcatcattacagaaatgaatttcagtcagggaagcgagcttaaacctggtcaggcgctgttccagattgatcctgccccctttcaggcggatgtgaacagtgccgccgcctcattaaaaaaagcgcaggccagttatcgtcagttgcaggcaaaggcaaaacgtttgtcgagcctgacccgaaccggtgccatcagccagcaggattatgaagacgctatctctgcgtctgaccaggctaaagccagtgtagccgaagcgcgcgccaccctcgaacgtcgtcagttggatctggcctatgcgacggtgaaaacacccatcggcggtcgtgtggatcagaactttattaccgaaggtgcgctggtcagcgcgggcgatacgcaggcactggcgacggtgcagcagatagacaaagtatatgtcgatgtccggcagcctgccgcccagcaacatgcgttaccgtccggggctggcaacccgtccgtacaggccacgatcctctcggctaatggcaaacctttcagtaatagagcagagatcctttttaccggggtcagcgtggatgcaggtaccggcgatgtcgtgatgcgtctgcttgtcgataatccagagcgaaccctgctcccgggcatgtacgcccaggcgaaaattacacatctgctcaccaacgaaggtgtaactgtcccccgcgaggcagtggttcgtgagaatgacaaagcgaaggtatggctcaaccaagaaggtaaagctaaatccgtgactgttgaactgggagagtcgatcgggccgaactattacatccgaaaggggctgaaagcgggagaccagttaatcacccaaggcatgagccgcctgcaggatggcgtcgcactgcagctggcgcagggttcagagcagtaa

SEQ ID NO: 199930 - DNA, 3102 bp, Klebsiella oxytoca
atgcctcagttttttattaaccgccccgtgttcgcctgggtgatagccgtcttcattattctgtttgggcttattgctattcccaaactgccgatagcccgctatccgtcggtcgcgccgccaagcgtcagcatttatgccacctatcccggctcgacgcctgagatgatgaataataacgtgatcgcgctgattgagcgcgagttgtcatcggtaaaacatctgctctattttgaatcatcgagcgataccacgggctctgcgacgattaccgtcaccttcgcccctggcaccgatccggatctggcccaggttgacgtacagaaccgaattaaaattgttgagccacgtctgccgcaagttgtcaggcagaatggacttaacgttgaagcctcttcttcgggcttcctgatgattgtcggtttgtcctcgaaaggcggaaaaatttccgaaagcgatctcagcgattatctttcgcgcaatatgatggaagagctacgtcgtatagaaggcgttggccgcgttcagctttttggtgcagagaaagccatgcgggtatgggttgatccaaataaactgaaccagtatagcctttccctcactgatatcagtgatgccatcacggcagaaaatgcccagatttctcctggccgcacgggcgattcgccggctgttgaagggcagatggtcacgtatccgctgctggtgaaaggccagttaagttcgccggaagaatttggcaatattacgttaaagtctaaccgggatggttcacgggtcgtcctctcggacgttgcccgcctcgaactgggaccgcagacttataccttctccacccgggaacatgggcaggaatcaaccggggccgctattcagctcgccccgggtgcgaatgcagtaaaaaccgccgaacaggtcaaactgcgtctcgaagaactgagtaaagccatgcctgacggtatgcattattctattccctttgacaccacgcccttcgtgaaaatctcgatcgaaaaagttattcatacttttatcgaggcgatggtactcgtcttccttgtgatgtatctgtttttgcaaaacgttcgttatacctttattcccgctatcgttgctcctattgcgcttctgggcaccttcaccgtcatgttgttggccggatattccatcaacgtgctgaccatgttcggcatggtactggccataggtatcatcgtggatgatgccattgtcgtggtggaaaacgtcgaaaggatcatgacggaagaaggactgggaccaaaagaagccacccaaaaagcaatgaaggagataaccggagccgtcatcggtatcacgctggtcctcagtgcagtatttatccccatggcaatggcgacaggctcagttggcgcgatctatcgtcagttcacactgtcgatggccgtctcgattcttatttctgcctttctggcgcttagcctcacgcccgcactttgtgcgacgatgcttaaacccgttgataagcatgtccatgagaaaaaaggatttttcgggtggtttaaccataaatttgcacggatgaccgatcgctatgaaagcggtgttgccaggcttttaaagcgtgccggtagcgctattgctgtctatgccgcactttgccttttgttatttttcaccatgcgcggactcccttcatcgtttcttcctgaagaggatcagggctacttcctgacgtcaattcagctaccttccgatgcgacaacagagcgtaccctcaatgtggtgaaagagtttgaagatacggtactgaacaggccgggcattgataccaatctttccatcatgggattcagcttctcggggtctggccccaactctgcactggcctttaccacgctgaaagactgggataaacgtgacggggcaaccgccggttctgaggctaatcatgtccttgaaacgatgtatggccacccggaaggcgaaatttacagcctgatgccgccagccatcgacgagctgggcaactcatccggtttcgccatgcgtctggaggatcgcgcaggtaaaggctatgtcgcgttgagtgaggctaaaaataaactgctggcgctggctgcggaaagcaaggttgttcagggcgtatacgtagatgggcttcccgagggtcaggtgataaacctgaatatcgatcgccagaaagcatttgcgttaggcgtttccttcagtgagataagccagacgctctcgggtgcggtcgggtcaatgtatgtgaatgacttccccaatgcagaccgaatgcagcaggttatcgttcaggctgatgctccctaccgtatgcagccggaagatatcctcaagctgtacgtccgtaacggtaacggcgggatggttcccctttctgaatttgtgcaggcggaatgggagaactcagcgttacagatggtgcgctacaaaggttatcaggcgatgaaaatcaccggcagtgctgcgccgggttattcgagtggcgaggcgattaaagagatggaacgcctggcggcacagctgccagaagggttcgcagtggaatggacgggattgtcattgcaggaacagcagtcagcttcagaggccccgatgttgatagtgctttccatgctggttgttttcctagtgcttgccgcactttatgagagctgggctgttccactctcggtcatgctggttgttccattgggcttgctgggtgccgtactggcggttgctcttcgtgacatgcctaacgatgttttcttcaaggtggggatgatcaccatcatcgggctgtcggcgaagaacgccattctgattgtcgagttcgcaaaacagatgcacgaggggggaaaaggtctgatggaatcaacacttgaagctgcacgcatgcgtctgcgacctatcctgatgacttcgctggccttcacgctgggcgtggttccgctcatgctggcaagcggtgccagcgcagaaacccagcatgccataggtacaggcgtgtttggtggcatgatcagcggaacactccttgccatattcttcgtgcccgtcttttactttacggtgatgaatatcgtcggacgtttcacacgtaaaggtcattga

SEQ ID NO: 199931 - DNA, 450 bp, Klebsiella oxytoca
atggcaacaccgggcgtggctcaggctacgcccgtgaggtcggtaaacagtatgcaactggacaatggatatcatagggaagttatcagggaacttatccgctggataaataatagccccaccgaaattctggatattataatcgttgcccgacgggcaggtttttcacgctggcatcttcagcgattattcaaacagcacacgggcataacgcttgggcgttacatcaagattgtccgcctcggccatgctgcaattgacctgatgaaaacgggagcgcctgttgttgatattgccgttcagtatggctacgaatccccacagacattcacccgagcgatgaaatgtcatacgggactcaatcccggcgcaattaagcaaatggcccgtgaggataaagataaactcaaagcaaaaatagaacaattaattgcgtcagtcaggcattaa

SEQ ID NO: 199932 - DNA, 1653 bp, Klebsiella oxytoca
atggttattacaaagttaattattgagggttttaaggggtttaaagaccgattctgcatcgagttcaatgagtcagtgaacattatcgtaggcgataatgaagcgggaaaaagtaccatccttgaggctatcaatttagggttgacgggtttgtatgcagggaaacctgtcaagaacaacatcagccaatatctctttaatgaccaattggtgaaggaatatctagccagtctcgcaaccgcagctagattgccaccgccagcgctattcgttgagctccacttccaaaaaacgcctgatactgtttttctggagggggatggtaattgcctgaagtcatcctcagtgggagttgtattcaaaatcaagtttaacgaggactataaggctgcctatgaagcactcttgaaagtaggtgatatcagaacgttgcctatagagtattacgatattgagtggaaaagcttcagcagagacgcacttttatcacgtaacatccccctcaagtctgcatttatcgattcatcctcggccagaggcaacaatgggtcagatgtttacatcagcagaataatcaaggatttgctgacggatgatgaggtcattagcgtttctcagtcgcaccgtaagatgaaagaagccttcatatcagacaagtctatcgaaaccatcaataagaaaattatcagtgcaagcaagatcaccagtaaaaaggtcactatctcagttgagctttcctctcaaaaagcatgggaatcaagcctgattacctgcctggatgatgttccgtttaactacattggaaagggcgagcaaagcattgtgaagacaaatttggcgctctcgcacaataaagccaaagagtcgaatgtcattctcattgaggagcctgaaaataacctatcgcacaccaagcttaatctgctcattaagaccatcaaagacaactgtgaaggtaaacagatcatcattacgactcacagtagtttcgttgcgaataaactcggtcttggtgatcttatttttctctcgaaccgcaagacgaccaagctggcttcgttaacacctggcacgaaagaatttttcgaaaagattgcgggttacgacacgcttcgaatggttttatgtaagaaagcgattctggttgaaggcgattcagacgagcttgtggttcagaaggcctacatggatacgaaccagggacgactacccattgaggacgggatcgaagttatttcagtagggatttcttttttgagatttctggaaatagccgcgattatcgacaaacctacccgcgtcgtaacggacaatgatggcgatattgccgcaattcagaaaaaatacagcacttatctgggcgcgaatataaaaccacacattgatatctgtgttgacccgattgttgataccggtacgctgatggtgggcacaaaaaaatacaattacaatactcttgagcccaaattgctgaaggcgaacagtagggcaagccttaatgccgttttagggactacacatacttctgatgatgacttacgcatttacatgcatgcgaataaaacagattgcgcattgaagatatttaactatacgaatactgcggcgctcagcatacagtatccgcagtacattctggatgcgatcaaatga

SEQ ID NO: 199933 - DNA, 1116 bp, Klebsiella oxytoca
atgaacaaagtcatcatcgcatctgctggagcaggtaaaagtacctttgtagtcagtgaagcattaaaggctgtcacttcaggaaagcgtattctgattaccacgttcaccgaggcatgccgagatgaaataaatgtcaaaatcattaaagagaatgggtgtgtcccgcctaatttgtatgtgatcacctggttttcctttctgattaaacattggataaaaccctatcaggggtgtctatttgactatgacgtcaaaggaatgctcctttgcagcagcaaatccggtgtaaagccttataaggcagcggggagacccatctactggggggagaaagatttcaggcagcactatttcagttctgattttaagctttactccgataaaatggccaaactttctcttcgctgtgatgagaagtcgaacggaaaagtcatcgctcggttggcatcgtgctttgatgaaatttatgtggatgaggttcaggatcttgctggttacgatcttgaaattcttcaaacactgttcaggtcacccattaaaatcacgctggtcggcgacccgcgtcaggccacttacagtaccgtcaataccgagaaaaatgcgaagtacaaaaaagctgccatcgtgaatttctttgatgacaaggcggcaggggtcacagttgatgataaaatgttgaatgagaactttcggtgctttcatgaaatcaatgattttgccaacaaactttatcctgcctttgccccttcagcctctaacgtttgtgaaatatccggtcacgacggagtcttcttgctgcccgaaaaattactgagtcactacctagaaacgtatactccagtgcagttgcgctgggataaaaggcgtaccgttgatgaacgttatcctgtctttacctttggtacatctaaaggcctgacatttgaacgtgtgatcatatttcctaccgaacctatgctgaagtggttccaggataatagcgctgtactcactaatgattcacgagccaagttgtatgttggtctgaccaggccagttaaaagtgttgcgattgtctttgctggtggcgcagcttttaactctaatgggattaaaatttacacttcagggtag

SEQ ID NO: 199934 - DNA, 921 bp, Klebsiella oxytoca
gtggaacaaattggtattgctttagctacttacaacggcgctatgtacattaatgagatgcttaactctattttagagcaagattatcaaaattttattgttcatgtatgcgatgatggctcaactgatgatactgttcaagttatcaaacagcatgaactttataaaacgtacaacaaaatagtaattcatgagatggagggaggcctcggagcatgtgaaaattttcaaagggttatttcttattgtgaagagaattatattgcattatgtgatcaagatgatttttgggtcaaaaataagctttctactttgttagcggagattaaaaggactgaaagtaataatggggaaattcgcccttgtttggttttttctgatttagaaatagttgatgctcagcttaatataatttatggttcattttataaaaagtcacttaaaagtccttttagtaataaattgcaagactttatattaacaaatcatatcccgggttgtgcaatgatgtttaatagtaagcttaaggaattacttcttcctatgccaccagaaatcagaatgcatgactggtggatatctcttataactgctgcatttggaataatatcatatgttgatattcctttgattaagtacaggcagcatagtcagaatacaataggtgttccaggaattgatgaaaaaaatagaatatttaaggaaattcgaacatctgtttatttttttggtttggcaaagcgaggtagggtatttagacatcatttattaaaatttgcaaacagtagaaaggagttaaatgatactgatgatttgatgaagctaagaaaaatgggtattttaaacagattgtattttttctcaactagtaaaacaggtgattattttattgtttcactccttgcgtggttgttcttatga

SEQ ID NO: 199935 - DNA, 348 bp, Klebsiella oxytoca
atgataacgttgccgaccggtaccagaatctggatcatcgctggcgtcaccgatatgcgttgtggcttcaacggtctggcctcgaaggtgcagaacacgctgaaagatgatccgttctccgggcatatcttcgtgttccggggccgcagtggcaaaatggtgaaaatcctgtgggccgatcgcgatgggttgtgtctcttcgccaaacgcctggagcggggccgcttcgtgtggccggtgacccgcgaaggtaaagtgcatctgacgcccgcccagttgtccatgctactggaggggatagcgtggcagcatccaaaacggacggaacggcctggtatacggatataa

SEQ ID NO: 199936 - DNA, 684 bp, Klebsiella oxytoca
atgaattcccagacaacgaaagagattacctgttaccgctcttatctacctgatgccttgcagctccgatttgaacacaaactgaccatcagagccatcgctcagcgacttggtctcagtcattccacaatacacaccctttttcagcgatttattgcatccggcataacatggccattacccgagtcgctctcgtttgctcagcttgatgccatccttttttctaaccgaaaaaagagaaactcacccgatgctataccctctgaaattgctgaggaaaaatggcgagcaaagcgacgaaccagctacagccgtgagttcaagatcaatctggttaaacaggcattacagccaggtgcagttgttgcacggctcgccagagagcatggtatcaacgataacatgctgtttaactggaaaaaccagtatgagaatggattgctggctgatgacatacaggaaaatctgcctgttgcggtagcgttaactgatactccagaaccggtctccgctgtaacaaatcccttctggaaaaacaaaactgacgactctcccgtcgctgaaagccttggaactctccggtgtgaacttcatctgcaatcgggtgtggtaaagctcttcgacccgctgacacctgaaatccttcggactctcatccacgaaatgaaaggtggttcccgatga

SEQ ID NO: 199937 - DNA, 465 bp, Klebsiella oxytoca
gtgagtttacgttttgaaaattcgcagtctaggaaagtgctatgccggcgagtgaatggtctctggtataaaaccgttcccctagcgtttcaggaaattctgacatggtctcatgcgaataacattgagtatacggaagcgctggtgttttactgggatgaccctgctgaaaccgctgaagatgagcaacgggctgatgtggctcttactctcaatacagacagtcactatgacctcaatataccgaatctgcgggaggagcatatccccggagggatgtatgctgtctggagtgctgttgtagttgatggtgcctttgctaaagcctgggatgatttttataaagtgctgggcacgacagagtataaaccagcgcgcggtgtctgttttgagaaatatctttgtgacgggaaagataacagctggaacattgagatatggcagtctgttgaaaactgtctctag

SEQ ID NO: 199938 - DNA, 807 bp, Klebsiella oxytoca
atgttaaccaagggtgtttatctgctccctttactcggtctgctgcactgtcaccaggccagctctgctgagctgcacggttttatcgggacaggactggaatatgcgccggtgtattcgggcgccagacagtattcggtacaaccaggctttcaggcagggggaacaatacagggtgaaaactggggagctctgacattgtcctctgatggtgtggaatgggatctttcccctgacacgccattctcagcctccctgctggtttacattgatgacggccgggatgaggtgatcagcacccctttttcgcataaaaaaaataatgaattaaagggaatgggtgatcttcctgatatccccatggctggcgtgtctgtcagttatcagacggacgccctggcactgtggttcagaggtctggctgcaaccagaacacgggaatacggcggagtaccattaggcaggatgtataagtttgaatccggcggacagttcaggctgtttgaatttcagaatgtggcggtctctctcgggtcagatctcacctgggcaagcagcggatatcagcagggtcattatggcgtctcggcacaacagactctgacgacccgttttgataaatacacccccggcgccggattacagtccggaggaatctataccgacctgacttaccgcctgacggatcatctgatcgcaggtctgagtttacgtgctgattatcttttcaataaggctgcccgcagtccgctggtagataaacgtaccggctattccgttggctctctcatccagtactcattctag

SEQ ID NO: 199939 - DNA, 1092 bp, Klebsiella oxytoca
atgttcgtggctaggaaaacaatgttggtaagaacagtgctgagcgtcgctgccttcctcatcgtgatgctttcggggatctacatgcaggcgggattcagttcgccatcgaaaatcacgaccggtgatgccggactgatcaggacgatgacccccctgcttcagggggccagaagccatgtcgcggttgcactgataaagccagatggcgtgcggtatgccctgtggggcggtagttttaatactgagttcgaagttggcagcctgagcaaaacaatgacggcggcccttctttctgatgccgaacatcgcggcgaagtgatgccggataccaccgtgggtgatgcactgccagcactgtccggtccggtgacatcggtccgtctctcggaattagcctcacatcacggaggtctcccggaactggcaaccacgctgacacagagtgttgtcatgctgtcacggatagtgatgcggcaaaatccctggcatttttccgaatacggactgtcggaaatgtcagcccgagccgggataaacaataaggcgcactttgactattccaatatgggttatgccctgctcggcctgactctggaaagaatcactcatatgaattacagcgaactgcttgaacaacgactgctcttaccggcagggatgaagaatacctacgttcccggacctcatgaccggagaaatccggattttactggcggctggtcggcagcgggactgcgtgaagccccctggtatatgcatgcgttctcacccgccggaggcgtgaggtccaccattacggatatggtgaaatatacccaggccttgttgagtggcacgttacccggcagcccatcaatggatcccagggcgctgacagatgacgatgatacgagggtcggctatggatggtttacaaccacattcagaggccagaatatcacctggcatgacggcgaaacggccgggtatgcctccgtgatcgccatcaaccggtctcaaaagacagccgtggttattttgtctgatacggcatggcctgtgataacaccggcaattcgtttattgctgattcagccgcctcacgaataa

SEQ ID NO: 199940 - DNA, 357 bp, Klebsiella oxytoca
atgaactggattgatttgttgtggatgatattaaccttatactccggattttctttactggtcaggcgtcgcctgatcataaagaaaataaatgtcctgaactatatgctgttcagcaccctgattatctatacttcagaaacattacagaccatcacacatatgtcgtcatccgggtatattctccatatgatgacctatacagcacaggctaccttactggcgtatggtatatattgctcatggccaaacccatggtttgcagaacaacaaggacgacagttgtccggaattatcccgggcattagcctttgcctcattcttatgtcatgcttgatgatcattattttcgtctga

SEQ ID NO: 199941 - DNA, 534 bp, Klebsiella oxytoca
atgctcactgttcgaacaaacatccggttaacattaatgtcagcccttctctctgtcatgctggtattgttgatcattaccccggtctggatttttctctcgggagagcagatctttatccagacggtcctggatattgccgagatgcctctggctgaaaggatcaatttcaccccgtcatcaggatgcctgttgctggcccttgtcgtgttgtatatgccagtgctgattttttcgtactgtctgtggcatggcatcaaaatcgtcagtcatgtccgtgatggacatcttcttgaccgggtattagcgctgagagtgaaaaaaattgccattgccatgacagccatcggggtaatgttaccactctgccgcttcctgttccctgtcctgatatacactgaaagtgggtattttcagataatcattgatattggcgacatcgcatgtgtactgatcggagggctgctttatgtgacgttccagtcgatgctgacagggataaaagcgaaggaagaagtcgaggagtttatctga

SEQ ID NO: 199942 - DNA, 210 bp, Klebsiella oxytoca
atgcctgttatcgttcacctggacaagttgctggttgacagaaaaatcacctccagagcactggcagcgtatgtcgggatcacagaacaaaatctttccctcctgaaatcagggaaagtcaaaggcatcagatttgaaaccctgtcgaaaatctgtgaagccctgaactgccagcccggtgacatactggaattcagagacaaagaataa

SEQ ID NO: 199943 - DNA, 732 bp, Klebsiella oxytoca
atgatccatgatcacaatccgatatatactcttatcgccgataaactggcagtgtggaattatgttcacttacacacagacaaaataaaaacagtaccgttactgggtgtttactcttcttttgatgagatagattttaacagactgccggaccagtttgtgcttaaatgcaaccacgacagcggcagtaccatcatctgcaacaacaagcaatattttaatgtttcagaagccagagccaggctaacgatggcgttaaacagaaatatgtattacagcacccgtgaatggcagtataaaaatatcagacccgtcattctttgtgaggagtacattgacctgttttgtcgccgggacagaaaggtgacgccagaagtattacgactccattgttttcatgatgtggcacattttattgaagcagatttcagggactcagcaggaaatgaatacatcaatgtgtatgacattcactggcagcgccagccttttacgatggagttccctgccacacccaatgaggttccggagcctgagttattgtctcaggccgtattcgcctctcaggagctttgtgtccatattgattactgtagagtcgatctcatgctgttaagtgatacggtttattttagcgaaatcccccttagtccacacagagaaaaactgttaatcacaccgtcagaatgggataccgtgctgggaaatttgtggcgataccctcccatgtag

SEQ ID NO: 199944 - DNA, 1230 bp, Klebsiella oxytoca
atgaaatctatattcctgcagttaacactccgcacgcggatcactgtctcatttgtattactaatgatcactactatggtgattatcatagtggcagagcagcttgattatgatgacctacgagcatatgcggcatcagaaagcttgcgcagtgatgtatccagaattgagacggaacttgcaagagggctatctccggtaataccagaaaatagccaattctatgattcgcagaccgtacctgacagattacgattgttagcaccaggctaccaccgtttaacaacttctgaaaacaagcacttgtatgtttttgagtctcaaaatcaacgctattatttgctgcaagcttacaaacagctgtggtacatagacgttatcattgatggttttggcccactcatcattatcatatgtattctttgtgctttctggattggtagactaacttcagcacgagtaactatccccataatgcaactggctgagatagttcaacgcaaggaaaaaccgttacctttccttgatgcaaaagatgagattggtattctttctcgagcatttgacaagcacagtgaagacctggagcgttttcttcagcgtgaacgctgttttgccggagatgcaagtcatgaattgcgaacccctcttgcgattatatccggagcggctgagataattgctcaccaactaccttgtgatagccatctaatcataagtgccgaacggatcctccgaacaacacaagaaatgcaacaacagctaagttgtctgttattgctctctcgcgatccacatacactgccacgatcaaaagtacctttacgtcccattatagaggagtgcgctgcacgatgccgtccctggttagaacaaaaacccataagattaatgattgatgtgccgtattcacctcatgtcattagtaacgcagagttggtacgtagcgttatctggaaccttctacgtaatgcatgccagtacactaatgaaggtgaggtttgtctggtgattaatggcacaaatatagttatttctgatacaggccctggtttaccgacgtacatagatgagaataatttcaaacgttttcaacacagtgcaaaagaaaatggagaaggccttggtttatccattgttcagcggattgtggagcatctgaactggattatgacagtcgaaagttcggagaacggttgccgttttgcacttgaaacatgtaatggctga

SEQ ID NO: 199945 - DNA, 696 bp, Klebsiella oxytoca
atgacacgcctgcttattatcgaagataatcccgaattagtggctaatctctatgcgttttttgagccactaggctatgtacttgatgatgcccgggacggagttattgggctgaaaatggcaacgcaaaatgattatgatgcgattttgcttgaccttatgttacctcgtctggatggcctatctctatgccgaaaactacgccaggagttccagaacccggtaccggtgttgatgctaactgcccgcgaccctgtttgcgatcgtgtgcaaggactggccatcggcgctgatgattatctgattaaaccgttttcattaatcgagttggatgcccgaataaaatctctggttagacgagcgcaggggaggcaggtccaggggacgctcgtatgggaagatttgcgagtagattctcggatccctcaggcatggcgacagggacaatcaattattttaacccctacctcacataaattgctgatgtgtcttgtacgtgccgctcccgctgtcgtcaaaaaaaaagaaatggagtatctgatctggggagacgatcctcctgagagcggcgccttgcgaacacatatccatgatttacgtctgagagttgacaagaacttcacattctcactgatagaaacggtacgtggggtaggtgtacgcttacagaaaaccgtaccatcctccggtaagtaa

SEQ ID NO: 199946 - DNA, 1704 bp, Klebsiella oxytoca
atgttcaagtatcttttatctttcaaactgaacccggtacaacggacctgggctgcagcattttttttcactacaattggcaacatagcactttggcaaacactatggattaatgcagattttcataatatacataatctacttttttttgtcagtctgccaatattccttttctgcttcctaagtatcttacttacaccagtcatggttatcccatatttatgcagacctcttcttgtagtacttattctaatcagtgcctgctgtagttatttcatgatgaaatacaacatattaattgaccgcagcatggtgcaaaatttttttgagactaatcaggctgaattaacatcatatttatccgttccttttctttctactctatttctacttggcattgtgccagcaattatcctagcgtcaccttcaacagacattaagcggagggcttttagaattgaattgtggtggctggcgcatatttgcatagccgtagtcttattaaccatggtaaccatggtgttttataaggattacgcatctctcatacgaaataatatgcagattaaagaccaggctttaccttttaactttgtgcgtaatactaatggttaccttaaaagaaaataccaagcatcttcaacaactctacaaagagtgggggaggatgctgtacgtccaatatattcaaatgctccaccgaaactggtggttgtcgtcgtgggcgaaaccgccagagcacagaacttccaactgaatggttattcgcgggtaaccaatccatatctatccagacgacatgatgttatcagttttaaaaatgtgtcgtcatgcggaacggctaccgcaatatcactaccctgcatgttctcgcggatgtctcgtagcgaatacaatgaagttcgtgccgcgtcagaagaaaatttgctggatatccttaaacgtactggtgttgaggtgctatggcgcaacaataacaatggtggttgtaaaggaatctgcaagcgagtacccacagatgatatgcctgcaatgaaagtagtcggtgaatgtgttaacaaagatagtacatgctttgatgaggtgttattacatcaactctcatcccgaattaatgcaatgcagggtgatgcgcttattgttttacatcaaatgggcagtcatggaccaacatattttgaacgttatccgtctacaagtaaagtatttagcccaacttgtgacagcaacctgatcgaaaaatgctcaaataaagaactggtcaatacatacgacaatacgttagtttataccgatcgtatgctgagcaaaaccattgaactgttgcaacgttattctgggatgcgtgacgtagctatgatatatctttctgaccatggagaatctctgggggaaagagggatatatcttcatggcaccccatatattattgcacccaatgaacaaacacacatcccgatgtttatgtggttttcgtcttcattcgcgcagcattccagactaaatctggcctgcctgaccagtaatgccgacaacaaatacagtcatgataatttttatcattcaatacttggtctcttcaacgtaaaaaccagtgtatataacccggagttagatatgtttactctatgtcgacaatctgatcacacaccactgtcttcttcagttgtaagagagaaaacggacggaatggttagtaaataa

SEQ ID NO: 199947 - DNA, 891 bp, Klebsiella oxytoca
atgataaagttaaaacagactttaaaatgttttgagtatcaaattttaaaaataagaagtcttattataagcgatggttattttctttcagcacgacttaaaagaatttacggatataaacctgatatccgaaaccccgtgacgctcaatgagaagatatgccatagattaatatacaatcgtgacccgttatttacttcactggcagataaactggctgtgcgaaaacacattagttcacgtacaaataaagtagaactggttcctcttatcggcgtttataatgatatcagagagatagaaccatgtgcgctgccaaataaatttgttatgaagtgtaaccacgacagtggcagtacaatcatatgtcatgataaagacacatttgattttcctatggcaatgaaaaagataaatcattgtttacgtaaaaacatgtactataaaacaagggaatggcaatacaaaaacataaagccagtaattctttgcgaaaaatacattgatatatacacctcgcagcgaagagaagttacgcctgagatgttgagggttcattgctttcacggcactatcgggtttattgaagcagattatagtgatgcaaaagggaacgaatatatcaatgtttttgacagtttctggaatttacagccgtttaacatggaatatccaaatacaccatatgtggtacctaaaccacgattgttacaccaagttgttttagcgtcccaggaattgtcagaaggtattgattattgtcgtgtggacctcatagtattagaacaaaaaatttacttcagcgagattacactaagtccccggagaggaaagttgattatatctccagtgcaatgggacaccacgttaggtagaatgtggacattgtga

SEQ ID NO: 199948 - DNA, 474 bp, Klebsiella oxytoca
atgtgtttacggtttgaaaatgcgcttccccggaacatcgtatgtgcacgcgttggtggcccatggaacgagacggtaccggttggttttcaacaaattattggctgggcacaggagcggggagtgatttaccgggaagcgctggtgttttactgggataatccagagcaaacgggtgttgccgactcgcgtgccgatgtcgcgcttacagttgatgcgcaaacacaggtggacattaccggaacggcattcagagaagaaattgtgccgggagggctatacgccgtgtggcatacgcttgtgcgggacggtgcttacgccaaagcatggagcgatttgtacgttgagattgaaaacagcgattacgaacttgcgcgcggcgtttgtttcgaaaactacctttgcgatgctcgtgatggcaactgggatcttgaaatctggcaatcggtagaaccaaagacctcaaaccgctaa

SEQ ID NO: 199949 - DNA, 741 bp, Klebsiella oxytoca
atggctaggttcacaggtaagaaaattgtcattacgggagccagcagtggtattggtctggcaggggcgaaacgcattgttgcggaagagggggaagtcatgatcaccgggcgtgatgtgcacaaactggcgcgccttagcaaggtgctgccacctgctgcccggttgctgcaaaacgacggagccgagccggcagcggcgcaagcgctggctgaagcggtagcctccttcggcatgctggatggcttatggctaaatgccgggcagttggctttttcacctgccgaaaagggtagtgccgcgctgttcgataacatgatgaagaacaatgttcgtgccgcggtactgcaaatatcctgtcttgcccgctttttgaaagtaggtgcgtctgtggtgctgactgcatcgaccgccgcatatgaaggaacaccccttgctgcgatttacgctgccagtaaaggggcacagttagcgctggttcgctgttgggcaacggcctttgcagcacaacagattcgggtgaatgcgctcgttccaggtgcgatagaaaccagtttgctcgaagcgatcccggcaccatttcgtgatcaatataacgcgcaaatccgcgccattgtgccgatgaagcgcccaggaacaccggaggaagcggccgctgtcgcgttatttttactatctgatgatgccagttatgtcacaggtagccagtacgtggttgatggtgggctgctgcgtttataa

SEQ ID NO: 199950 - DNA, 807 bp, Klebsiella oxytoca
atgaaaagaagtctgcaacagggtgttttgttctcaggattactcgtctgtgcgccgacaaacagcgcagagttgtccggttttgccgggctgggcgtcagcgcgagccccatttactccggttcaaaccacatagcaatgagaccactgctaaaggcgggcgtgaatcttcatagcgaaaactggggactatttggtttgtctaccgacgggctgatatgggaactgacgccggactcccccttcagcgtaagcctgctgttaacacaagatgaggcgcgaaaagaggtatttaactacccgttttccagcagaaaaaaccgcaatctacaaggaatgggtaacttgtctgcagcgttgatggcgggtacgtacctgcgctaccaacgagaaaactgggcgttgtggctgcgcctgttaaccgccactgaaaagcagcgatatggcggcgaagcaccgggcagaagcctgatcgccacgagcggcacggaaaccgaactctggcgctggcagaatgccgcgctctcggtcggtggcgacataagctgggcgaacagtggctaccagcaacgccactacggtgtaacggcgcagcaggcgcaacgcaccgattttgctgtttattccccttcgtcaggcctccagcaaggaggtttgtatgccgaagtggtatggcatttcgataaaaatctggcggcaggattgaccagccgtgcgcagtatctgttcgatgaagcagggagcagccctctggtcaacagccgaatgcagtacaccctgtcgtcactgatccagtacacattctga

SEQ ID NO: 199951 - DNA, 1116 bp, Klebsiella oxytoca
atgagcaaatgtcactttcgcagccgcgcgcggctgcttgctgcgggcgcggtatttatcgcactgattgccgccggtatttacctgcaacctggtttcagcaccccgtctcctcgccagacgggagacgccagtttggtgtcgtttttaacgccgttattgaaaggatcacgaggcagcgtcgccgccgcgctaatcacgccgcgcggtgtgcagtacgccctctggaacagtgattacaaccagcaatatgaaatcgccagcctgaccaaaaccatgaccagcagtttattgatggacgcgtttcgccggggtgaagcgacagcgcaaacccgcgtcggcgatcttattccggaaatcagcggcccggcgcgagaaattacccttgagcaactggcatcgcatcgctctggtctgccgccgttggcctcatcgctgcgccagaagatccgggtgatcagccagataatcctgcgtgaaaacttctgggagtatgacgaaaaatcagtcatcgaaatggtgaataacacccgcttagccacgcccgccagatttgattattccaataccggctacgccttactgggactggcgctgtcgcgagcagcacatcagacttttaattcgctgttgcaaacgcgggtttttgcgcaggcgaaaatgacaaacagcgttgttgccgaagcattaacccccgacacgcccacgtttcactacggttgggcggtgtccggatttgccgaagcgccatggatacagaacgcgttcacgccggctgccggtgtgcggtcgaccatcgtcgatatggcgcattatgcgcaggctttactggcgggtaaacttaccggtagtgcagcaatgcagccacgctttgccactgacgatgcagattcacgcgtgggttacgcctggtttaccacccgtattcgtgggcgagacatcacttggcacgacggtgaatcctctggctttgcctccgccattgcgatcgacccacagcaacgatccgccgtagtgatcctctcagataccgcgtggcccgttattggtccggccatgcgcctgttgttaacgcagactcctgctaaaacggaagctcatcatgaactggattga

SEQ ID NO: 199952 - DNA, 348 bp, Klebsiella oxytoca
atgaactggattgatatgttgtgggcaatattaacctttatctcagttattctgtttatttgcggctcatgggtcgcgcattacaaaatacggttgttgaactatatcttgttagctttgattgtcatttattgtgccgaaatgatgcagacaatcacgcatctgaccaagaccggttatctgttcagaatgctgacatggaccgttcaggcgtcgtttattgccgtaaatatttatcgcgcatggccagcgccctggttaacgtgcagcccgcgcgtactgtcggctggcaatattgccatttcgctgatgcttatgtcatgcttgagcatgctggttttaaaatag

SEQ ID NO: 199953 - DNA, 408 bp, Klebsiella oxytoca
atgcttgaatttgccgaaatgcaagcagaaagccagccagtggctgccgtatcgtcgcttcaccagttactgctgttgattattctctatttccccgttgggttatttgcttttgctatctggcagggaatgcaggtgatgcgcctggttggtaaacggcaaatccccaacctggcgatggcgcgttgtgtacgtacaattgcattgatgatgctaagccttggcattgtattgtcggtgtgccgctttttaataccactagttgtctggtggccggaaaaatattaccagatcaccgtactggttggcgatgtgatccttttactcaccggcgacttgttattcgttacgtttcacgatatgcctgcggggagcaaagcagaagaaggatccaagggatttatctga

SEQ ID NO: 199954 - DNA, 723 bp, Klebsiella oxytoca
atggatactaaactgaacaagttcatgcaattggcctttaacaactccagcgccaatgaggccacgcaagcattaaaaatgcttgctgctgcgatgcaggagcagtgcataaacccggccagcttattgcaaattaagagcgactccgccagcagcgttttggtagctgagttgcgtcgtgagctttccattctcaaagcagattacaacggcatgatagaccgttataacaccgttgtacgcgcccataaggcacgcggcgagaaaattgcagctctcgagttgtcgttgtccgaaaatggtattgcagcggcacaaaaggccgcagagacgcagcaggaagcatctttctcatcagagggatctattgctgatcagatccgcaaaatgaagagcggcacggcggatctagctaaccatccgaaagcaaaggccacgaggcgcctgtcagatgagttggctgcgcagaatgagcagtttaaagggcgttggaactaccaagaacccagccagaccagcaagtatggtgatgcacattattgctatgactacggcgacaccttacatatgtggatatgtaaatcggaaaataacgacggattttcagtaagtatcgcgacctttggcccacgtggaggcaaaaagggcagtacatataaatcttttaacgacgaagcttcattgatgaactggttactgaaagagtggggggtgttgaagtga

SEQ ID NO: 199955 - DNA, 801 bp, Klebsiella oxytoca
atgtgttttctttgcggcaatgatgtatcccagcacaacttcaatctgcttcagcagcgttacacaaacctggagttagaccacgactcgttgaaaaggcagcgcagcgagtacgaggcggaaatccgcgtgcttaaaaatgaggtctccgccttgcaggagaaaattgacgtgcgagacgacatcgttgacgacaacggctttgacaatgactgggggaacagtctggaaaacctgcctaaagttctctcgcgcccgacgatcttttctatgttcaactacctgctggggaagatcggtgagggtgattacaccctaaacgatcgggaaaaaattaaaagtgactttaaagagtatggcgagaatctgttaaagatagagcgagtcaccgacgtcaaagtcacgctccttcagcagcgtaaatgggatgaagggaagccaatacagataggttttgagattatcatggatcatctgcatgctcacgaaattgaggtctttaaatcaatggcgcgaggtgagtattccgatgccgttaaggcgagttcagaagaatggggctacctagaacttaatttcgacggcggtgcatgtgccctcttcttcattggtttcggcatgtttggcaatgacaatacgccaaccatcatgctgaatgtcgatgtcttcaatgaaactctatcggaaagcaactttaaggtaccggcggaggtggagaacctagtttcctgcctcagctatgagtgcaacatgaacaaatgggctaccctgaccgccgcgcagccacagcgctttaggtaa

SEQ ID NO: 199956 - DNA, 1092 bp, Klebsiella oxytoca
atgggcggagaaactaaaaatattgatgaaattgctgggattatttccagtagaattttcgatgaattaggttggcaatgccaaacgacgacggatataagctgggattgctgtttgatgtcgcatttaagttcaaagcagcaacttgccgaaaatcccaaaaaaacacacccaacagatgtcgtgtttaagtacaaagatccatattctgacgaagcgcaatatattcaaaccgacttaaaatcttattgtgcaaaaactatcgagggttccagaaccatactttcagcaatccgtagtttatctcagcaggtagagtgcgctccaagaaatagcacttggaaaaaaatatttttggatagcgccaccgaaaaattcaacgtgcatggtatgttattcatttataaccatgataatgaatatgacaaaaatctttacgagaggatatctggagctgcgacagcacaatatagcatgccagaaaactcgttaatagcgatctttgctcctaaactgataaggtttttactggacgtaaccgaaaatatcgaaagaagaagggcttatactgataaagtatctcaggataaaaacttcttatggagaaaaatccctgatatagaaagatgcaccttcttttaccctgacaagcataacaagattgctattaaaggaaaaaatcttcctgccacattggaaatgattacatcgggcatgcttctttactcttatgagcataactttgttagggatgatgaaggcaacagaataacaaacaaacttcttaatatcttctggcaagaagaagttaattctaatgagcattttatttttatattggagtatatctttaattatcaattacttaatcagtttgataaaatattcattatcactccattttcaccaacatctggtgactatcttaactccgccatcaatgattacgctggaatttattcatttaataaaaatcatgttgatacactgagagataaaatagtttccattccctttgtaaatcaaacgctttcaatatttgagtatcaggttgcaagcaaacaggttaacagagtttgtaatttttcttga

SEQ ID NO: 199957 - DNA, 645 bp, Klebsiella oxytoca
atgattaaggttaaaatttacaaggccgataaatcgttatctctcaatgagataataaataaaattaacgacaatttatatagcgatgataaaggttatggatttcatataattgataatggtgaagtgcttgaagtaagatttaccatgcgtagtatcagcacacagaatattgaatacgcgaatggtgatctcacggaacttgaagttgcttcttacttgcatgttaattttggcatcaggcataataaaagcattgtactgtatgctataaatcctccattaagcatgaaaataccatatacgatggttcataagctgtttggtgaagatagtggcttaaaaccaatagatcttgatcttagaaaggttatagatggtttatctagcaattttgagctaaagataaagtccatttccctttctaacattcctattgatgcttacactttagctaagacaaaaatagtgagttccaaaagcctaagtgaaatctatagagagaactatatgaatagcaacgctcttctagattcagtccacttttatgtaaatggtattgaaacggagatgtcgagaactggaagattccgggtgagagaatctcagttaccaacgcttctttcgattcttgaatctttatag

SEQ ID NO: 199958 - DNA, 786 bp, Klebsiella oxytoca; identical to SEQ ID NO: 166898

SEQ ID NO: 199959 - DNA, 1584 bp, Klebsiella oxytoca; identical to SEQ ID NO: 166897

SEQ ID NO: 199960 - DNA, 1029 bp, Klebsiella oxytoca
atgaaattttcggtatcgagaagaacgactctgctcagcgcattattaatcctgatgatgacgatgatatttttcgtctggtcgacaatgctgaacaatgatacccgtaccaatgatgcctatgtgaatgcggattacacactggtagcaccaaaagtatcgggttatatcaaaaatatctatgttgcggataaccaacgtgttaaagcagggcaaacactggccacgctggatgaccgtgactacaaaatagcgcttgaaatggcgcaagctaatttgcagcttagtgatgcaaaacgcctgagcagccttgcacaactggagcagcaacaatccattattgctcagacaaaagcgacccttttagccagtcaggcatcggcgcagtatgccagtcagaatgctgaacgttttaataagctttatcaaagaggtaccgtcgctgcggacgatcaacaaaaagcccattcaacacagcgttctgcatccgcagtcgttcgtcagaacgaagctgctctgacctcagcagagaaacaggtaggcgtgttgagggctgcattacgtcaggcggaagccgatgttgcagtcgcgcaggcaaaagtcagtcaggcgaggcttaacctttcttatacgcatattgttgcaccagtcgatgggatggtaggccagcgttcggtgcgcctcggagcgtacgttaacgcagggacacgtctgctggccgtggttccgctacatcaaacttacatcactgccaattatcttgaaacacagttggcaaatgttcagcaggggcagaaggtcttaattaaaattgatgccatgcctggcaaaaagtttactggacatgtcgatagtatcgctcctgcaaccggcgcaacgttttcagccatccagccagacaatgcaacgggtaactttactaaagtcgtccagcgtttaccggtgaaaatagtgctggatggtaatcaacccgatgcaaaattattgcgcgtcgggatgtcagccgttcctgaaattaaaatccgctaa

SEQ ID NO: 199961 - DNA, 1380 bp, Klebsiella oxytoca
atggggtacaaagagatttatgcccgctatcgtcagcaaattcaggacggccttttgaaaccgggggagcgcgttccctcaattcgttcgctggcgagcgagttgcaggtcgcgcgaaaaacggtggaaaccgcgtatgaaattcttactggagaaggctatttcgtaagtctgggggcgaaggggacctatataaatccggagctccggctgacctcaacggtcagagaagacaattatgtatcgtctcgttcacttgacacgccggttactgaaaggaagggtgatctccgactcggcattcctgcactggatgaattcccccataaaaaatggctgttgatatcgggaaaagcggcgcgaagtctgcgtccggaagaaatgctcatgcccccggtagtgggctttaagccactacgtgaggccattgcaagttatctcactatttcaagaggactgaattgccgaccagagcaaatcttcgttaccagcggctatcgtgccaatttacggtttattctgtcggtacttgcacaacctgatgataaagtgctgtttgaagatcctggctacttttatggtcagcaattattgaagcgaatggcatccaaactgcactatatacctgttgatagacagggcatggatgttgattatcttcagcgctatcacaacgatgcacgcttcgctatcgttacacccactcatcaaagtccgctcgcagttagcctttcattaccgcgtaagcatcagttactgtcctgggcacagcaaaacaatagctggataattgaagatgattacgacggagagtttcactacacacgcaaagtaatcccggcgttgaaaagcctcgatacgcatgaccgggttatttataccggtacatttagtaaaacgataatgccagctatgcgtatcggatatatggtagtgccacaggagacggtagcccgtttcagtgaactgggtgaaatccttgaaacgggtctgccattactaccgcaaaaaatccttgcacagttccttagtgaagggcacttctaccggcatataaaaaagatgcgtttactctaccagcagcggcgtcgcatgatgcttgacgcaattgaaacgacctttccaggtttttttgaatttgagcttacagatggcggtatgcatattgttgccttcctgcaacgtggcattgaagatactgcattagctgcattatggacacagcacgagctttacgtccggccactctcgagctggtatgcgcagacacgaaaacgttatggattagtcattggatacaccaatattcgttcaaccgaggaggcgcagaaaattttgcagcgtgttaaggaaaaaacactggcacttatgcagcattaa

SEQ ID NO: 199962 - DNA, 426 bp, Klebsiella oxytoca
atgaagattgtacattacgacaccgtcattgaccttgcccgttgctttgcgctgatgcaggagctacgcagcaaactaacgaatgagaaacaatttatcgcccaggtacagcgccagcaggcgcaaggctatcggcttgcaggactggagcaggatggcaaaacaatggcgctggccggttatcgactgctcgaaaatttcattcacgggcaattctgttacgtcgacgatctggtaacagtgaacgaggctcgcggtcaggggatgggtgcaacgctgttgaatcacttagcggtcatcgcacgtgaatacggttgtggtcagatggtccttgataccgccattagtaattcaggagcccaggcattttatcagcgtgtcggatataccgccctcggcctgcattattatcgcgatctcacttga

SEQ ID NO: 199963 - DNA, 606 bp, Klebsiella oxytoca
atgaaactgcttcacattaaagtcagcccggatttatcaggatcgacatcccgtgtggcgtctgagcgcctggtagaaaaattacgcgcgcatcatgccgggcttcaagaatcagtgctggacctggctaaaaggccgctaccacatcttgatgcatttaccattgctggtttttttaccccaccagacctacgcagtgaagctcagctcaccgctattcagacttcggaacaactggtagatcagcttttagattgtgacacgctggttatctcatcaccgatgtggaacctcggcctgccttctgtgttaaaggcctggttcgatcatataacccgcgccggacgaactttcgcctttacgccagagggcaaaaaaatagggctcgtcagcggcaaaaaggtgtattgcgttgtcgccagcggcagcgtatttgcacacggtccatttgtagcggatgaccagtttacgccatacattcgcgtagcgcttgaatatattggcattaccgacgtgcaatttattcgggtagacggtacgcatgatcccgtcgctcgtactacagcgttacctcatgcactgcaaaccattgatcgtttattttaa

SEQ ID NO: 199964 - DNA, 480 bp, Klebsiella oxytoca
atgtcgtcacgtgtgaatcattttaaaaccattcccgcactggctaaaacactagccgatgcctctatggcattaggaaaagtctcgctggataaaaaacttaagcacttagtggatatccgtgcctcacagatgaatcattgtgcgttttgtctggatatgcacgttaaagaagcaaaaatgcatggggagcgtgaactgcgtctttatcacgttgcaatctggcgggaatcgccactgttcagcgccaaagagaaagctgctctggcactgactgaagcgttgacacgcattggtgataatggtgtaagcgaagcgctttacagcgaattacgcgaacatttctctgaagtggaagtatcagagttaactttcaccattgctgtaatcaacgcctggaatcgtctccagattttatcacagatgtcaccaggatcgatggatagcgcttacggtctggatcgtgctgaattacattaa

SEQ ID NO: 199965 - DNA, 450 bp, Klebsiella oxytoca; identical to SEQ ID NO: 166891

SEQ ID NO: 199966 - DNA, 1362 bp, Klebsiella oxytoca
atgaagtcaccatcgttcaaatttatcgacttgttcgccggcttgggcggatttcaccttgccttagataggctcggtgggcaatgtgtttttgcagccgagtggcaaaaacatctgcaggacctataccagattaatttcaatcttcgtcctgaaggagatatcactctgatatctccttgtgatgtgcctacacatgacgtgctgactgcgggttttccctgccagccattctccaaagctggggagcagcttgggtttgagtgcacgaaacaaggtgacttgtttttcaatgtggcagcaatactcgagcagaagaagccgagcttctttattcttgaaaatgtaccgaatctgctcaagcatgatgaaggtcgaacttggaaagctattcaggagatcttaggattaggtccaaaaggacttggctatcacattgctgcggaacgcttctcaccgcatcattttggtatcccgcagattcgagagcgcgtatatatcatcggctcacgaaagcctctaaaagatttttcttggccccaaagaaacccggtagagacaaccattgacagcattctagatgatcatccagctaatgcgaagccgctttctgcgcaggttttagactgtctaaatgtctgggcagattttttgaaacgctgtccagcagatgttgaattgccttcttatccgttatggtcaatggagtggggggcaacatatccatacgaacaggaaacaccctacgctttaaaagaggactgtggtattgatggtctgaaggggttttcggggagccatggacgtaaaatcggctacctgcgcactctagaagaacgttggttggcgttgcctagccatgcgcgtacccctcaacggaggtttcctaagtggaagatagatttcattcggcagaaccgccagttctacgctgacaataaggaatggattgatccttggatgaaaagtatcttgaagtttccgtcgagccttcaaaaattagaatggaatgtcaagggtggaaagcgcgatctgtgggaatacgttctgcaattccgagcatcaggagtaagggtgaaacgccgcaacactgctcctagcttaattgcaatgactgacacgcaagtgcccataattgcatggcaacagcgttacatgaccccggaggagtgtgctcgtctgcagagtttagacgaattaaaggctctgccatctacgcctactaaggctttccatgcacttgggaatgctgtgaactcgacagtcgttgagcgggttgctcgtgctctgttgggggattttataggacaacctccggcaattagagacattaaaattagcaatggaaaggtcgatgcatga

SEQ ID NO: 199967 - DNA, 1599 bp, Klebsiella oxytoca
atgacggatagtcaaaagtctagccaattaccagctattgaaatccgacccgaagtaacgatgctctcggtgctacgccatctaaattacaagccatggtttgccatggccgagttcgtcgataatgcaattcagagtttgatcgccaacaatgatcaattgcaagtattgcatggtggtaaatttcaactgaaggtggatgtaaaaatagatacttctggccctggcattattgttattagtgacaatgctgctggaatatcagaagttgattttcctagagcatttcgggctgctcaagttccagaggatcggagtggactgtctgaattcggcatggggatgaagagcgcggcatgctggtttgcagagaaatggagtgttcgcaccaaagcaattggcgaatcagtagagcgcacaatatatttcgatgttagaaatattgtcaaaaacaagattgaaagtttgaatactgaagttcgtaaggtcgacccattatcgcattacacagtagtgactctccgaggcctacatcacatgccacaagggcgaacggtaggcaagattcgggaccacttagccagcatttatcgaatgtttttaagagatgggagactatcactacacttaaatggttcatcgctttcatataaatgtcctaatatactcactgcagttgcctatacatctcccggggtgcaagcgcaaagtgataacgtggtgcctgttgaatggcggaaagatatcgatctggattttggtggaaatcagcgtatcacaggttttgccgcactacgtgaagttggttcaacaccattggccggttttgctttatttcgtcgtgacagattagtagaaggtagcctggacgagagctatcggcctagttatgtattcaaacaaactaacagttatccttatcaaagattgtttggtgaactgcatgttgaaggatttgaagttagtcatacgaaagatggctttcgctgggaagaatacgaagatatttttctggaatatttgaaagctcaaatcgaagagcctccactgaatttactcgctcaagccgaaaattatcgggcacttccttcacgaaaaactatcgagacacgagctgttgcagcgactgccgccgttgcaaagtacgtcgaaaaagaagtagcaccgctgttgattgaggctaataaatatccaacagatgtaaatgaattgccgtccgagctcgttgcaggagaactccaggcatctgagcgtgttgtcgaagttaatgatggcaattaccaatgggtgataactttgagaacctccgtagatcctgcgacagaggattgggtttcagtcgcaattactcagcagcccactgactctggcgaggacatccggcgtttgactattgatctttcattggctcatccattttccgttgaatttttgggtgtgaacaatgaaaacgttgaggtattgctgcgtatttcaacagcgatatgcattgctttgatcttaacggaggatgtttcaggagagtcaccagagagttttctttatcatttcaactacttgatgagaggtgctctgttgagaacctcgctagagaaataa

SEQ ID NO: 199968 - DNA, 2259 bp, Klebsiella oxytoca
atggcaacctctatcgaaatcctaaaaactcttcaaccacctttacgttgggtgccggaaaaaaaagaaattactgaggattttcttcgaagcaaatccaatgatcctaatggtcctagctacgaggatttaactgatggtgtgaactctgtgcttcaagaagcacaaagaattcttggtcgttgcttgcctccgacagaactctcagggagagaaacggggttggtagtgggttatgtgcaaagcggcaaaacaatgtcgttcgaaacagtaatttctctggcacgagataatggttacggacttgtcattgttttagcaggtacgaagaataaccttcgtgatcaatctgaaaaccgcttgaagaaagaccttggtatcgatgatggagagaactggtatcactattccaatcctaccgataacgttaaaagacagatcgaagataaacttgttgcttggaagaaaaaacctacaaaaaaagccattttagttactgtgctcaaacatggtggtcatctcgaaaatttggctactttagttaaaaagttgtcagtatcagatgttccatctttgattattgatgatgagagcgaccaagcaagtttaaacacgaagtcggctaagattcgtagtggtaaagttgcaccttcagaaatgagtacgacctacgaaaaaatttgtaagctacgtgacaaactcccacatcattcatatctgcagtacacggctacaccacaggcgaatcttctactagcgcaaactgatttgctgaatgcttcgtttgcagaactggtgacaccgggtgaggcttatacaggtggaaagtctttctttggaaagggtactcccctcgtcagagaaattccatcagaggaagtacccggacccacgaatatattgaaagcgtcacctaaaagtttactgagtgccttacgttatttcttattagcatgtgctcatcacgcgttgacgcgtgagcgaaagaaagacagaaatcgctcaatgatgatacatccggcgatggcgaccacatcccatactcattacaaggattggcttgataagtccttaaagacgttaaagtcattcgtcgaaactcaatatattaataaaatcgatgctgtgactcagatgtttcaacctgaatatgattcgcttaaaaaaacatatccaaaaatcaaaccattgattgacttgatttccgcaatggttgatgaagtattcagcgaaatgaatcatgtcgtggtcaatggaactaaggacgcggagaaaaatattgactggaaagccactccatactggattctagtgggcggcgctaagctagatcgaggttatacaatcgaaggcctttgcgtgacctatatgccacgtcccttggggacttcacctgcagcagatacactgcagcagcgagctcggtttttcggatacaagaaatcatatttggggctctgtcgtgtttttgttcagcggaatgtgagcgaagctttcaccgagtatgtagagcatgaggagtttgtccgagaggctttagagaattcacgaggcaaacctctttctgactggcgccgagattttgtgctcacatccatgcttaaggctactcgtgcaaacgttattggactcggtacgcgccgaattccagctaatggctggatggtgcctgatgttctgcaaagggatgataatgctgctttagccaatcaaaatttgctttcttacgtggtaaagaaatggactgctgaatatggttctcctgtcaacgcagccgaattttctcaattcaaaggcggtaaaaatttatcaccacacttcatgtttgaccctatcccattaaaatcggtacttgaagattttctgcttgaggtaaaagttaaagatccctcagatgctgaggaacatagtgcgatgttgcttgcgatagctgcacttctcaggaggagtccagatctcaaggctgatgtatttcttatgaacaacctagtagcgggttatcgaacacgatccactggacgtggcgtagaagctaagcaccgttttgcaccaattaaccagtatttcagccaaagtgcagacactgttaatgacaggagtttttgctctaatgagcgtgtttctatccagctacgtcgattcaatttaggtacgacgcttcgtgactctggtagtgccgatattaagaatgtaacttggtttgcattacatgtgccaagcaagttgaggacggatttactaatcgaggcgcgccgttag

SEQ ID NO: 199969 - DNA, 975 bp, Klebsiella oxytoca
atgagtatcttcgataatttcttaaatttgccttgtgccacgtcagagacgagttttacggcgatccccttatccacacaccgtaatgactttctcgcaaaaggttctgatggctcccccatttttctattgcacgatgccagcgaagcacaatatagccctagtatgcagttcaggtatttgagtgcgcagtttcatgctacatgcagaattcataccgatgataaggtgttagaggatcaatttgccctcgtttcttgtgatagcgctgtgacggatctacatgaaatatttgtgcgttgtttcagcgctgcgatcgaggagctacctagtaattctggcacgcgagaattgaatacttgtattcagaaactagtggatctttttagggccctctctcagccaagtgggaaagacgttctgggtctgtggggcgagctctacgtaatcgcaaatagcggcaatattgtgggcgctatggcaagttggcacgaagatccattcgatcgctttgatttttcatgggagcatggatgccttgaggtgaaggcatccatgcaatcagctaggcttcataccttttcgcttgagcagttgattaaccctaaacaaggaattggttatgttacgtcattgctattacaacctttgaccacaggactcgggttgattgatcttgcgaatttgattgaaatggaagtgaaacattcatcagcactgaagctgaagctttggaaaaatttggctaaggctttgggcggggatttttctgaaaaactggataagcgatttgatatctcttatgccgatcgtaatgtcattgtgtatgcaatggatgacgttccaaggcctgaaaaaccaattgatccgcgtgtaatggcaattcggtttaccgcagatcttacggcaacatcgtcctcacttaaaaaaagtgatttgccagcattgtgcggcatttttggatcggtattgtga

SEQ ID NO: 199970 - DNA, 1203 bp, Klebsiella oxytoca
atgagaaatgaagcaactgaagctgtatccgcgagtttgaatagttcggaacccaaagaatccgcatggatggccgttatttcactgactatgggtgtgtttggcttgctgactgcagaatatcttcctgccagcctgttgacccccatggctgccgatctcggtgtgaccgaagctctagctggtcaggctgtgacggtaacggctgtggtggccctgtttgctggtctgatggttccccgcctgacgcgtaattatgatcgccgaaatgttttgcttggttttaccgtgctgatgattgcctccaacctgctggtcgcactttcatccagtctggctgttctgttagtcatgcgcattttgctgggcatcgcgctgggaggcttctggagtatggctgctgccgtcgctatgcggctggtccctgctaaaagcgtcccgcgcgctctctccattatttttagcggtattgctgtcggtaccgtggtttcgatcccgctggggagctatttgggtgggctttatggctggcgtagtgcttttatcgctgcaaccgcagtaggcgtgctgacactgatttttcagctgtttacccttcctggaatggctccgcgtagaatgatgataacagcctctgtcatggatttactccgtcgcccaggcattgcgatgggtatgacggggtgtgtgattgcccataccggtcagtatgcgctgtttacctatattcgtccggctctcgaaaatattgcccaacttgatgtggatcgtttgtctttgatactgcttggatttggcatcgctaattttatcggtacgctgctaaccgggtggctgatggagagaagcctgcgtctcacactgatactcatgccagcgcttgtcggtttcgcggcattaagcatgattttgctgccactagaggaaaaaggattggtgttgttcgtcgcgttgtgggggatggcatttggtggcgtacccgttgcgtggtcaaattgggtagcgcgttccgttcccgatcaggctgaaaccgctggcggcatggtagtcgcagcagttcagtcctcaattgcggcgggtgctgcgttgggaggattactctttggtatcagcggcgtaacaggtgttttcatcaccgctggttgcataatgttttttgccacgctcgttattggactaaaggtgagggtcgctctgacctga

SEQ ID NO: 199971 - DNA, 1023 bp, Klebsiella oxytoca
atgatgctacatcctgattttttacccgaaactccgattatgcatgtgaacagacattttgcccttacatccgagctcatcagtgaattgctgctggaaatgcgcctgcgtggcgtgcagtatcgccgtttacagactggctctgagtttggcgtgggttttagcaacagaccgggacatgcctattttcattacatcgctgtaggtactgctctgcttcgcacacacgatggtacattgcacgaactgaaagctggcagcatggtattcatgccgcagggtgaggatcaccagcttgtatcggatgtcagctgttcatttcaacatatcgacacgttaggctctgctcctttaggcgaggccgtcagcggaatcaatacttgcccgagttcgcatccgacacccagcacggttctgttttatggctgtatggagttcgatctcggtggaatgcagggtcttggtaaactgatgccgcaagccatagtggttgaggcaaatgaacagatctatccggggctggttcccattctgggcgcgatgaaatttgaaatctgttccggacgcgctggcttcgcgggcattctggcccgcctcgcagaagtggcggctgccatgattgtgcgtggatggatcgaaaacggcagcgagaacgcagctggcctgatcgctgcgttacgtgatccacgactcgcccgtgcaattctggccattcatcgcgatacgggtcgggagtggtctgttgctgaacttgctgcacagtcacatgtgtcacgttctgtttttgctgaacgcttcaaatcaatcatcggcatacctcccctgcgctatgcaagggaggtgcgaatgcgcatcgcaggtcactggattattcacgataagatctcaattgacaccgttgctcttcgcctcggctatgcctcacaggcagcgtttagcagagcttttaagcgcatcaatggatatccgccgggcgctatgcgtcagcgaccagcaagaggcgttaatacagtaaatgagtga

SEQ ID NO: 199972 - DNA, 918 bp, Klebsiella oxytoca
atggatcggattcaggctatgcaggttttcacgcgggttgctgaagccgggagttttgtacgcgcggcagaaacactgtctctgccttcttccaccgttaccagtacgattaaaaacctggagaaatacctgcaggtgcgtctgctgaaccgcacgacaagacgagtcagccttactcctgaaggcctgcagtatctggcacaatgccgggagatcctgtcgctgattgagcatagtgaatccagcctgaccgattccgtcagacgccctcaggggcggctgcgggtagatatgcctggtgggatcgcccatttcatcgtcatgcccaacctaaaagactttttcctgctttatccggatatttacctgatgattggcgtgagcgatcggcaggtcgatcttgttcaggaaggggtggattgcgtcatacgaaccggtgaattaactgactccacgctggttgcccgtccgcttggccggtttcgctgggtgacctgtgcctcgccggactatctcaggaagttcggtgtccctgagacgcctgaagcgttgtcacagcatcgggcaattcattacttttccggttcgggaagacgcgctaatgaactgcgttttactcgaggcactgagaccttctctgtttcggttgagggggatgcagccgttaacgaaacgggactctacattagattgtgtcttgagggttttgggctggcgcagcttgctgagaatgtgatttcggagaatctgcagcaaggcaaactggtcgaggttctggcggactggcagccaccttcagtgccagtgacgatgctctatccgcatcagcgttttctctctcccgcagtgcgtgcttttgctgactgggtcgccgggctttttaacgatggcgcaggtcaaaaacggtcttctctgtaa

SEQ ID NO: 199973 - DNA, 1398 bp, Klebsiella oxytoca
atggccggttacatcagaaatattgttaacaatcaaaatgtcacttcacaggctacgttggttcgtggcgcgacgatactgagcatggacgagaacatcggtaacattgagcgtggtgatattctcatcaacggctcaacgattaccgccgtgggccagaaccttgatgtgccgggtgcgcatatcattaatgccaccaatatgattgccatgccgggaatggtcgattctcatcgtcatgcatgggaaggacagctgcgccgcattaatccaaacgccacctgcctggacgactacagcaacgccacacacttctcgttcgctaaatattaccgtcctgccgatatctatgtcggcaacctgctgacggcgctgggcgctattgatgcgggcatcaccacaatgatcgataactcgcacaacagccgaaccgcagcgcattccgatgccgccgtcgaggccctgcttgataccggcattcgtgccattcatgcttccggcgcaccggtagcaggcgaatgggataaagcgcactggccgggaaactggcagcgtctgcaggataagtatttcaccgacaaccctgaaagccttgtctctctcgccgtcatggcccagctggagccggagttgtgggccgaggcccgcaggctgggactgtcgattgtcactgagttctttggcgctgagatggggtctgaacttgagtcactacatcagcaggggctgctgggtccggacaatattttcaatcactgcacggcgctgcccgaccggggatggaaaattctacgggaggccggtgtccgggtgaatgtctgcccgcgctcagattcgcactatggcatcgaaagcgggatgttcgccattgaggccgcgcagcgtcatggcatcaaccctggcctgagcgtagacaatgaaacgtcgtacagcaccgatatgtttatggagatgcgcgtcgccttttacctgcagcgcgtgatgggcatgcatcagcagcagtgctgcgattctgaacatgcgctgaaaacgcttccggcggcgcaactccttaaagccgcgactcttgatggcgctgcctgtgcagggctgcaggacaaagtgggcagcctgacgccaggcaaacaagccgacctggtgctgattagcgtcagtgatctcaatctttacccgtccggcaatgcctttggcacggtggttcatgccgccgagcgcagcaacatcgacaccgtcatgatcggcggacgcatcgttaaacagaacggtaaggtgctgggcgtagacagcgcgcgactacgtgcggcgattgatgagtcgcgtgagcacctttttgcagcctctggctaccagcctgacatttttgctgacaccttcctgccgctggtgcaggccgactga

SEQ ID NO: 199974 - DNA, 861 bp, Klebsiella oxytoca
atgttttcaattgcagctgaggtcaggaatacgctcggagagtgcccgctgtggtgtgaaagaacccgcaggctctactggactgacattgaagccagtgaactgctcgccatagaagaaggcaatgatgctgtgatgcgctggtcgctgcctgaacgcctcggctcctttgcactgactgaacaaagtcacattctgctgatgggattcgcgtcaaggctggctttctatgatctcaacagcgggttaattaccccagtggccgcttcaccgggagacaccggcacccgcataggtgatggacgatgtgaccgtgccggtaattttgtcttcgggacgatggatgacggttatcccgttaaagtcatcggtaagtttcatcgactcaacgcggcaacgctgactgttgagatgcttgcactgcccgatgtcgctataccgaacagcatctgtttcagccccgatggcggcacgctctattactgtgactcgatgcagggtcggataatgtgctgtgattacccctcgctgcagaaccagcacgtgttcgccgaaagcgaaggcagcggcgcgcctgacggctcctgcgtggatgagatgggctatctatggaatgctgaatggggggggaaccgtgttgtccgttaccgcccggatgggaccacagacgctattctgacgtcacctggaatccagagcacctgtccgacactcgccggtgagggttttacccgtctctattgcaccacggctacagtgggactcactgcgctgtctgaatatgacggtgcattgctcaaagctaaatctgatctcagtcccggattacctgaaaaccgctttgcggcacacacagtttaa

SEQ ID NO: 199975 - DNA, 198 bp, Klebsiella oxytoca
ttgacgccggggctatctatagttaatggtaagatttgttgcgtgacacttagaacactaggaattggggggctggggttagttaaccacaagctgaaccaccacaagtcgccctccttcctcgggagagagaataaactgagcgttgtcattcagacggagcttatcaccaatggctaccactttacggtcgggtag

SEQ ID NO: 199976 - DNA, 390 bp, Klebsiella oxytoca
atgaccggggcgggaaaactggtggcggatcacgtgattggcatgctggggcaaaactcttcgccgtttatgctgctggtggtggtctttgcgctgtccatcattatgactaatttcatgtccaacaccgcgaccgtcgcgctgttagtaccggtgagcctgtcgattgccgcgggcatgggcgccgatcctcgtgcggtgctaatggcgacggttattggcagttcttgcgcctacgctacgccaatcggtatgcctgccaacatgatggtgctgtcggcaggtggctataagtttgtcgactacgccaaatccggcatccctctgattatcgtttccaccattgtcagcctgattctgctgccaatccttttcccttttcatccgtaa

SEQ ID NO: 199977 - DNA, 1221 bp, Klebsiella oxytoca
atgccgaagttagcaacaaaactcactgacacagagatcaaaaaggccaagcccacagagaaagagttcacgctatgggatggagatggcttgttcctgcgtatcaaaccaagtggcaaaaaaatctggcacctcggctataccgttcctttaaccaagaaacgggccaaaatgagccttgggttctatccctacctgactcttgcacaggcaagagcgctccgggatgaatacctctctttgcttgcacagggtatcgatccccaatcccacaatgagcaaaaagctaaagcgctcaaagatgccactgaacacacattccagacagtggcgaaaaaatggcttgatgaaaaaattaaaacatcaggcatatcgcaagatcatgctaaggatatctggcgtagccttgagcggaacatctttcctactttaggggaggttcccattaaagagatccgccctaagatgttgaaacaacatcttgaccctatcgagcaaagaggtgtccttgaaactctacgccgtataatttcacgactgaacgaaattttccgttatgcggccacagaagagcttattgagttcaaccctgcagataacctcacacagcgtttcagcaagccaaagaagcaaaacatgccagccctccccccaagtgagctacctcgtttcatatcagcattagcaaacgcttctatacgtttagaaacacgtatgcttatcgagtggcagttattgacttgggttcggcccggtgaagccgttcgggcgcgttggactgacatcgacgaagagaaccgattctggaacatccccgctgagttcatgaagatgaaacggccccacaaggttccattgagtaaggaagctatgcgtattcttgaatccatgaaaccaatcagcggtcatcgtgagtgggttttccccagcatcaaagctcctcttagccatatgcacgagcaaacagctaacgcggcgatcatccgcatgggttttggcggtgaactggtggcacatggtatgcgttctattgcaagaacagcagcagaagagtctggcaagttcagaacagaagctcttgaagcggctcttgctcactcgaaaagagacgagatcgtcgcagcttataaccgtgccgaatatcttgctgaaagagtggcgttaatgcagtggtggggagattacgttttggcgcaaaaaatgaagtctttagcagcctga

SEQ ID NO: 199978 - DNA, 1479 bp, Klebsiella oxytoca
atggctactacacaacaattgaaagtaaaagaactggttttagatcttaaaaattatcgaacagtcgcccaagataatgaaattgatgccatcaaagctatgattactatcagtcctgattatttttgggggctaatgaatagcttgcttgatgatggatatcttccaacagaaaacattatcatacttcgcgaaaataacgtagatcttgtaaaagagggaaatcgtcgcattgcttcacttaaaataatacatggatatatagataagagtaattttgatttgccatcagaaatagaaaccagaataaatgagttgcctgacacatggcgagttcaaaatgaaatggttccatgcacaatttatgatagaaatgaggcggatttagtcgataaaatcgttacccttactcatggcaaaggtcaaaaagctggacgcgatgactgggaaaccgttgctcgagcgagacataaccagcaagtaaattcagcccctgagtatggtttaacactgcttgagaaatatcttgaacatggtcaaaaccattcaactgaacaaaagctaagatggtcgggaaaatataacctatctgttttaaatgaagcgctccctaaaatatatgagagagttgactgcacttcagttatggatctagcactaaactatccaaacataaaatataaaaaagaattagaatcagttatctatgctattggtctagaggaattgaagtttcctgatattcgtacatccagtgatttcttaatacggtacggatttccacctctgaacacgaaaaaaaacacgactaatatcaactcaaataatacatcttcatctactccaaatgcccctacagggactaataactcatcctcaaatacttcatcacagaatagttcaggtagctcaggaacaaatggaaccgctgcgaatagctcaacgccaaatagcaacacttctgcagcaaataatggttcttcgtctgcaaaaaaatcagccacctcaacaaacgatataaaaacagtaagaaaattattgcgtagcctgaaactatttggaccaaatagatctaaactattagatattaaaaaagaaatggtaaaattaaagcctgaggaacaccccattgcatttatttttcttctaagatgtatgattgaaatatctgctaaggcgtattgtgatgacataagttcatcccaaggctctccaaaatatgttaaagcagatggtagcgacagaaatctagccgatgtattaagagacattgtaagttatttaactcaaaacaaaactgacaaacaaatggtaaaattattacatggcccattaacagaaataacgcgccaagatggtttattgtcaataacctcaatgaaccagctagtgcataatccaaactttgttatccgtagtaatgatattccgggtctttttgtatgcattttcccactaattgaaaaaatgaataactaa

SEQ ID NO: 199979 - DNA, 903 bp, Klebsiella oxytoca
atggctaaatatagaacaccactaagataccccggcgggaaacaaaagctaaccccttttgttttggaactaattattgcgaatggaatggaaggctgtcaatacgttgaaccgtatgcaggtggagccggtgttgcaatgcagcttctcattgatggacatgtgaagaatgttcatctcaatgactcatcttatcatatctatgcattttggcattcaatattaaacgatacggaaaaattctgtaatcagatatctaagtcattattaaatattgatgaatggaaaaagcatcgtgaagtagtacgtcatccatcagaacatagtatttttgatgttggtttttcgaccttttatttgaatagaactaatcgttcaggagtattaactggcggagttattggtggattatcacaagaaggtaaatggaaaattgatgcaagattttcacattcagagctaataaatcgtatagagttaattgcatccaaaaaagatagtgtttttgtttataataaagatgcagaggatttttttgctgaaaatgttatagcctttcccgaaaatacttttatgtattgtgatccgccttactttgataaagcaagtggcctatatcttaattattataagccagaagaccatgagagaatagctaatacaatacaaacaatcgataatatcaaatggattgtttcatatgatggtgttgaaaacatactcagctattataaaaacaggaaaaaattcctctatcagcttcaatacaatgtttctaaagtgtataaaggaaacgaagttttcattttttcagatgatatggtcattcccagagattctggcttaaactatatttctcatgcattgaagaataatccacaagtatttgaagcacgtatttga

SEQ ID NO: 199980 - DNA, 423 bp, Klebsiella oxytoca
atgaacaggggcattcatcctgcgctggcctttgctaaacaggtagagggctggtctccgggcgtattcagtcatgttgataagtggcgggagaccgattcacttgccccatggcggtttatgacgtttcgccagtgtaaacgctggcttgcggactggctgaagcgtaacccggcgccagaagaagggttcctttgtcctcaaattatgaagcgtttcccgccgcatattgtttatatgacgcttgcggcctggcgaaccggtaaaacacttctccactgtgatgagtctctctttcggatgctgggtgaaaccgtcagaccgacgcacagccaggagaaatgcttcgccgcctgccattctggggattctggctcgatttcccggctgacacggtctttgctgaaggccagggggcgctga

SEQ ID NO: 199981 - DNA, 1254 bp, Klebsiella oxytoca
atgcgttatcgagttgttgctctgaccttatgccttctttctggtagcaaagttgcattatctgcgggatttgattgttccattgaaaatctatcaccgacagaaaaaacgatatgtagcaatgagtatttatcaggacttgacagtgctcttaacaaatttttcaaaaagacttatgacagttctttaagccatagacgtttggctgaacgtcaaaatgaatggctaaaagaaaggaacagttgtcagggtgatttaacctgtattactgacagctatttaattcgtaataaaaaccttgcagccagcaacaacctacaaaatataaatgatattttcaaccgcgaaggcgacaagctggatgaggaactggaagctccaattaagaccaagtccggatttacaatcaccgactcaccatggcttgtgaaaaaaatattttcatctgatagctttgaaggcggaattaatctggaaggcatgtatgtatcgtcagtgctaacataccaagaaattaaaaatgatttgttcatttatatttctgttagcggacggtatcaagataaagatattacgcttctcgtagagcttgcagaagatactcccccccgtatcattcaacaatatgatggggaagtagatatactatcccgcaccagagatgctcaaggaaacgctttagcttactttgctgttgggaatgattcacataaagaatatcattatttgtttatatctccagatgggggaaaaagcatttcagacatttcctctgagcaagcagatgcagtgacacaaaaaacaaagtcatggactggttattgtggtacatcagagtgtaatgcctcattgatctcgcctgatagcaaatggcgacttgcttcaagtgatggtaacgttaaagacccagatgaaggtatgtacgtatttccagtcaaccggccggaccagggtttaaatgtttttgcggatatggctgacaattcgatcactgacgatgcttttggatatacccggcattatgtatggggagaagatagtaatacattttactttgacaatagcggtgctttaggttgcatttggaaaacagacattgacaaaaaaacaacaaagcggatcataccagtagaaggtattctggacccattttatataaaatatgatggagaagacctgattctttccgtttattcatattcctatcaagatgattccaaatcagaaatatacatagcaaaagaacctaattaa

SEQ ID NO: 199982 - DNA, 411 bp, Klebsiella oxytoca
atgctccagtctgaattcaaaatctggaccttccagaccgtgtttacgcagcacccgctcaaccacctcaggaacggactgattctgatataccgcgcactgtcgggtgtatcccaggagcgccaggcgcgaactgagcgtgagccggtaacgggactggtccctggatgtggacagccattccaggcgggtcaccatgccatgaacgtttttgccgccacgcatccggaaggaggcatatttcatcagcacctcttccggggggatgtttgcctgaagcattgtgaactcaatgtcccatctgaacggctcgctcagggcttccctgccgtaaaagcgcaggacatccggcttcactgtgctgtcattgatatccagaaagtatcgggtctgtccgtcgaaaagcgctga

SEQ ID NO: 199983 - DNA, 1089 bp, Klebsiella oxytoca
atgtatatgaaaattagtggcttagtgatttcactgacggcagctatctccggacaggtccttgccgcagttcctcagggctatccggcggattatcaaaaggtggtggatgccgggattaaagaaggcaaagtggttatctattcaacgaccgataccaaggccgcaggcccgttaattaaaggctttgaagcgcaatatcccggcattaaagttgaatataacgatatgaacagcaccgaattgtacaaccgctatatcagcgaacaggcggcgggcggcggcagcggcgacgtggtctggagctcttccatggatacggcgctgaagctcgccaccgattacgccgaagagtacgcctcgccggagcgggataagctgccaaaatgggcggtctggcaacagaaagcctacggcacgacctacgagccggtggtctttatctacaataagcggctgatccctcagggtgaagtaccggactcgcataccgcgttggcgaagctgatcgccggccaggccgataaattcaaaggtaaggtcacgacttatgacattgaaaaatcaggtctgggttttatgctggcggtacaggacagcaaagccgatgccagctactttgacgatctggcgggcatagcgaaaggcggcctgaccgtgcaatcgtccaccggtacgatgatggagcgcgtctcctccggggaaaacctgattggctacaatattctcggatcctacgcggaggcgcgggccaaaaacgatccttcgctcggcatctcctatccgaaagattatgtactggtgctctcgcgggtctcttttattaccgcagaagccgagcaccttaatgccgcgaagctgtggtttgattacgtgctgtcggaaaagggacaaagcatcctggcgaaccaggccgatattccctccctgcgcaatgatatcgaaggtaaaaatgatatcgacggtatgaccaaaatgcttggcagcgcgctgaagcctattccggtcgatgaaacgctgctggcgtatcttgagccgaaacaacgactggagtttatcaaacagtggcgtaccgccgcggcgaaataa

SEQ ID NO: 199984 - DNA, 1770 bp, Klebsiella oxytoca
atgaatgtcttacgtcgaaaatggcagggtttgccgcgcggtatcgtcgtcgtgatgacggcgctggcgatttatgtcccgctgttatttatcgtggtgcagagctttctctcggcgcctttttttgcccgcacgaaatcgttcagcctcgaagccttcgctttcatctttagcgacccggatttttatctggcgctcaagtccggctttattctggcgtttggtctggtggcgattgccatccccctcggcgggatcctcgcctttttaatggtacgtaccgatttgcccgggcggcggtttatcgagccgctgattctggtaccgattttcgtttcgccgatggtactgggctttggttacgtggtggcggccgggccggtgggcttcttttcgcagtgggccgagcagctgatcggcttcgtgccgtggaatatttactcgatgttcagcatcgtggtaattgccgggctgacgcacgttccgcatgcctatctctatatctcttccgcgctgcgcagcgtcggatcggatgtcgaggaggccgcgcggacggtgggcgcatcgccgctgcaggtgatgacctcggtgagcctgccgatggtgcgaccgtcgatactctacgcctgcgtactgctgtttttcctcggcctggaggtatttggcctgatgctggtgctgggcgatccggaaggcaacatggtgctggcgacctatctttataagctcaccaacaagctcggcacgccttcttatcacctgatggcggcggtggcggtggtcctgatctgcatcaccgttccgctggtgatgctccagcgccgcctgatgcgcaccgccaaccgctttgtcaccatgaagggaaaagcgtcccaggcccgcgcgctgccgctggggaagtggcgctgggtcgccggggttgtggtggtggcatggctgacggtcaccattggggtgccgctgatcggcgtggcgctgcgggcctttatttcaaactggggcgtgggcgtttcgctgtgggatgaactctcgctggcgacgttccgtaacatctggcagcagccgaatctgctgcgcgccatcgttaactctatggcgattggggtgattggcggcgcgctggcggtggtctgctatctgttcgtgggcatcgcgatgcaccgcaaaccggataacgtcacgcgctttctggactatagcgtgctggtgccgcgtgcggtgcccgggctgctggccgggctggcgtttctgtgggtatttctgtttctgccgatgtggctcgatcagtcgctgaaaaacggctggctctcggcgctgccggtggcagactggctgcgtgaacatctgatcgttcagctgcgcgcgctgcgaaacaccatttttagcgtctggctggcctataccgtcgtatggatggcttacgggctgcggctcatctcctcgacgctgctacaggtagcgccggagctggaggaggccgcacgcagtaccggcgcatcgcgcgggcagatcacccgccacgtcacggttccgctgtcgcgctacggcttaatcggctcctggctgctgatgtttcttatcttcgagcgcgaatattccaccggggtttatctgctctctccgggcaccgaaaccatcggttcgatgctggtgtcgctgtgggcggcgggggctatcgatatcgttgccgcgctctcctttattaatattctgctggtggtcgtgggcctgggtatcgccctgcgctttggagtgaaattacatgattga

SEQ ID NO: 199985 - DNA, 1662 bp, Klebsiella oxytoca
atgcgtaaatcagtcatggtttctctgatacttcacgttctggcggctgtcgccgcgtttctgtggctgctatggggattcattccggcaggcacgttgtttaagggtgtgatgacggtgtgcattgtcgcactggccttctggcaggtctggagaaagcgttgccctgatcagacgatggcggagggtgaaatgtccacctgtgaactgccgctgtttgatgccgggggacctgttgttctcgtttgtggggatgagctggacgcgttgttccaggggcaaacactgcgcaaaaccgcgcagggctggtggctgagggtgaatgacgtcaacaggctaagcgacattgttcgcgatattcacgaacagcagccgcatcagagcggacagctcgccgttatgtattcctgccagcccgacagacatcaggatgaagccgtactgcgcgcgtccctgaaagcgtggcgtcagcaaatgaagctgctgggtcagataattggattcatgccgccgatggttctgagcggtgaattttccggtcctgcaacgccgtggcttgttgtttgtggcgataagctggcggtatatccggctgataaaacgccgcaggcggtggatgactggcaacaggacgctcaacatcttacgttgatgcctgtcctacgggaggcctttgctgttatgcgcgccattctggcggatgaactgacgaaggaagatcggctccttccggcggttcacccgtttgcgttggtgattcgaagcggtgtggcttctgccgatcatgcttcgctgtggtcatatcgcctttttcgcctgacccatctaatttttccgcaggcagagggggcggcggaagtaacggagcattttcctgatgcggtattaccgatgctcgcgccttactgcgctccagtacagggggggcaacgctctcgtcgtctcgttttatggattctggcgtgcgctctggcagctctggctttttccgctgtgaataacgcggcgctgattcgccaggtctcaacggatctccagcgctggtatgccattcccgagaatcatgatgagcccagggatcagtccctcctggcgctgaaacaggatgctcttctgctggagcgctggcagcggcagggcgaaccactccggtacgcgctcggctattaccccggcctgcgtttatggctggcgcttcagaaggctattgatatgtatgcgccaccgccggcacctgcgctaaagccacaaccgaaaatcatccgcctcgacagcatgtcgctgttcgacactggcaggtcggcgctgaagcccggctcgacaaagctgctggtgaactcgctggtgggcattaaagcgaagcccggctggctgattgtggtggcgggccataccgacagcaccggcgacgataaatccaaccagatactttcgctcaggcgtgccgaatcggtgcgcgactggatgcgcgacaccggcgacgtgccggagagctgttttgcggtgcagggctacggcgagagccgacccgttgcccccaacgacacggtcgaaggccgggcgctgaaccgccgtgtcgaaatcagtctggtgccgcaggcgaatgcctgccagtcaccgggcatgacccccgcgtcatcgcaggatgatggcgctttttaa

SEQ ID NO: 199986 - DNA, 774 bp, Klebsiella oxytoca
atgaagttagatttcagaatagaacatgagtttgaccgcagtgaatcaataaaaccagtggaacttgcaactctttttcagggagttacaaaacaattggatggacttttagggtctaagagatcatggtatgaacaaggatattcaagaaagcaggccctgcaatacaaaatatttactgagaatgggctgtccgaatatgttcttggtcgttgggagaaggcgtataaaaaagactatccgaattggaccgctggtatttgggacggtgggtctgatgaagatagtgctggagtggattgttatcagtcatattctagtactcaccgaaggaaaaatcctctaagcttggttgtcagtttttctgtagagttgaatcaaacaagccttaacgctgaaaaaatgattggtcttttaacttttttgttacattcaacagacggttgtacttattcttgtgtggaatctggtggttatggtttttccgaaataactcctaaagaaaatggttacgatgaggtatataaaaaagtatttcctgacagaatatcttgcggatggatgttattcatacctgccattattttacctaacttgattccagatgctgccagagttgttcctgtcctaaagggggacaaacagattggaacaattgttgtttcaactgaagaaatattcgatggaaataataaagaacatattggcaaagctaacgacattgaaattaagcttctggatcttggcttgttgccacttatgaccgagctttaa

SEQ ID NO: 199987 - DNA, 771 bp, Klebsiella oxytoca
atggttatgtttccaccagtagtgaccgggggaatggggggcacggctaccggaagcgtcggtgtggcaggtggctcaaccggaacagcaacattttccggagcaggaagcacccatggtggctgggaagaagaggatatgtcttatcctggctcaggtagtgggtcgcgtcaggggaccggagggtttgactatcagggaaaaccttatgatccgatgctgaatgaccccatggcggtcagtgcagagacgcacggtgatttctgggaagacgatatggattactcggaaacggtgaactatgaaggtattgataccagaaccggagcacaggcgaaaacggatgataagacctgtgaaaactgtcctccggaagggaaggtaatgccgatggtgagacgctgttcgcgctggagtgcggtaacgattagctaccagacgagaatatgtggcacgtactataatccagaaactaaacagatacaggaatttaagtattgtggtgtatcgtttgatggctggaaagataagttgtgtcagttctgggaggcgaaggcgcggtatgaccagtttttgatcagctctcgacaaaaaaaacattggtggaaaggtgacaggagtgcagtaagtcaggctggtcgacatcaggcagttgcaacaataaatcaaccagtaaaagtggtttggatttttatgcagccgattagctttgcctattttcaaaggatgtttattggatttaaagacataattgtaaggtatcagccatga

SEQ ID NO: 199988 - DNA, 1134 bp, Klebsiella oxytoca
gtgaagccggacttcgaccgggagagcacggagccgggctacggctatctttggctgcggatggcgaaaccttatgccggtgaaacgcagggctggcatacgccgctcaccgacggaaccgaagtggcgatagcgtacagcaacggtgatattgacctgccgtacattgcgtatgcgctgcacgacgctgagcacccggaccccgtgaaccgggacaatcacacccgcaacgtgctgcgtaccccggcgaacaacaagctgcggatggaggataaacggggagaggagcacattaagctcgccacggagtacggtaagacacagctcaacagcgggcacctggtggatgcacaggggcagcgtcgcggcacgggcaccgagctgcgcaccgatgagtggggaaccctgagagcggggaagggactctttgtcgctgcggatgcgcaggcgaaagcgcagggtgatgcactggacatggatgccgcgctgaaggaaatcgacaggcttaatcagcaactgcaacagctggaaatggccgcagaaaaagcgcaggcgctgaagggggatgtcgacagccagatagcgatgtttgagcagcggctgaaaccgctcaataaagcggtgcttttctcggcgccggaaggcatggccctgaccagtggtgaagatatgcagctgaccgctgaccggaacctgacggttaacgccgggggcgatatcagcgtcggaacgatgggcaatctgaccactctggccggagagaaactggggctctttgcccgcaccggccaactgagcgtcaaatccgaagaagggccggtagaggtccaggcgcagaacgccagcatgcggttgtttgctgagaagaagctgacgattagctcagcgggtgacatctccctggccggaaaaaagcgtatcacgctgatcggcggcggaagctatctgcgtcttgaggcgggaaaggtcgagtacggcacgacagcgacgtatatacgtaaggtgaaacggacgatggcggcgggggctgcatcaataccggttaaagccgtcacgggcggaggtatctgcctgagttgtctgatgaaggctgcgatgaatggcgacacttttgttgtaagaggtgagtcatga

SEQ ID NO: 199989 - DNA, 336 bp, Klebsiella oxytoca
atgattggaaattataataatgattacgactatgatgataatgagtatttaaatgatgacactatagaaatccctttgagctgtgaagatgacgaatatagagaggattatttaagagaaaaaaagcaagaaaaaaaatctgttttacagaaaatgattgagtataagaacgaaagcacattgttcggaaatctatatgagatgtccggcgtgatcggattttcattaatgttattggtagggtttattttaactttaccaattttattgatcagtgggttgattgctttttttattactataaaagaaaagagaggttcaaacaatggcgtttaa

SEQ ID NO: 199990 - DNA, 435 bp, Klebsiella oxytoca; identical to SEQ ID NO: 180801

SEQ ID NO: 199991 - DNA, 2538 bp, Klebsiella oxytoca
atgagtctgaccgatacgcttaagaatcccctgtctgcattaactgaaagtgggctgaaccgctaccacctggatattccatcctgtacagcagcactggatgtggaaactttcaccggtaaggagtttatgagtgagctttactattaccaggttatctttaccagcagtgaccagaatatcagctcagcgcaactgctgactaagcctgccacactgaccatggggacagggccactgatggggctggccggtcagaaagtggtgcatggtgtggtgacacattttaagcgtatcagtggttcacgcgaccaggcaacataccagattattattgagccgttcctttctctgttgcgcaagcagttccgtacccaccgctttttcgttaataagtcggtaccggaagttgtcaccgaggtacttcaggaacatggcctgaaaggctgggagtatgaattcaccctcaaatctgactatccgaagcgtgagcagataaaccagtacaaggaaagtgacctcgcgttcatagaacgcctgctggccgaagtgggtattttctacttcttcaccctgcagccggacacgcaaaccgaagtggtgcactttgcggacaagcagagtgcatggaccttcggtaaaacgctgcctctgaacagcccgtcagggatgaatgacaataaggccgactctgtatggggcgtcaacgtccggcaaaacgtggttgagcgctctgtcaccgccagtgattacaaccaccgtgaagcccagaatatcctgacctctgtaccggcagatatgacccgtggcgaaggcgacggagtgacctatggcgaggtttatcactacctgccgcgtcatcttgaacgtggcgacaaaatcacaccatcacctgaaaccggtaacttctgggcccgtctcgagcacgagcgttttctgtcgggacaaacgacggtcagcggatgcagtaatgatgctctgctgtctccggctcaggtgctgaccatcagtgaagtggcgatcccgccgactttaccctccgaaacggacaacggcattatcattacccgcacgggttatactgccagccgtaagaatgccctgttagtgacgtgggaagggatgccttattacgaaaaccgctgctggcgtccggctcttaaaaaacgccctgtagtcagcggtaccatgatggcgcgcgtgaccagcgccaaagatagcgatatctacgcctggcaggatgcctcggggatgtaccgggtgaagttcgatgccgaccgtgacgataaacgccagggcatggaaagtatgccggtgcgcttcgccaaaccctacggcggcgataaatacggcttccactttccgctgatacaggggactgaagtcgccattgcgttccacgaaggcgatccggatcgaccgtatatcgcccatgccatgcacgactcccgccacgttgaccacgtcaatgaagccaatagtacgcgcaacgtcattcgaacagctggcctgaacaagctgcggatggaggacaagcgcggtgaagagcacattaagctcagtacggagtatgggggcaaaacccaactcaacttaggtcacaatgtagacgcctctcgcacccttcgtggcgaaggtgcggagttacgcaccgataaatgggtggccgttcgtggcggagccggtgtattcattagtgcggacaaacaaccatccgccagtgacaaaatgctttctatgaaagaggctgtggcacagcttgaaaatgcgttaagtatcgccagaagcctttccgatgcggcagaaagtactcaggcgtatccggcggatatccagagccagaaaatgctgacggatgcactgacagaactggtacagccggggatggtattgaatgcaccgcaaggcgttagcatcagcagtccggaaggtgtacgcgtttcctcgggtagtgccagcgtggggatcgtggcgcaaaataatgcagacattagcgctatgaagcgcttcacggtagcggcaggtgaagctatcagtatgctggcccgccaggcgggtatgaagctgtttgcggcgaaggggaaagtcgaaattcaagcacaggatgatgcactggacgctatcgccaagaaagatgttacggtaacgagtgccgaaggcaaaattgaaatcacagcagcaacggaactggtcgttaactgtggtggtgcctatatcaagttaagtggcggaaatattgagctaggttgccctgggaatattttactgaaatgtgccaatgctcagaaaatgggagctgcctcgctgaacacgccagcccctgaatttccaaaagggtatggcggagtttactctctgactgacgaagaagggaaaatcatccctcagactgaatataaagtgacgacagctgacgggcaggtgtttcatggcatttcagatgacaatggcaaaactctgccgatttatacctcaatgccaggaaagttgaaaattgagatccttgggaccggcaatgcagtgacagggaatgaataa

SEQ ID NO: 199992 - DNA, 141 bp, Klebsiella oxytoca
atgctggcaaatatcggcatccgatttgtgccgatcccggtagcgacagagcaagagttccaggcactgtccgccgagctttcaggaaagcttgagcagctggcggttgaagcggaaaagcatgaaggcggtgaagcatga

SEQ ID NO: 199993 - DNA, 2499 bp, Klebsiella oxytoca
atggcactaacccttttggctacaaacaacgcagaaagcgttctggcttctgctatcagcgcaaccgacacgtcgctgatcgttagcgctggaactggtgccgagttccctgacgctgtggccggtgagagttactttaagctgactatcaccgatgctgctacaggctcacaggttgagatcgtgaatgtgacagctaaggctggcgatatcttcacaattgagcgcgcgcaggaagggacattatcacgcgcatgggcggccaatgatatggttgccaacatgatgacggccgatacgttaaatgttatcgctgattttgcaaatcaggcggccagttcagctgaagaggcgcaggggtatgccctcagcgcatcggagtttggtgacaacaaattaacctttgccgatacaacagccggtcttgccgggacaacttctggtcaatacttccgagtgcctcagggggtcggcaatgttctggcatttcgatattacaaaaacaatgcaggcgtggctgttgaagttgctgaatatgttggtcagggctctatttctaacagcgtcaggcaatacgctactcttttattggcacaaaatgacgttgcagctggtaacattcttgacgggtctaagttctgggtaaccaacacatctgatataacgctggctgatgagtatgttaataattcaggggtaattagcgttactggtagaagtagcccttctaaatcaagtgttgactcgtttgtaaatttcaaggatgaagtaacatctggtagtgatagcttatgggttgataatggtagtgatacgaactcgacaaatctggtcgtagacctttctggtaggcgcttgctttacattgacaatgcagcaaagaaaattgttgcatacggtggtgttatagctgagcaagattcaatagatgaactaaatgacttcaggcaagatctcacaactgggagtattagctcatgggtcaataacttattgttaacttcctccaccgatatcatcgttgatttttctggaagaagattgctttatgcagaccatgatataaaaaggctggtcgcttatgggaaatccattgcatctgcacaggatttgtctaaccttggtgctgaaacatgggttaaagatgatgataatccatcaataattattgagttagtggataagtcggggcgtatagttaaatatctggacttgtcatcggggctttattatgtttttggcaaggccgttggaaccgatcaatcatcaattgtgttcccaacatttattccagaattcatggatgctcgcagctacggccaaagcctgagtatttactcgcagggaacacctgggcttaccacgccaacagtaaatactttacgcttcgatactggagtactgacctacaataaagctcccgcatctctggttaaccttgaagatccaacgtccaaccagtatatgcaaagtcaggtccatgactttcagacaaaagttagcgatgcgtcaagtagtgagttttttcttgccgcctcaggtcttggcgggactccattctcaggacttgagcctggtaccgctatttacactcaattcattagcacaatccagaaagcaaaagacctggcgacggcgcgtgggttacagtatgggatgttgtggtttaacttccagcacggggaaaccgacgcatcgcaaggtactggatattcatattaccgtcaaaaatcgaaggaaatgcaaagcacaactaatgctcatgtaaaagaaatttcaggactgaaacatgatgtggtcatgttcacttatcaaatggcgactcatggccgttatgatggggctacatatcccagctatgaaataccactggctcaactggatgaagctgtcagcaacccgctgatccagctagcgacgccaatgtatattttcgattacgctgacgggctacacctcacgaatgacggataccgccaccgggatatttttttctcgaaagcgcagaaatattactacgaaaataaaaaaccgtggttgcctttgtatcctactgcggtaactcgcgttgggaattcgtcagtattgctagatctgcatgtccctgtaggtccggttcagttcagcacctctcgcgtcactgcagcaacggatggtatgcagggatttgaactttgggctgaaaatagcggcggcggtttgacgcgtcttgcgatttcagcagtctcaattgttagtggttcacgcatcaaaattgttccttcgactccatttaacaccgcggataaaatatatttggcttatgcatttacggcagagaatcgtggctcagatagcggcggtggcatctatcctaactggccagcaggttatacggcagggtgccgtggtaatgtatgcgactctgacaattacgcgtctgatctgcgtgataaaaacggcaacccatacgagctaagaaactatttaactattttccggaaagaggcaatttcatga

SEQ ID NO: 199994 - DNA, 753 bp, Klebsiella oxytoca
atgagttatttatttaatcgtctttcatttgatgtgccctttgataatgccacgtatgttgacgagacgactgtcagacggcttatagagccagatattacaccagaggccggtttcgtaaactggatgctaggtaaaagttctgctagcctgacctctctggatggaggccatgtaatgacagcatcagcaggagcgtcaccaacctataaaaactctgcagtagtaattcctggagtggcttctggatttaatgggctgaacacagaattcaatgactcaaacctcatgacgatgtgcgctgtaataaaatacactggcgctgcaactcaacttcttcttggggtaaataccggcacacaaggagagtgtatttatatgagcggggccagtgccatgacgcacctggtaaggaatgcattgggagcatcggtgacaacagaaatacctgtgccaacgggtctttcagctggaaaatatatctttattgcatacagccgtaatggggataatcttatttcattgataggtggggctgccactcaagtaaatttaactaactcggttaaaacagcagcgaccacaaccaaagtcggcccgggaaacacagcatacaatactaatgggtattcaaaggcactagaaatagtagaatgcctttacaaggcaggattttccacgctatcagagttgcaaactgtatatgctaacgcgaaggcaagatgcgcgttgcgtggaataactattatctga

SEQ ID NO: 199995 - DNA, 210 bp, Klebsiella oxytoca
atgcttcagagagtgaaagaacttgaaaacaaagtcgcaacccttgtaaccgatgttgctatcatcaaagacaagctagcttccaaggaagatattcagtcagtaaagacagagctacataaggagttgaatgctcaaacatggaaaatcattacagctatagtgataaccgtgttactagctgttttttctaaatatttcattaaataa

SEQ ID NO: 199996 - DNA, 444 bp, Klebsiella oxytoca
atgattgaagaaaaaattcttatcctctatcccacgctagtccaggcggggcttgccataacagcctatatggctccaacgccacttataacagtaggtagctttgattctcccttgtctttttatataactatggctgttttcctagattcatcaaaagagtatgtaactacccttgacgttaagcataacggtgattcagttttagactcgaacgcaaacaatgaagaaaatcattcgcaaaattttatgttcacaaaacctgatgagaacagtctccttgttggaactcagttgcatctaaaaggagttaagcctacaaccccaggtacatatgacataactttggagttatttgaaatagatgaacaaagcaggcagcatttggttgatgaaaagacttgctctatagtaatcgttaaaacaacgttgagggatcaatag

SEQ ID NO: 199997 - DNA, 204 bp, Klebsiella oxytoca
atgggatgcctggaaagagaaaaatccgcaataagcggaaaaacaggcatcgcccggtgcctgtcgctttttcttcgccttattttccgcagagtgaggcaatacgccacgaaagcgctgattacccccgacatgatgctaaccctgccgggcggccgggaagccccgggcattgacagccgcgttcggatggtggttgtatga

SEQ ID NO: 199998 - DNA, 327 bp, Klebsiella oxytoca
atgactgccagttattttccttcaccggctaccgactatatagagcagagactgactgtcacggctgcgtgcaacattggcgcgaactctcagattatagagactgatcgcggcttcgttgttcttgacctgtcgttaaaagtgacgcaaggaagcgtcctgcttatccgcgtggctggcgaactgcagtttgcaaaattgatgggaagctcttttatcacagttgaaggcgagagcatcgaaggtgaagcgctggaagacgtggaagtgctcggtgtcgcaacccatgcgattaatgatttgaggcaggataccagtcctgtttga

SEQ ID NO: 199999 - DNA, 654 bp, Klebsiella oxytoca
  misc_feature (113)..(131): n is a, c, g, or t
ttgaacagcgcttgcgctggccccgcaggggcgaggcccagggacgggccgagtaacggcgagcgcagcgagtcaatcccccctcaccgccatattttaagaagagctcgtannnnnnnnnnnnnnnnnnntcccccctcaccgccatattttaagaagagctcgtacgcaagtacgggcttttttttcgcctgttgcatgccacccggtagcccggacagatgcgcagcatcgcctccgggaattctgctactccatgctcttatcccggggtcggcgcacagcgcgtgcccgggctacagtaccacccgtagcccgggtaaggcatttacgccgcaacccggggaatatgccgtgaggtggtattgctgtggcttcttcccggcttgcgttgcgcttagccgggctacagggtcgcagatttccggtaatccgtaccagtacaggtacatcgcgccgccgccgggattgtggcaagtgctaatcctcctccatccgctgatactcttcactcaggaaatcaaccagcgccctgaccgagggcagcagcccgcggcgcgaggcaaacaccgcatggatcacctccctgcgcggttgccactcatcaaggacaaccaccagctctccggcggccaactgatcgcgcaccattaa

SEQ ID NO: 200000 - DNA, 225 bp, Klebsiella oxytoca
atgtcgatcacgtcaataaaactggatggcggaattagcgatccagagtttgtggaaataagcaccaacgcacggaaacgcgagcgcgctcacctgctgggcctgctgcgtatttttgtcggccagctgaaaaaggaaagcgccaccccggaagagatttattcatcaatcgaacagtgggccaacgcccgcgaattaaccatcactgaggaaagcaaacaatga

SEQ ID NO: 200001 - DNA, 2616 bp, Klebsiella oxytoca
atgaccgttttagcatggagctggagcgccccgaggcaagcaattaaccccaacgactccgaagaaagctcaattgagtatctcacccccaaaggcgagcgtaaggcgctcgcctatagcgatcttgttgatgttgtttatcgggtaccgttgcgacctcgcgatggcgaggcgcgcagggcatttgaacgagcaaggctcgcccgtcacttgcgtcgccgcgtccaggctctcccggcatttatccgcaagcgtttttcaacgcacctggaaactctggagcgcagggatccgaaagaggctgtacgctggttattcaacacgtttgagcgccacgtattgcgtcgcgttgatgcggtaaacgcacagtatctgccacaaagtaatctgcctgcaattctctttccgctacgtgatgattttcatctgctgccttgggcagataaaaaacgcctgaaacgactggcctataggctcgccaatctgatgaaaagcgagtttatgcgcgagtttgattttcggtacgagaaaacggcagatgtggagttttccacgatctacgcttacggcgccattgccagtaaagcgatctcactcaacattgcgatccctggctggaaacaatattgcgatgaagtactgacagcagaagatgcattgcgtgttattgccagacttcaaaaggaaaagtggtggctaagtaagctccgcaaaattcatgaccgctggcgtgagcacctcatgatcgccactagctacgtcagcaaagttgcatccccttactgctctgaaccttgcctcagggagtgggtagctcaaaaaaaagccaactttgaataccttcaggcgatggagctggaagaccaggacactggcgagcgtacctccttgctcgataaggtcatgggcagcgtttccaacccgaagatcgcccgtcatgaattgatggtgcgcatgcgcggttttgaggatatggctaacgagatgggactggttggcatgttctacacattgaccgcaccgtcacgttatcacgccacgcatgtgcattccggcaagcgcaacgataaatactgcaatgccagcccacgcaaaactcaaaagtacctttgcaacgtctggtcacgtgtacgcgccaaatggggaagggaaggcatccgcacatttggttttcgagtagccgaaccacatcacgacggaacgccgcactggcacctgctgttatttctccgccctgaagaggtggagcttgtcactgaaatttttcatgagtacgccctccaggtggatggaagcgaacccggcgcggctcagtatcgttttactgccaaaccaattgatgaagagtttggatcggcaacgggatacatcgcaaagtacatctcaaaaaatatcgacggttatggaatggatggcgagtttgatcacgagtcaggcaaacccgttaaagagatggcaaagcgcgtgcgggcgtgggcttcacgctggagtattcgccagtttcagcagattggcggcgcgcctgtatccacctggcgcgagctaaggcgcctgggaagtcgtgagcttgtcttgcacccggaacttgaagctgcccgcgctgcggctgatgcgtccgactggtcgggatacgtcaacgcccagggcggcccgtttgtaacccgcgattgtttgcgtgttcgcctcaattacgaatacaccgaaaacggcaatgattatggtgacacagtcgccaaaatcagcggcgtctattgtccttttacgatcagtgaatcggtcatttatacccgcaccaacgattacaaaatcgtaccgaagcgtaagccatcgctggtcgagaatttgactttagagggccgcgacgcggccccttggagttctgtcaataactgtacggggcgctctgattggaatgaaaaaccacaatcagaaacagcagtactagctaataaaacatcgccagacgacagtttaatgacagaacttccgctgaatatcgaagatttaaggcgatattcacgccagcaaaggctggagatcaccagtcgactaagaaaatccgcccgcgaaaattcagaccaagccttcacgcgtactgcgcgtggcctgcgttcgtcgattgatgacgaaaccgcgctggcgtgggggccaaaagtcaccgccgcgaaagatatgaacctgacacaggaagaagcagaacagcgctggtgtgagcagctacaactcgaagctaaacggcgggcagaaaactacaccgccgctgttgctgaatatctgaagaaaaagactgcagcagattggctgtctacaaagcagagagatacggtattagaagacataatcaccgaagaagctattgtcaacattggtgttcaactgcgcacctgccggatcttcgtcagtgataaaatggtgaggtcgattgcttgcggcgctcgcattcggaacggcggcaaagtttacgctatcagcaaaggcattctccgacagataacagtggatgacgctggtaacaaagacagttcaacaaacgaatatatggcagcgtatgaactggtcatgcgctggaagaaagcggccatacaaaagaccaaaactgatgttggaggtaaataa

SEQ ID NO: 200002 - DNA, 333 bp, Klebsiella oxytoca
atgaagcgtgtaacactaaaagaagccaacaaatcgcttcgcattattgtgaaagagaccggatatgaactccatagcggagccggattcgcagaatacgattcatttggatttcgtggaaaggttaatggcatccctgaattctttccggatcgaattgcaattgatgatgctgtcaacctgagctctcccggacgcgatacaagcggaagtgagttggttatcaagctttcccttgatgcaacgccgagcctcgatcagattgacgctataagaaagtctgttgaaaaaaccaaggttcagaactatgcacatctgagccgtatcttatag

SEQ ID NO: 200003 - DNA, 273 bp, Klebsiella oxytoca
atgccaaatctatcaccgttggactcttggttgaaagtaagtacatgggatacgcaccatccgttagatcaagggcgtttttttaaagctgtttatcaattaatattatcaaatgataagctcgttgagccgcaatacattcatgattacatcgtcaattaccataacggtaacaagaatattgagcatgtggatagcatcgcaactatatatgctgaaaagtatgatgacatttacagctttatttatgaaaaccaaatagaacttaactga

SEQ ID NO: 200004 - DNA, 246 bp, Klebsiella oxytoca
atggccgaaatcacagatgcagaacaaattcgccttaacctgctttccgtcctgaactacgacacagcagccgctgctaaggcgattgcattcgtacaggacagtcagttgaagtatcagattttcatccagcagtacaaccgggttgtaaccgaatcggaagtggtagctaaaaccatcaaagcgattcaggaagcgacagaagcgctggcgctatttgagaccggcagcgaagctacaagctaa

SEQ ID NO: 200005 - DNA, 225 bp, Klebsiella oxytoca
atgaccgtacgtgcaaaatttcaatgtaacagcatcaataaatcgccggataattctactgctgtcgtccaccttatcgcggtaacgactggcagcacggagaacgaaacctggtcgaagtatacccccagcggtcaacttcaaatggtcatctctaaccctgcagcagcagaacagtttgagcaggggaaagagtatttcattgatatctctccggccgattaa

SEQ ID NO: 200006 - DNA, 285 bp, Klebsiella oxytoca
atgaatgatcatttttatgaaactcacgcccggatagcggccctaagaagcatcattgcttttattattcacaccctgccagaagatcaaaaaggggctcttcttcgtgctctaaaaatcatttcagaagaaaaattgatggaggatagtgatatttctccggcaagcgatgttacagcggaaaccatagaaaaaatgaacgctgcctatgcggatgtttttaaatcagttgttaatctttcttcagaagacgtaattcctgagccgaaacaatacctgcaatag

SEQ ID NO: 200007 - DNA, 147 bp, Klebsiella oxytoca
atgaccaagcagagtgatattgaatcacgactgagaaaacttgagaaagggccagacaagaatgttctggccgccatggacaataaagccaaagctattgcaggtattgtttcggctcaggaattacgtcttctgaagaaagattaa

SEQ ID NO: 200008 - DNA, 276 bp, Klebsiella oxytoca
atgggaatcgaaactattgccgggctggtgtttgtcctgctgggcgttatcgctagcgcgttcggtattggtcatgcccgcggtaccagtaaagccgaagaaaaagccaagcagcaacgcactgaagaaaacgccgctgctaccgtcgccgcggcagaacgccgggctgatgcaacgaaaggggccagcgatgtacaggaagacgttaagcgtatgggcgatgacgatgttgatcgcgagctgcgcgaaagatttacccgccccggtggtggttga

SEQ ID NO: 200009 - DNA, 630 bp, Klebsiella oxytoca
atgaatcaatcacaatttcagcaggcggctggtatcagcggcgggttagctgcgcgctggtatccgcatatcacagccgcgatgaaagaattcggcattacggcgcctgtcgaccaggcgatgtttattgctcaatgcggccacgaaagcaccgggttcacccaactggtggagaatttcaactacagcgtttccgggctggctggttttgtgcgcgccgggcgactgacgcaggaccaggccaattccctcggtcgccggcagggtgagccctcactaccgcttgcgcgccagcgggcgatcgccaatctggtctacaacaaaaggaatggcaacaaaggccctggtgatggctggctatatcgtggccgcggtcttatccagatcaccggactgacgaattaccgggattgcgggaccgggttgaaggtcgatctggtagtccagcctgaactactggcgcaggacgaatacgcggcacgaagtgcggcctggttctatgccactaagggctgcctgaaatatcccggtgacctggtccgcgtcaccctgattatcaacggcgggcagaacggaattgatgatcggcgtgcccgtttccttaaggcaaaatcggtactggtggggtaa

SEQ ID NO: 200010 - DNA, 129 bp, Klebsiella oxytoca
atgattgaagataccaattacccccggctttggcgatcgctcgtaatctgcgctgttctttgcatcgtcctgttctgggtaccggccgctattgtggcggtttactactatctggagaaagcagcatga

SEQ ID NO: 200011 - DNA, 867 bp, Klebsiella oxytoca
atgactactcacacattaaaacaatgccgtccagatcataaagaaaccgagtatttatggaagctattccatgcagcacaacgcaacgactcacgttggcatggcagtgaaattgaattcattgcagaggagttgtcgcgtacagatttagaccgaaaccaaaaactgtttctcctgcgtgcctggcaggtgctgatcgatgataaaggtggatttggtcgtttcatgggggcatttgacacctatgtctacaacatgcaggaccctaacgatgaatgtgtctcgtggaaacctgaactgagcaaattgctacatgacggagtactgcttggtgtagtgctggaagcatacgacgaagccctccaaggtattgctgagttgtcaatggaaaacgtggctctggcactgactatcgagaagtgtcgggagattgttggctgcccggcgggcgtagacctgcaggaccatctgcggcagctggtttcagagttaagcgttgtagaagatattcacaacaacgccgtattcatcaccgatgaactctatgacgcaagtccgaaggaagtgcaaaacatcattggctctttagcctgtatgaaaatgcctgcttacgctcgcctcgtagccgggattaaggctgatggccgcgttgaaggtgcgcacttcgttgccaaccgaatgctggctgcctgggatgctggttttatcgaagacacagccaaaaatgccgccgatatcgctcgtatgattctcacctcaaccgagtttatggcagatgcaccagagggtgatttcgaccgttcttttgctgatggcatcctggaagatatcgcccagcagctgcgcgagggggctgacaaatgctaa

SEQ ID NO: 200012 - DNA, 207 bp, Klebsiella oxytoca
atgctaaagcctaatcacgtttatatcgaggtatcacgaaatcaaaccggcagcttgtcattgtgcgctagtgatgacaatggcggtttccgcatatcgggcgcgaaggttggcggatgcgaaaccctgaagtgctttgaggttgacgcagatgaacttattaaacaaataaacgcttacaaaaactcgaagggagaatcagcatga

SEQ ID NO: 200013 - DNA, 957 bp, Klebsiella oxytoca
atggctaatttatacaaatttatgggcgcggatatagtcgataaattaatgatggatgaaaaacatattggtataaagttctctcacttgcatgaatataatgatccatatgagttttttcttacaattgattttaatcgcggttcagatgagcttgcattttataatgaaatgattggtatgattacaagacagcctgccacttgctttacaaaaagtccagtaatttctcccatgtgggcacattatgcagggaattcatctggttttgtgatagaaataaatgaaggtaaatttagaaattatttagaggaaattggttttggaggacattgtgctatagaagatgttgaatataaggattctccagatgttggaatcgaaggtgttctagcaagggcatttcacatctgtaaacctcgctatatttactggctaaatggatgtataagaaacgctgcatatttgacaaagcaaacttgttggagttatgagcaggaaagacgtgttattattgatgaaaaagcgctaacgaaacccaatgactggcttatgttacttcctgtaccaatcagttgtattacaggcattatagttgggcacaaatcaaacgattcattaaaacaaaaaattcaagatttagccaaaaaggctaaatgtaggtattttgaaatggtaataggaaaaacatcaactacaccatttcttttatctaaaaatcttaaatcacaccggtttgttgatggtaaaatagaagctgtttctcgtcaatgtaaaaaatgctatgaaccattagattttgatagtaacatttgtggttggtgtggtattactgagcaagatgtagaaatggctgcgcatcgaaattcttttcgaatgatagctagttatggaggattggaaaaatacatttctgccatgaatgctatcactgatggatatcatggtcataaatag

SEQ ID NO: 200014 - DNA, 927 bp, Klebsiella oxytoca
atgacctttgaacagatcctggaagagtatttttttgcccgcttattgcgacctgacacccagagctgttatcgcacggcagtaaatcagttcactcactggcgcaacgtgttacccgccgaagtgacgtcgcatatggtgctggagtggcgtcactacctgctaaatgtgcgctgtatcaagccggtaagctggaaccactatatgcgccatatgcgggccttgtataacttcgccattgaacaggggctactggagcagttcatcaatcccttccagaaaacatcgctgcgggaatctcgtaagaaaaagaaaaccctgacccgcgagcaaatcctcgcatcccgcaaagtgctgaaccagtttatcgaacgggagaaaatgcagcgcggctatcgttcgcctttatatccggcatggttttggctgaccgtggttgaaaccttcaactacaccgctatccggctgaatcagcttattcacctgcgggtcagggatatcgatttggtccatgacacgctgtttatccagagcgaaggcagcaaaagccatgatgaacacgttgttcctatcgcttcccgactgcggccctacctggagcagatgcttgaagaagcgaaaacaaagggaatgcgggctgacgatcagttgttcaacatcaatcgtttcagtcggaggacgctgcgccagggtaaaccgatgacagaaaatcaggtgagttatttctttgccaaactcagcgatgcctgccacagccgtttttcatcacatcgctaccgtcataccgttgccacagaattgatgcagaaaccggagcaaaatttgtatgtcacgcagaaactactcggccaccgcgatattaaggtgacgctcagctatattgaacacaatgtcgagatgctcagaagttgcgtggagagagattga

SEQ ID NO: 200015 - DNA, 1539 bp, Klebsiella oxytoca
atgagtacaccaatattaccgttcctgcccgacaacgccgactggatctatcaacccgatctcagcgacgaatttaatggccctaaccttgacccgcgctggtgcccgtattaccaggcaagctggggcgatctggatgcctcccgcgcccgctatcgctttattaccgaatccgatggcaccgtcagcctggaactgtatgtcgataacgccgggcagggatactggcaaccgtggcgggccagcaacaacacctacaaggtggcaggcatcaccggtggcgcacgggattatatgaacatgtggccgagcggcggctttcccattaccaaccatgtaccttactacgatggttttgccacccgttacggctactttgaaatccgcacccgctttctgagcggcagcgggctggcaccagctttctggttcctggggatgcaggatgcggcatacaccgaaaatatcgaagtcgattcaccggaagttttcaccctggagaacgtcgttaagtttaatctgctgcctcgacaaggagaggcaagccagtcgctggtgacggcttatggtgagggcgctgcgctaccggatctggacgatggctatcacatttacggtatggaatgggatccggaatatctgaagctctatatcgacggacagttggtttcaacgattgaaacagcgattgactaccgtatgttcccgctaatttcgctcaatcaccatgaaaccaataacaccgaagtgggcaatatctacgataacgatccacctctgcccaacgacgagacgtttaccatcgattattaccgggtctttaaaaaagcagatacccccgccgatccatggccgaattatcagaacccactactgccgctgctgattaaattgctggcgctgtggctacaggccagaagccagggagcggatgaaggcaacaaagccgcgctctctctgatctggaccgagcacctgatgtacacctcgttgctggtgattatgttcacctgcgtgccaatgttgaacatcgacctcgataccatcaaatatgacaccacgcgttctaaacagtgcggctggtcggtgccgcagcccgccgatacaggctatcaaccgattataaactcgctgggcggtaaaaccgccgccgtcccggtctggtggtactttattcatgtgatcagcaaaggcatcaccagcgcaacggttgccacccttccctgccagccggatctgcgtcagatccgctttgaggtacagcacacccgaattaaggatccggcgctggctcaggaactgcgggattttgtcgaggagtgttatgccccttcccgcgcccgcctgaaattccgcgccggagagctggacgatgacaccagtgacgatactgcctggctgggatcatcgtactttctcaacacggctggttactacgataccgaccacgcgctttcaccacatagcgactggtcgtatacccgaacaggacgataccccactttcaggcgaagccttctggcagtggctggttcgtaa

SEQ ID NO: 200016 - DNA, 1008 bp, Klebsiella oxytoca
atgaacagaaataccctgctctgcgccctgccgctgctggtatccggcatcggcctgcccgtgatggcggctgatattgataccgatgatattcagcaagaagtagatactggccaggaccaggtacccgtatcaaagccctggaaagtccgcgcgggcctgctgatcgaaaccgaaaacaaagaaggacagtcattcgacaaagacggcttttttgaacccacgttgtggatggatttctcccgcgatcgctggacgttttacggctcgtattatcaggaaacccacggcaccaattacagcgacggattcagccgcgataactggtttaaccaatacgaatttgacgcccgctacctgatggtcgatcaaaaagatctggcgctgggcatgaccttccacttccgaaattacacctttatttatcaggataacccggaaaaaacgcagtccggtggctataactcccagcgctggtcgttccagcctgactggcgaattaatttcaccgataaattcaaatccaccggctgggtgaccgtctacaactggtacaacaatctgcatgaaaatggtctggcaaacagagagctgaaaggcgaaggcggcttcgaatatcgctttaatccgactatcgcggtgcggctgaattactttatcgaccggggctggaataccaacagcgacgaccagaccggtgagttctgccgctcacagctacgcccttatatcccaatcaccttctcgctgtttgatgcaggccccaccaccatcaccccttacgggcgctggacgctggatgtctggtcgcaaaatgcatcgcgcaatcggcgaatgcataccacggaaacccgtaccggcatctttattgagcaaaagctgtcgccgcatctttccatgacgctggattacgcctatgaagtgcaggcccggcatgatttatctcccggcgataagcctgttgtgaagttccacaaaaccggactcggttttatctatagcttctga

SEQ ID NO: 200017 - DNA, 3150 bp, Klebsiella oxytoca
atgaaaaaaacaaccggatggctctctttgctggcgctgtcaatttctctggtctgccaccaggcggcagcaaacaaccgtttgaacgcgtcggcaattcgtgtgatggatgcacaaggcaacaatgtcagtcagcctctgctggacaataatccggcaacccaatggcagtcgaagctggattacaaccgctggctggagatggacttaaaaggcacgtaccagcttagcgagctacagctcactaccccgctcaacacgctaacgcgcttcgacgtctacagcagcgatgatggcgtgacttaccgtaaaatagcctccgcaaagactggcaaaccgaacgaccgactgccgcttaacgttcgtgccagccgcctgcgcatcaacatcaccgactactcggcgggtacaaagggcgtggtcaacgatatctctctgacgggggataaaatcagcgataccgcgccgacgccgcctgcgattcgggtcgccaattacgcgaccaccgagtgggcaaaacgccatgagcgccgccagaacacatcgtatcgccagcaggaagtcgtcagtgaagcacaggcgctggttgagcgggtgctcggtgcacagtatcagaaacgttttactttcgcggttgcgtccaccaccactggcaaagacagcttcaccgtgaaggaagcagacggcaaaatcagcatcagcgggccaaacggtatttcgctggcttccgggctgaactggtatctgaaaaattatctgcacgttaattatgacccgctgaacgtatccaatctggtgatccccgctgaatggccgatgccgcagggcatcacggaaaaagcgacgccgtatcagtacaaatatgccctaaacttctgcacgccgtcctacaccatggccttctggcgctggcacgactacgagaaattcctcgactgggcggcaatgaatggcgtcaacctgatgctggatgttgttggtcaggaagaggttcagcggcggatgctgcaccagttcggctacagcgataatgatgtgcgtcagtacctccccggcccggcctacttcggttggttctacatggcgaatatgcaaagcttcggcggcccgctgccgcagagctggtttgcccagcgtaccgagctggcgcgtaaaattcacgaccgcatggaagtgtacggcatcacgccggtcttccccggttttgccgggcaggtgccggatactttcgccgccaaaaacccgcaggcgcaggttatcgatcagggcgactgggttggctttgtccgcccaccgatgctgcgcacttacgttaagcagggcgaggactatttcagcaaagtcgccgacgtttattaccagacgctgaaaaccaccttcggcgatatcagccactactacgccgtcgatccgttccatgaaggtggtaaccgcgccgatctggacatggtgaaagtagcgcagaccgtgcaaaacaagatgctggagcacgataaagatgcggtatggattattcagaactggcaggaaaaccccaccgacgcgttccttaacggcctgaagaaggatcacgcgctgatcctcgatctctacgccgataacaagcccaaccataagatccgccacgagttcagcaacacgccgtggatctggaacatgctgcacgcctttggcggacggatgggcttctccgggatgccggaagtgctggcgcaggagatcccgcaatcgctggcagaatcgaagtacatgaaaggcgcgggcgtcaccgccgaatcgctcggcaccaacccgatgctgtacgaaatgctctacgacatgacgtgggaaaaatcgcccatctcttcaacggcctatattcaccactggttgaccagccgctacggtgcgcagtcgccggaaattgagcaggcgtgggatattatggtgaaaaccgcgtatcaccgccgcaaagaccgccagcgggcggaagactcgatcatcgatgccaagcccggcttcggtgtcacccgcgcctgcacctactacactgcgcttatcgactacgacaaggccgagtttgaaaaaatcctgccgctctatctgagtgtttacgaccgcttcaaggataacccggcgtatcagcacgatctggtggatatcacccgtcaggtgctggctaatgcctcgtatgaatattaccgcgcctttgaagatgcgtggatgacgaaggattattccgcctttagccagctttccggcaagttcctgcgtcttatcaaacttcaggacaaggtactgagtacccgcccggaatttatgctcggcacctggatcaacagcgcccgcacgatgctggatggtatggacgactggacccgcgaccagttcgagtttaacgcccgggcaatggtcactacatggggaaccgagcaagccgccgacgccgggctgcgcgattactccaaccgccagtggcagggactgaccggtgacttctactatcagcgctgggcaacctggattcaggcgttgaagaacgcggcggcgaccgggcagaaacaggacgccatcaaggtccactggttcccgctggaatatcgctgggtcaatcagaccggtaacggctatccgacgcagccttccgggcgcgatatccgacaactggcgcagcaggcgctgacggagttctccgtcaccagcgaagacttacgtccgtaccgggaaaataaggataagcgcaatctggcgctgaacaagccagtctttacccatggcgatattatcaacgccgaattctcgaccgaacgcgtggtggacggacagtcctcaacgctttggggcaataaaacctggcctgcggatctgattatcgatcttcatggcgtgcagaaggtagacggtatcgagctggagtttgagcagacagcggaggatatgcgaaatccggtggtctccggctggacggtagaaattcaggacgcacaaggtaactggcacaccattcaggataaatcgaaagacttctcgcaaaagcaggtggtcaattcggtgccgtacaagggcgaagcgcagaaagtcagggttgtgcttaccggtgcagatttcaaactgcgcccggatctgaagccacagctggcggaaattcgcgtgctggcggcaacccaataa

SEQ ID NO: 200018 - DNA, 1293 bp, Klebsiella oxytoca
atgcaaccgaatattctggtctttttcaccgatcaacagcgctgggatacggtgggctgctacaaccctgccgtcagtactaccccagtgctggaccagcttgcccgtgagggcgtgaagttcgaaaacgcctttaccgtccaaccggtctgcggtccggcacgttcctgcctgcaaaccgggcgttacccgacgcagaacggctgttatcgcaataatatcgccatgcgacaggatgaggtgacgctggcaaaactgttcaatcaggcgggatatgacactgcctatatcgggaagtggcacctggcggatctggatgaaaaaccggtgccggaagaactgcgcggcggctggcaatactggctggcggcagatgcgctggaacatacgtcgcacccttatggcggtcactttttcgataacgataaccagccggtgcatttcgatggctaccgggtggatgaccagaccacgttcgcgctcgattacctgaaaaatcgccagcgggataatccgttcctgctattcctctcttacctggagccgcacttccagaacgatatggcgcgttttgtcgccccggatggctacgccgaacgcttccagaccgcatcggtaccgccggatctgattaaccgccccggcgactggccgcagaacctccctgattattacggcatgtgccagaaccttgatgaaaacctcgggcgtattgttgattacctgaaggccagcggtgaatacgacaacacgattattttgttcttcagcgatcacggctgtcatttccgcacccgcaacgatgaatacaaacgctcgtgccatgagtccagtattcgcattccctacgtggcgcggggtgggccatttagcggtggcaggacggtggagcatcttgcgacgctgctggatattccggtcacgatgttgagcgccgcaggtatcaaggtaccggatgccatggtaggccgtgatttgcaaacggctctggatactgatgattgggacgaggaggtgctgatccagataagtgagtcggaagtcgggcgggcgctgcgcaccacgcgctggaaatatgaaattgtcgcgcctggcagcgatccgtggaatgagtctgccgcgatgatttacgtggagagccagctttatgacctgctgaacgacccgtgggagcgccagaatctgattgccagccctgaacatgcgcggatccgcgataaattacgtcaggatattggccgcaaaatgacagcgattggtgaagacctacccgtcattgttccggtggagtaa

SEQ ID NO: 200019 - DNA, 801 bp, Klebsiella oxytoca
atgactgcatggatgatttccgcactctgcggctgtggtatggcaaccagcctgctctcggcgctgttcggcgtcgggggcagtatcctgctcgtgccggtgctgcatttgttgtttccgcaatgtgctgtgcaggtgctggccgcgacgtccctgacggtggtgatgctgagtgcgttgattaacgtctgcgccttctggcgacaagggatccggttaaatacgcggctgctgatgccctggtcgctggggatggcgacgggaatgcaggcaggcgtgtacgccagctttttgctgtcggataagatgctgctgatactgtttgcgctggtcctggtggggctggcattgcgctgtggatattcacgtcagacaacccaggaaaacgtacagccagatagccggacgcgcagcaccgggatgctgctgtgtaccgctggtggtgccgtggccgggttaaccgggctgggtggtggttccgtgctcgcaccgctgatgtcgcagctctccgggatcccgcgccagcatatcgcggtgtactgcaactggatgatgctgttcggcagcgccggaacggtggtcaactatctgtatcgcactgcaccggatatcgacgcattaccaccggcgatgcagtttggttacgtcaatatggctattgtggccgtgatttttctttgcacgctggcgttccagccgatcagcatgaggttgcgcactctgctacctgaatgctggctacagcgcgttttctccggcgtattgctgatgattgccacgttgattctggtgacgctatga

SEQ ID NO: 200020 - DNA, 1152 bp, Klebsiella oxytoca
atgaaacacgctttccatctgatggcaaaacctgcgggctggcactgtaatctggcctgtgattactgtttttacttggcaaaagggcagggtgtgttgcgggataccagcggacagcggcatatgtccgataaggtgctggaaacgtatattcgtcagtacatcgcggcatcgcccggcacggaggtgaactttacctggcaaggcggcgagcccacgctggccgggcttgatttttatcgccgggccgtggcgctccagcagcgctatgccggggataagcgtattagcaacagccttcagaccaatggcgtactaattaacgacgaatgggcggtatttctggctcagcatcagtttctggtgggcatatcgctggatggcccggcgcatctgcataaccattaccgcaagacgggcagcggtaagcccgtatttgaacaggtgatggccgcgttagatactctgaagcgtcatcgtgtagacgtcaatatcatggccgtagtgaacaatgtaacggcgcaggcaccactggaaatttaccgctttttgacgcgtgaggtgggggctggatttctccagttcattccggtagtggagcatgatgcgcaaagtgggctgttgccctggtccgtgacgggggaagagtacgggcggtttatgatcgccatctttgatgagtgggtacgtcatgatgttggacgggtattcgttcagctttttgataacacgctggcggcgtggctgggcgaacgcccggcgatatgcgtaatgcagcccatctgcggacgcgggctggtggttgagcagaacggtgatatctacagttgcgatcactatgtggatgcggagcatcggctgggtaatctgctacagcagccgctggaaaagctggttgcgggtaaagcacaacggcgattcggccagcagaaagcgcagctcccggatgattgccatcgctgcccgtggcacgttgcctgccagggcggttgtccgaagcatcgactacatgagcggctgaatcatctttgtgccgggtatcgcatgatgtttagccatatggatccgtatatgacttttatggcgcagcagattcgtgtgcagcaatctccggccagagtgatggtagtggtggatagtctgaagaagtaa

SEQ ID NO: 200021 - DNA, 1203 bp, Klebsiella oxytoca
atgtcggggctacattcatggcttttagataagtcaaccagtgatacctatatgttcatcaaacgcctgtcagccaacgataccggtgcgacgggcggacatcaggttggcatttacataccttcaggtattgttgaacgtcttttcccttcgattaatcatgtgagggaacttaatccatcagtgacattggattcgcatacctcttcacacaactgcccaaacagcttggtcagagccgtttattataataaccgtttctttaatggtgggacccgaaatgaaaagcgtattacccgatggggcggaagtagaaatcctctgcaagatccagaaaatacgggggcgctggccttattagcgtttgattatcatcaagtattcggtagtcaatttgttgatatctgggtttgtcatgacgctgaagaagaagatattgttgagtcatcactcggagagattgttcccggatcatttgtttatggtcctgcaaatgagattctgggtggtctgattttagaagaaccagtttccagaaggtatcgtcttccggaagagtggagaacaaatttcccttctggtaaggagattatcgagtatgcagcagctcattattccccaaatgtcgttggaccggataagcaactgattgaacgtcgtcgtgttgaatacgaaattttcctgctggtggaagaaatgcacgttctgggtatggttcagtctgggtttggttcagtaaatgaatttattgcactggcgaactccgtgagtaacagacgaaaatcacgggccggtaaatcactggaactgcatcttgaacagctttttaatgagcatggactgacaacctttgagactcaggccgtcacggaaggaaataagaagccagattttttattcccctctgcacaagcttatcacgatgaaactttccctgagcagagacttcgtatgttggcagtaaaaacgacctgtaaagatcgctggcggcagatattaaatgaagccgacagaattcaagacatttacctctttactcttcaggaaggtgtttccgttgcgcaatttcaggagatgcagcaggaaagggtcaggttggttgtgcccagtagccttcatgataagtacccgaaaactatccgggaataccttatttcgttagaaacatttattgatgaaactaaatcattatatgtcgattaa

SEQ ID NO: 200022 - DNA, 1425 bp, Klebsiella oxytoca
atgtctgaattcgatttatttgcgcaggaactgctcgaaaaagcagaagctgaagaaaaacaacaacaagagcgcgacaggaagctgattgatcgggtacttgaaatttacgaccagaagtatgtcgcagaactgctaagaaaaataggtaaaaatgagtggagccgcgaaacccttaaccgctggataaatggcaagtgtgagccaaaatcgcttaccatggctgaagaagcgctgttacggaaaatgctgccggagcaacccgctcatcatcctgactatgatttccgctttattgacctgtttgccggtattggtggtatccgtaaaggattcgaggccattggcgggcaatgcgtttttaccagcgaatggaataaagaagcggtacgtacctacaaagcaaactggtacaacgatgaagacgcgcacacattcaatctggatatccgcgaagtcacgctaagcggtgaagaaggcatctcagaagagaaagcctacgctcatatcgatcaacacatcccggatcatgacgtcctgctggccggttttccctgccagccattcagtctggctggggtgagtaagaaaaactcgctcggacgcgcacatggattcgaatgtgaagcgcaagggactctgtttttcgatgtcgcccgcataatcaaggcaaagcaaccagccatttttgtgctggaaaacgtgaaaaacctcaagagccatgacaaaggcaaaacgtttaaagtcattatggatacccttgatgaattaggctatgaagttgctgatgccagtatcacagggaaagatgaccctaaaataattgatggcaaaaatttcctgccacaacatcgtgaacgtattgttctggtcggattccgccgtgaccttaatatccatcagggattcacattaaagaatattcataaattctaccctgagaaaagaccaacatttggtcagcttctggaccctgcggttgacagtaaatatattctgagccctaagttatgggaatatctctataactatgctaaaaagcatgctgccaaaggtaatgggttcggttttggtctggttgatccgaataatgaaaacagcgtcgcgagaacattatccgctcgttaccataaagatggctctgaaattctcatcgacagaggatgggataaagaactcggcgaaatcgatttctctaatccagagaatcaggaacaaaggccaagaagactgacgcctcatgaatgcgccagactgatgggttttgagcaacccggtggcaaaccattccggatccccgtttccgacacccaggcctatcgccagttcgggaactcagtggtcgttcccgtttttgaagccgtggcgaaactgcttcaaccttatattatgaaagccgcagcaaacaaggcgaccaaaaaataa

SEQ ID NO: 200023 - DNA, 738 bp, Klebsiella oxytoca
atgattattccagacgttaacttccacagcatctctacaccagttcagattcagcaggcggccataccaccgccagcagaaatgccgtttctttctgccccggttcataaccacaccgcttttcactacacccgatttacccgccacgccctgctgcgccctatcgcccgtgaaacgggaagtcgaatctaccttcaggaacaacccacctgtggtttctggtatctaaaccatggcgtcattggcctgcaccatacattaaaaaatggcaaagagctgctggtccgcgcctgccagcaaggtgaatggtttggttatctggggctgtttggtacggagttctatcactgtcatgcctgcgttttgcagaccgcatcgctgtgccacgttattccacattccaacagcgagttcctgcatcattacccgcagtttgctcatttcctgctaaaccaggtggtggcgaatctgtccgatgcggagcatcgcatgacctggatcacccgctatcgcacccgccaccgggtactgagcagcctctggtatctaacgagttattttcccggctatgactggacgtggcgtgaagtggcagaatttgccggatgcgaggcagaaactgcattacgcttcagcaaagaactaagactggccgggatactagatgactcacagcgccgcttgcacgtatgtcacccaaaacaactggcggcactagttgctggcactcataattag

SEQ ID NO: 200024 - DNA, 189 bp, Klebsiella oxytoca
atgactaaacaagactggcacccagccgatatcatcgccgccctgcacaagcgcggcaccagtatggcagcggtctcgcgggaagcgggactggcctcctccacgctggcgaatgcgctttcacgtccctggccgaaaggcgagtggctgattgctcgcgcactcaacgttcaccctgcaaaaatctag

SEQ ID NO: 200025 - DNA, 285 bp, Klebsiella oxytoca
atggttccaaagcgtcttagaattgcgagagatttggctgacatgtcccaagaagatctagccgccgccgcgggtgtttctgaagaaacggggtcctcaagaatttcgcattatgagcatggcaggcatcgaccaaaatttgaattggtgtgccagatggcgaaggtactcaatgttccagaaggttatttttatacgctggatgatagctttgccgaagcgatgctaaagctttacgcaggtgaaattgtgcagtggagaaaaccagtaagtgagtctggttag

SEQ ID NO: 200026 - DNA, 1296 bp, Klebsiella oxytoca
atgtcaaaaagtctgcaaactaatgccactcaaacgttacctgacgacagggaagaactttatcatcttgtctggcgcgagccagcggagaaaatcacctctctctatagcatcagtaaagaacagctgacaaaacgatgcgctgaattacgaataccgagaccgctcgccggatactggaaggcgctggcgaaaggaactgcaccggcggtacctgctttgcctgatttgaagagtggcaaggtagtaaaatcccccagaaaaaccagccaggccattcctcttcccacaaaaatatcatcgaaagtagcagcgccagcaccgcgaaagcgagcaaggacagcgggcagtggttatgcactgatcgatgatctcaaaacttaccttcccgcctcttccgtcacaaaagacggctactacaaacccacgaaaaagaagctactcgatctgaatgtttcagaaacgggattcaacagtgctatcgattttctgagtcggttctttgctgcactgggaaagcaaggggcttgggtaaggttagctgaaggaaatgaaggacttcattgtcggggtatagatatcaaagaagacccaaaagagggcggtttgcgctatgacagtttatggcgcccttgttcagccagcatcatttgcgttggagatatgttgtttgcctttagccttgctgaaatgacggaatatgttccgataaaagaggttaatggccgatatatccgcgataagacgatgatccactggatgagggggaagcatgacaagccatttcgctatgtcattaaacatgcattacctaccggacgattttttctacagctctattcaccatactcgtcaactaactggcaggttgagtttcgccagacaaaacagtgcgggcttataagccagatcccgaaaatcatttccgcgatgcgtgatgctgttccgttggttcagaagcagcaggaagaggtgagagtcaaagctgaagaacggcggatccagtgggaactggatgagaagatatatcgagaaaaggagcgaatcagaagggaaaaagatgcatataacgccagcgtggccgagcttaaagctattatggtgcagtgggcagaagataagcgtatagagcaatttttccatgaggctacattggatgcagctatgcttggagaacagcagaagatacaggttatggaccgtttacaattggcccaacaattattattgaaggattctgcggttgaacggttggttaaatggaaaacaccggaggaatggtttagcaagggatag

SEQ ID NO: 200027 - DNA, 432 bp, Klebsiella oxytoca
atgaaaatccctgcacatttgaaacataaaccgattattcaggtggagaattatgaccgtattgatgggccatacgcgaatgacacggatgcgaaggggctgtctgttggcattgctcaatggaacggccttggctggaccgatctttcagcaaaagtttggcgcaacactgatgaaagatggtccaggcagtcggaggagcttccgcttcaccgtgtaattgatcttgccactttagtttgtattgcaatggattacagtaaaaatgggcgattatcgtcaagtgatgattttccggtgagtcgttctgctgataatcctgatttggctcatcacaccgagttaatgaaaaaagagctaaaagagaatgagtccaatcttgatgaaagcttaaaacggctttcagttgaactcaagcgactcggttattaa

SEQ ID NO: 200028 - DNA, 876 bp, Klebsiella oxytoca
atgttatttaagtattgtcctgtgtcagactattcactaaattcattggagaataatacattatatttaaatcacctgtatatgatgaatgatagtgcagagggtttttgccgtgtggaaaatggttttcctaagtataatgagagagggcctcgatatgaaaaaataataaaggcatggtacggagaatcaggtggaaatccatcagaatatgagtatggtgaatacatcgattctatgcgtgagatagaaccaagtgtacccgatttgttagattcagctcgtatttcatgttttactagtacagctttaaacccaacaatgtgggctcattatgcaaaaggaatgactggtatatgtattgaatttgacgaggagaaattcaaggggcttgaagatatgcacatctttgatgtaaattatcttgaccaccctcccacagtcgatactgctgtgttgactttaataggtgaccaaatagattacaataatgatgccctttttaaaggatataccgatgggtttgagcatctttatgaacaagcatttgatgaatgtcaggggattttgtttgaaatatttaatggcattttagcaactaaatccacagagtggtcatacgaaaaagaaaaaaggctaatttatcaattatcattttccaaagaagacatagaagctaaaaataaaaaatctggtataaacatacggttgccagaatattgtattaaaaatgtgattctgggggaaaaaacaacatcagtggataaggagctaattatttctgctattgaaaggtctgggagacatattgggttaaagagagtggtcagaaggccgaatgagtacgctctatctttaatagatgaatgtatgtaa

SEQ ID NO: 200029 - DNA, 819 bp, Klebsiella oxytoca
atggacgtcgcaatcaatgaattatcctttaaaggtcagtttaaatcatttgatgaaatggctaactgtatcaatactatcgcgaaaatttctgaaatttcaaaaaaaataaatggtaacaaaccattgcgccgtacaaaaaaccttgtgacacgaccgatatcaggggaaaaaactattggaatgttcttcggagaactattacagcaaaaagatccaaaaactcaagatttaattaataaatctcttctgaatattgtgcaagggccttttataaaaaaggaggagttagatgaaaagattaaagatattacaagtatttgtggtgaaaaagtagaaggaactgcaattcatgcttatctttcacgaacagaagattctgttcatgcaattatttctgcacctggctctgcttacgactctagttttttattcaaagtaactattgatagtggcaaagaaaaaaccattattaattttatatctgaagcttgctgtaactcattattaaggaattaccaagtgaatgaaaaacatgccatcctgaaagataaattagtgggcggtaatgttcatactcgaatggatttagattatgaccgagcacaattatgtctttgtaatggaatacagattataggaaatagatatgtttactcttttgaacaagggaaatggtatgagtttcctccccatacggaaggatgttatcatggatatccaatcggcaacccaagtaattcggcagaactcaaccatataattagaatttttggcgaaccaccgtatactgagataggttataaattttgcatttga

SEQ ID NO: 200030 - DNA, 1086 bp, Klebsiella oxytoca
atgattaataatatctatgtcaaaaatttcaagtgttttacggaacactcatttacattagcaccactaaccattttttgtggttctaactcagcaggtaagtctagtgcaattcaatctattttaagtatcaaacaaaatatcgatgctttatcaaatagaaattttcagatgggtggagagttttttaattttggaaaattaaaagatctactttcacacaatccctcggacaatgaaattattattgggctaaatgatttccaggtaaaactcattgcagagcaattgaatagtaaagaatgtaaggttaatgatgaaaatttgacaaatttagatgatcttttattccttaaccagaatgatttcgtctatctttgtgctgaacgttttgggcctagatcaagttttgatatcggaggaaataatgatcagcttgatgtaggaatttacggtcaatttgcactttcaacatatttattcaaccaatataaacccgccaataaccctgcatttgcaaaggtaatttgtgaacatctcattgaaaaagatagtcaagataaaatcgtattcactgatgcattagtccgagaagcaatgcgtaggatatgtccagattttacaatgcaggttcttgaggcggaagaaatcgaccgagtttataatttatacatgtcaggttctgaaagcataaggcctataaacgttgggtttggcgttagttaccttcttcctcttattattagtgcttctgttataaaaccagggggtatccttattgtagaaaacccagaggttcacttacatccagcggctcaatcaaacctgattaaaattctttgtgccctatcaaaaacaggggtccaggtcattatcgaaacccatagcgatcatattattaatggggtaagagtatatgcaaaggataatcaatttaatgaaagcgataatgtcatttactcactaacagaacataaaggcattcgtagcgtaaaagaaatacacattgatgaggatggtaacctcactgcgctagatgaaggtttttttgatcaaataactaaagacctgatgaggttattttaa

SEQ ID NO: 200031 - DNA, 1044 bp, Klebsiella oxytoca
atgaaatatagctcttcacgcatacaacatgaatttcgtttcgtgaatgtgattgacctaatcgagatgacagggtttggtcgcctggtaccgaagccaatgcatggttttattcccagttggactatattgcaaaaatcacgtgtaatcgaaatgattattttaggtcttccgacagaaaccatttggggagaacaagatcctctcggaagaactcaaattttatcagcttttgatatattttccgcaatccttgattttagtgaaaatcgctttaacttacgtgaattaaaggtcctaaaacacctcaatggattgtattatagagatcttaattatgctgaaaaaaagcattttgagcaaatgggtatgcaacttggtgtcattttgtatgattccgaccccatgcttaaatgcctgtttattgaaaatataaatcgtaactcatacggaaaatacgcggcacagttggctagaaacatcaattttaaaatcgcatctgagtttatcgaaaaacactccactcatttaatttggcatttcactcaactcaaaaacagcaaacaattaagatacacaacgttacaactaaaattacagtcagatattctttattgttttcttatttactatctatcccgagactataaatatagaatacctgaattatcaatggagagttattcatactctcgcagccatatatccaattatagtgactataataatattgaaatcagtatgatagatgatcttgatattgcacttaataaaattatgtttatgattgatgttaaccatcaaaatttacataacatcacttacgattttaattccattttggataaaatcgttcttaatgaagaaatttatcctgattctttcggaagcgcagagatatttttatcaggtaaagaaattaaatcaccaggtctaataaattacattgcatattattgttttaaaaaacccatcaaattaatgtcgttcacttcccgaatgactactataaataatcttatggagtgggcaactaatgattaa

SEQ ID NO: 200032 - DNA, 1116 bp, Klebsiella oxytoca
atggtcgctccaggtatcgcgacgcgtattgctgccgcgagagagataatactgcgctatctgctcgtcatattccgcaagcaccgcgtcggtccggagctggtggcatgggctgatggaaaaaacctgcgcgagctgggcatttaccgccagaccggctgctacattgagcgcatccgccgcaacggcattctcgcgaacccggacggcgatgcggtgctgcagatgggcgatgatatcgccctggtaggttacccggatgcccacgcccgcctcgacccaagcttccgtaacggtaaagaggtcttcgaccgcgatctgctcgatatgcgcatcgtcaccgaagagatcgtggtcaaaaaccacaacgccgtcggccgccgcctggcgcagctgaagcttaccgatcacggttgcttcttaaaccgcgttatccgcagccagatcgaaatgccgatcgacgacaacgtcgttctcaataagggtgatgtgctccaggtcagcggcgacgcgcgtcgcgttaaaaccgtcgcggatcgtatcggctttatctccatccacagccaggtgaccgacctgctcgccttctgcgccttctttatcgttggcctgatgatcggcatgatcaccttccagttcagctcgttcagcttcggcatcggtaacgccgccggcctgctgtttgccggcatcatgctcggcttcctgcgcgccaaccatccaacgttcggctatatcccgcagggggcgctgaatatggtgaaagagttcggcctgatggtattcatggccggcgtggggctcagcgccggcgccggcattaataacggcctcggcgccgtcggcggtcagatgctggcggcaggccttatcgtcagcctggtgccggtggttatctgtttcctgttcggcgcgtacgtcctgcgcatgaaccgcgcgatgctcttcggcgccatgatgggcgcccgcacctgcgcgccggcgatggaaatcatcagcgataccgcgcgcagcaatattccggcgctgggatacgccgggacctacgccatcgctaacgtgttgttaaccctggcgggtacgctgattgtcatcatctggccggggctacagtaa

SEQ ID NO: 200033 - DNA, 183 bp, Klebsiella oxytoca
atgactgagacaatgcaacgctggtccatggacgccctcgggcgcgacaacctcaaactcatccagtcgcctgttccgcagccagggccgggtgaagtctgcgtacgggtgaatgccgattgcgctttccttcccgtttacgccggcgtccgatatggcgggcgtggtggaaagtacgggtga

SEQ ID NO: 200034 - DNA, 1437 bp, Klebsiella oxytoca
atggtatttgaaggcagcgttcctaatggttggaaattagtaaaattaagtgacttaggggaagtaaatagaggaaagtctaagcatagacctcgtgatgctgcttttttatatggtggtagctatcccttcatacagacaggagatgtgaaagcttctgatggaagaataacgtcctataaccaaacttatagtgaagcaggattgaagcaaagccgcctgtggccgtcggagacaatgtgtataacaattgcagcgaacatcgccgaaacgggtatactaacatttcctgcttgttttcctgacagcatcatcggttttattgcagataaaaaacaatgcgatgtattctttatcgaatacctgtttcgccttttaaaaagacggattcaagcccaagcaaatggaagcgttcaggataatataaatctacaaactttagagcgtataatatttcctgtaccagaaataagaatacaaaaaaatatatcctatttcctgaaaaaattagatgataaaataattcttaacaaagaaatcaaccaaaccctggaacaaatgtcccaaaccctgttcaaatcctggtttgtggatttcgacccggtgattgataacgcgctggatgcgggaaacccaatcccggaagcgctgcgatctcgcgccgaactgcgtcaaaaagtacgcaatagtgcagatttcaaaccacttccggcgaatattcgtgcactgttcccaactgagtttgaagaaatggagttgggtttaatcccgaaaggctggaaattttcaaatgttggtagcttactaaaaaatacaattggtggtgactggggaagtgattcagaggatgaaaaacatacaacccaagctatgattgtacgtggaactgacattccggagttaatttccggaaaactaagctctgcgccataccgatgggttgaaccgaaaaagcttgaaaaaagaagaattaatgtcggtgacattatcatagaagtttcaggcgggagcccaacacagtcaactggccgctcaattttcatgactgaacagattattgatcgattaggcggtgttgtcgaacctgcaagcttttgtcgcaaattcgagccgttatctgtagaacttggactaatcattagtttgcatctgagtaaaatatataatgatgggaagatgtgggaataccaaaatcaaagtacaggcatcgctaattttcagacaaaatatttccttgaggctgaacaaatagtcatcccaagtgctcaggtcattaatgctttttatcgtatcgttatgccctggattgataaatcgcataataatgagcaaatcatcttgggtaacctccgcgacaccctgctccccaaacttatctccggcgagctctccctggaggatctaccagatttagtaacccaaaccgaacccgcataa

SEQ ID NO: 200035 - DNA, 273 bp, Klebsiella oxytoca
atggaaaaagacctcacaacaagatatgtcgctatcgtagagaaatgtgcgatgacagaagtggcgcttcgccacatatttattaatgaaagtggtaagaattatcgtattcagttctttaaagatacgatggtattaaaacgggagtttcaggctaaagattttctgcgattattttttcactttcaggtaaccgcagatcccgacttgaaagcttactttttctccatgagatcgcgcgttattgtcccgatacgcaaagaattatcttag

SEQ ID NO: 200036 - DNA, 1581 bp, Klebsiella oxytoca
atgaaaataaaaaaaggcttttcgctattagagttaactcttgtgttagggatagggagcatgatggcttttttgaaatttcaggatatgagaaatgaacaggaaacaataatagctaatgctgttggttctcaaattaaacagcttggtgaagcggtcaaccgctatattagtgtgcgctatgataaattatctacactctctaatgctgctggaacaggtatcgatccgggaccaagaacctgtagtggtgatggttgtgaaatttcctttgagacacttgttaatgagggttttttacctgtcaactatgcgggagataacttacagaaatcatcttataaaatcctcttaaagcgtgatggaacaacccccaactatgttatcaacggtttagttgctacaactgctgcatggaaagatggctccaagattcgctatgatttattgggtaaagcaatgatggcagcgggtattgatagtggaatgacaaaatctgcaacagtggcttcgggctatggcggtcaatggagtgaaaaatcatctgatttcaaaaacattacttctgaaggccttttggtttatcgcgttggatatgattcctcgatgtattctgtttacttacgtcgtgatggaacgctcccgatgactggtaatcttaatatgggtgggaatcatatcgataatgctaaaaatattactgctacgggtaaaggaagctttggtggcaatatcacctctggaggaaatatcgatgcagctcatgaagttattgcccataatggttatggagataccatcactttagggggagattctgcaggggaggattatgaaatcagactgagtaacggtgctcgtccgttaagcatttactctcctcatgctgcaaattacactactgttttaaatgtatggaaaaataccaaaatacaacaacgtcttgccactaatggtcttgaccctaataatcttccttctggatggactggaggcattaggactgttgatgtatatgcatcaggcacagttgggactggagatagttctggtaatattaaagcttatatcaatgcctctggcaatctttatgcggcaggaactgctcaggtagatggtgatatcacatcgtcaagtcaaataatagctaatagacgattaacaacaaatgagtttttacaaattaatggtgtggcgaaagaaggtgcaagttgtgcgactaatggtttacaggggcgcaatgcatcaggtctactattatcatgtgtctcgggtatctggcaagcatccattatcaatggtagaaacagtaatggatactggcagaaaaatacttcgaccggacttatcactcaatggggaagaggaaacgctgatggtacaaagaaatttccagtgccattttcggatataagttccattaatttatctgtaacaaactgcgctgacatgggccgatatgttgatgctgcctatggcattattaatagtatttccgagttttacacaagaacaagacaatcagcagacagtaacggttatacatcatatcccatttgctggttagctgttgggtattga

SEQ ID NO: 200037 - DNA, 312 bp, Klebsiella oxytoca
atgaatacgaatgataaaaacagacagccaagaaaagaaaaaaccatcaagcaaaaaatagcctcagcgcagatgcgtttgcatcgtctcaagaccaaagagaaatctttgtccaagaatgctgagacacgcttgaagatcatccttggtgctgaagtagctaaagctatgggctgtaaagttgaagatgtcgataaggagtttgtattggggatattattacaaacttcgaacattaatgcggatgctaaagcaagagttaaattacgcggtaaacggtttcttaaggatatggttggtagacaggaataa

SEQ ID NO: 200038 - DNA, 252 bp, Klebsiella oxytoca
atggcactccttaaaaccacagaatacaaagggcttaccgttactgacgctatctacaccgtggagagcattaccattcagggcggccaactggatttttttgtctctatgcgagcggccgctggcgctcaaatgctggacggggaaaactacggatgtgcatatgatccggcggctggcacaccggaggagcaggcatatgcctatcttaaaacacaggacgcactcagcggtgcgacagaatctgaataa

SEQ ID NO: 200039 - DNA, 2313 bp, Klebsiella oxytoca
atgtcggtacccaaccagaccccctataacatctataccgccaacgggctgacgaccgtttttacctatgagttttatgtcattagcgccagcgatctgcagatcagtattaatggttctgtagtcgccagcggttacaccgtggcaggggtaggcaataaggatggcggggatatcacatttctgacaccgccagcaaatggcgcggtcgtcatgctcgagcgtgtggtaccgacgtaccggctcactgattaccaggacaacggcgacctgctggcggataccgtcaataaggacttcgaccgtatctggatggcaatacaacgtgcgtttatcgatctgggctttgcgctaacccgcccgttctttggcggtccattcaacgccaaaggctaccgaatcgaaaaccttgcggaccctgttaacgaccaggatgcggcaaccaaaaaatttgttttagctacgggtaataccaatctctcccgtacactccgggtacccgaaagctttgttgatgtattgccttctgttgcagctcgcagaaattctctgcttggctggaacagctctggcaggcctgtacctattttttcgatgaccgacactgccgatttggctattaagttagcatcaagtgaagaagggctgggggcctcgctggtaaacacggagaatggtcttaccgttcaggaaatgctctcccttggtcgggttgtttatccggagatgtttggcgttggattttctgagtcaactgatgatgagttatgggaaaggatgttctcataccttgagtcgctacctgatacgtcgctatctaacgacctaccttacctcattgatatgcgtgggaaggaatacacaattcttcaaactcaccaggtagatataaatctcggcattattaatggctttgttcattttaatggtgggcgattcatctttggtgattatacaaccccggcggcgggtggaaaaaccaggcgatatctcatcgattttcgctgggactatattggaacaagttatttcccttacgcccttgtcgagattgtaagggcgtataacacgcatattaaacatccaacatgctgggctggtgacagcgaagatctggagactagcggcgcttatattggaaagccaaaacgtgcccgtcatgctctttggtttggctctcgccgggcgtggggatgctcaattatgggcggtgacatttacggcggcgatatcccattacgggtaggctacaccaatgaccatactggagtattcattggtggcggattaactattcaccatgcatggacagggaacctgctgggctgcaactttgctggctctacaatcctggggtgcaatattgagcactctgaaaacggggcctggagtgttgcactaacctctggcacgaatgggatatcaaacgcattgcgtagcgtacttgtcgccggagtttatttgtataataacggcaatggaacggccgggacagactacgcaccagccgccattcttgtcggttatgatgtgccgggcacgttgggttttgacgtagcgggtcagttaattacaagcgatggtcaggctcgaaacgtcactgtccagaactgcgacatcgtctcttccaaacagttgcgcgctgttaaaatgcgaggaattacgggtcttaaatgcctgaataacgcatatacagtaaagactggcgagttatatggctttacttttgagggcaccgccgcaaggtcagactgcaaggacaactggaaccaaacaaccggcgtaaatgatgagtgtgaatatacctcgacaaataaaccacgcattggggatagggctggaacgtttcttccgcaactagtaggagcaacggttgcaggaagcatggtttattccactcgtggcggagactacgagataagtaacggtatttgcaaacttagtttatggcttaccgtaggaagcataacgaccccgccgcaaggggcgctgactattaacttgcctgctgctatatccgctggcaagcgctcagggaacggcgctttcgctttagccctggcgggtaataccaccagaggcgttagcgctactggttcgctcgaccgtgacgtgacggaaactgtcactgtctccggtgctgcaacaattcctaatagctcgctttctgtttcagcaagcatcactaacggttcattcctcaacctttatcttggcgggcagctaatgcagggctcggctattcaggccacgaccgatattcgtttttcaatctcctaccccgtagatggggcaacatatacaggatcatga

SEQ ID NO: 200040 - DNA, 660 bp, Klebsiella oxytoca
atggaagttttctggatagttgtaggggtagtggtcgtagtcctgttcgtgataagtcagaatagaaccagaatcacaaatcgcaccgtcgtaacccgggacagaaagataaaaaccgaagacggggaaatccgcattcagcaaacacaagtaattgatagcgcttcaacgcagtacacaaggcctaattctttaaatcacgaaagtcatggcgaatacgataaggccgtgatagacgagtacaaccatcagatatctcagcagaaggttatagagtctatccctccggagcgacaagcttccacactggcacaacctcagagactagaaaaggttatcaaccctcaacctgaaatatcggctccgcaggtatctagtgaagctacacgcactactcatagcggaagcaaaatctgcacacgctgcagcagaaacttatcctacgataagtacaggaaatccagcaaaaaccctgatggtttaaccatatggtgcgctcattgccttgatggtcccaaaaatacgcagcacacaaaatggtgccctgtttgtgaaattcgcaggaagcgaaccagtttttacaaaaatgctaataacagagatggtttaatgtcatggtgtaaaagctgctgggattcgtataaaggtaaacgcagctag

SEQ ID NO: 200041 - DNA, 294 bp, Klebsiella oxytoca
atgcttaatcctcatatgttgagaattgtcatctggtttgtatttagcttgattgtgtgtattgcattttggtttttttatggtcgcagccttaaaagagcttattcgtctcttcatgatgctcaaataagcttcgataaggctaacaaaagtaatacttccgatgattacgatgaagctaaacagaggtgtattgtttggcagactgaggttgcaagcataaagcaacagcgggcttattgtctcctggctacgccaggagtattcgccgtaattgccttgattttttggtga

SEQ ID NO: 200042 - DNA, 2499 bp, Klebsiella oxytoca
atgaaaccacaatgcatacaggcagtagaggcgcaccttagcgccgtcagcggaaagccggttaagcttacggccgccgctatttcgcgtatcgatgaacgaatgcatgagggtgcaaaagtgctggcccgccgggatcgcgccgcctggcaatcaatgtcttccgatgagcgaacgatcgccataggccagtgggtacgagaacaggagcaggcacaggcagacagccagacgaggagtaaagttcgccagctttccgctatcgttgatgcagctaaaagacttgacgcgatggcggacgccaggccggataaggcggggaaatggagtaaatcactgattaatgttctggagggtgtcgataacacccttcgcggtgccgaacaggtagcggtccggggctttggtgaaatgttaaagaaagcgcgtgtcggcccctggacgatggattttggcaataagcgcagtgatgccttttttgctgacgttgtgcgtgagatttacggcaccgataccggaaacgcgccggctaaaagctttgcgcaaaaatggtcatctacgatggacggctacagggaagcacgaaaccgggcaggtgggaccgtaggtaagctggagaattacgctccgcaatcccacgatgctaccgttatgcagcgtgtaggtaaacctgcgtgggtttcttttatgatgaagaatctcgatcgagaacagtacattagcgacgccggagctcgcctcaccgatccagagctcgagaacgtagtaggaaaaatgtacgactccatcgtaactgatggggtaaataaaattcagcttgatgtgcaagggctggccgaaggggccacgggtaattttggttcatctaatatcgcgagaatgcttaataccagccatcgtgaaatacatctgcgggatgcggacgcagttatcgcttataacaaccagtttaacgatcgcgccctcggcgcatcttttttcagccatctgaacggcgcggccagagacgttgcgcttattaatgaaatggggccaaaccctgggcttacctttgcgactttaaaagatacggccgcgaaacgggatagccagatgccgggggcggtttttgatggcgatggcagcgttaaaggggggaaccgtggggctttcagccctgacgcctatttcaggcagatcatgcataacaatgctgacttcaccgactttgaccgtatcagtagtgcgttgacggcgtaccaagccgcaacgaagttaaccagcacaggtttacgctcggtcttccaggacacgccggggatgctcctgaatatggcggacgtcggccagttgcataacatcggtatcgtgctgcatagcgccttccgtcctaaggaggctgcacaattcgggatcggtgccgaagtggcggtgcgtgctgtacgtgagggggccgaaagaatcatggcgcagggccgttttaacctggctaatgcgcttagccgatacgctcaggccacaatgaaatatacgttgcttgacgcctggacgaacgcagcccggcgagctggacaaacctcgcatgcactggcgttgggtgaatggtcaagactgccgtgggataagctggatagcagccagcgcgggctactgaacaacgccggtatcactgaaggtgactggcagcacatcatgagcataccccgtaaaaagctacgcgggcaggatatccacgacgtgtctgatgtttctgcgttggggatcccccctgatgaggctatgcgcctgcaggcccagattatgggatttgtcaggatgggtggcgatatcgtcacatccgagcataatctcacagctcaaacgctgatgagcgctggcggtcgtacgaacgctttgaccaaacaggtaatgcttttcaaaaatgcgggcgcaatccagacggcgcatatgttggatcgcctgagtcgtaaatctggtgccaccaaagtgggatatgttgctgccacagcagcgttatccgccagctttggctacatggctctggtcgcccaggccgtaacgagcgggcagaacccaccgccgccggacgatatcagaacgataggaaaagcgatggcggttgccggcggttttgccatggttcaggatctgattaccagcatgtacgatgcagttagcggggataacagcggccatagttctagtgctgtacccatttttggggatttggcgacgttgggtaaaatcgcttttaccgcacctactgatccgcaaaaagcgggatatatggctataaagtttggccgccagcagatcgcccccctgaattactggtatacaaaagcggcggtagatcatatgtttttcaacgatgcggcagaggcgctcaacccaggctatcagcgacgcttacgaaagtatgccgaccagaaagggcagcaatacttctgggatccgtcaggagatctgacaacaccggaaatgggttattataaaaaagagtttgagttcggtgattaa

SEQ ID NO: 200043 - DNA, 1770 bp, Klebsiella oxytoca
atgagcatactctttaacccggagctggatagcgctcttaacgccaacggtaccgaaagcgttaaagatattgatgcaggattatttcagggggttggcgagggcgttagtacagggttttctaacgcaggcacgtcactacagcgtattggcttaaccacgctcggccgcgggcagatgcaagtagccgctgctcagatgcaggctacagcgaacatcacaggaaacgaggctcttagcgatgccgcgcaagatgttttaggcacccctgaaccaacagaggaccagttaccacagtacaaaacgttcgacagcgatcaggtgggtgctgtcggcaccattctgggcgggctggttcagcagtcgccatcgttggccttaatggtggtaaaccctgtagcgggtgtctccgtcgcaggagcgcagggatacaccgaagcccacgcagaaggcgcgcggctgggccttacgggcgaagatcttgaggactattcagcggtcggcggggccactatggcagtaggtgctgccattcctggctttactggtgtaggtaaaggagctgttttgtatggttcgcgcttcctcgccggtggtgttgtgaacagcgcgacgggtgagcttgaccactgggggcgagcggaaattctcgatagcgcaggttttcacgagcaggcccggcagatgcgccaggcagacgccgcgagccgggttactgagtttgtcctgggcggcgcgttcgggctattgggcggcgctcatcgagcggagactagccgggttgaccgtcccgccaatgaacccctggcagaaagtcgtatttcggatttccctgacgttccagacgctgtagccaccgcgcgcgacgatctacaagccccgatgtttaacgaccaccctccgattgaggcctacagccaaaacctggaggatgaggccgctaatctaatcccccgcggagaacgcaaaaaactcgtaagcgatattcatcaggtgcagtacgcgatttcaaaaattgatgagcaacgtcaagcgctacaggatcagccggtaggcaatagcagcagtcgccgcatacggaatcgggagctggcgagcctggaccaaaagcgtgcgggtttagcagccgagcttgagcaaaaaacgcaggctttggctcctcacattcccggtgggcgtagctatgacgcaaaagcagaattatcccgacttaaccaacggttacaggaacagaggcagcttgtttcgagtattcatgaggatgcttccattgcccatattcttcatgatcactacgttaccgaagcagccccaggactctctacagatgccagaagcgaagcggggcatgtggccgcaatggactccgccatcgattctataaatagcggccgtggtgtagatgtgactgatcacctgacgggcgatcgtacttttattgttcgtggtgatatcgatgccggtaacgttgcccgtcagcagttggccgggaatgcttccaggcgcgtagatgcagtggtgcaggcggctgaccggcaggcgattcccgaaaaagttaatgcgtacccccccggtgttctgagcgaagctactaatcagcccttccagttgcttcgtgaacagcttgacgctgtggctgaaacgcacccggagcttcgcgatctcgttgctcagcacattgatagctttgaggctgaacataccacagctcgccgcactgcagagctttatgatgtagccgctgcatgcgctcttaaatttggatcctga

SEQ ID NO: 200044 - DNA, 1632 bp, Klebsiella oxytoca
gtggcgcagcgaggggtaaaacgatacgaggcggatggctacgcatctgcgcaaggtcagtaccgcactgcgttaaaaattgaagcgaaggaccaggttgatacccaacttgaccagttaggtaagttaaccaattacccggatgctgatatcgaaaaaatcaatggcatgtccgctgctttggatacccaagggcgtttagcttatggcgctcagtggggaaaagtcagacagagttggatcgataaaaactggtttaatcaggcgcaacaacgccttatgtcctcacgcaatgatggctccgcactatcagcgcttaataatgagctgactggtgaaaaaggattttacgttgataagctcgaccctgagaagcgtaacgcgctgttgaatcaggctatgggataccaagcccggatagaagctcgcgccatagcagcgcaaaatcacgccgatatgctggcattgcggagagagaattcggctatacatgccagcagcaccatgcagatgcgtatcgcaaacggcgaaataccaacggatcaggattggaataactatcttacttcggtttctggtaccagtcaggacggtaccgcgccggtactacggtctgcgctgcttgaaacccagagactttatagcctgcctccggagcaagcccaggcgcaagtcgatagcctggcgttgtctctgaaaaaaaacggtggtagcgaaattcagtacaaagtgcttaacgcggtgcagagcaacattgaccatcggcgtacccaactgcagaaaaaccctcaggctgtttttgcaatggattctggtacgcctcttgaaccgcttaaccctcaagccgcgctacagcagccgggtgaatggggcgcgggtctggcccagcggcaggcaaattccgatgcaattacccagaaatacggcgccacagcggggaaaaacctgctgactacggaagagctagggaatgcgaaggatgcctacgaaaaaatgtctcccgaccagcggatccagttttggcgaaacacccaggccagcagcacaccagctatagcatcccgtttagccagagagatcggcggcgatgcgttgcaggtttccgccgtggcgggacttgccagcaaccctgcggggtataaaaccgcgctggcggtggaaaacggctcccggcttttaaatcccgttgacggggcacctaaggtcagactgcccgcgagctttgatcaggatgttgcggtaacaataaaaagtagctaccccgggttaagcccttctcaggttcagcggttagtcccggtcgttagggattaccacgtagggaatggcggttctgccgacacaaccccgaaagcggaggacttatacgcggttataggtaagccggtgaatatctacggcagcgtagcggtagcccccgccggtgccgatgaaaacacctttatcgatgccttaaaaatcggggtcaaccgattgggcgacagcgctcaggatgtaaaaaacggtctaagtcagggcgtgtacggctttgtctctgactctgacggtaatcaggtgctgatcaacgcggcaacccaacgccgggttattgggaaagacgggcgcccggtagtgatcgaggtgggtaaatga

SEQ ID NO: 200045 - DNA, 243 bp, Klebsiella oxytoca
atgatcgcatcagtttgctggcctatatcatccgccaaccccttaccgctcaatcgcgccaaatggccgcaggagtatcagctcaaagagcactacgacatgcgggccgcggcactcatacgccagctgttcgagaagaaaattactcggcagtacatcgttgagtcgattgcagcgacgccggaaagctaccgggagtttttcaaagagagattaaatttttggcgggggaaaaggatatga

SEQ ID NO: 200046 - DNA, 1023 bp, Klebsiella oxytoca
atgactgacttgaaagaagtagttacaactgttaaagacgctttattaacgccactccaagaagcagtaacctttagggctcggagtgctttttttagtacgtttatcttctcatgggcgattcttaattgggataggatagcatacttcattttttcaaatgatgaaatattaaaaaaaatatcgctattgaaatctgaacatccaatgcctagttcccgtgaatcatatttcatcacacttactcaaaatataatctcaccgttaatccttgcaggaattgtcgtcgcggcttatccatttttaatttacgcaataacttggatacacaagtcaatatttgggagtattgatggattaacaagcgaaaaagaaagaatcaaacttctgaagatgaataagctcaacagaactaaagttaatggtgaggcgttaaccgagaaaatgagagcaaaacttgaacaagagatctcatcttatcgattacaaaaaactagagatgatgccgctagaaatagtctcttagatgaatttcatgagaaaagtaataaattgcaggatataatcaacgaaattaacacaaatcagatacaactagacaaacaagaatcaagaagtgtcgaattaacagaaaagttacagatattaaacgagaagattgaaccgattaaaagagatgatgaaagatacaatgctcttctatctatcaacacagagttaaatgttaaaattgattccttagaagctcaaaaaacaaatcttcaagacataattgacgatctgaaaaatcaattatccagatccatacaaacaaaaaaccaatacaaaacaaattttgaaatcttggagagtcaattcattgacgcaaaaaataaatatttcaatatagcatccgtcattaatagctcctcaggtggtcaaatgataaaggaaaactattctgacttcaactataatctagatcgtttatctaattccttttctacaaaaaactatcaagacatcgaagacgaacaaaattaa

SEQ ID NO: 200047 - DNA, 2253 bp, Klebsiella oxytoca
atgagagaaatcatcgttgataattttgctggtggcggtggggcgagtacgggcatcgagctggcgacaggccgcagcgtcgatattgcgattaaccacgatcccaatgccgtagcgatgcacaccaccaatcatccgggcacgttacactactgcgagtcggtttactcggttcggccaaaagttgcgactgccggccgtcgtgttggtctggcgtggttctcgccagattgtcgccatttttctaaggcgaaaggggcgaagccagttgaaaaagaaattcgtgggctggcgtgggtaactcttcgctgggggctggatgttgaccctcgtgtgatgacgctggaaaacgtcgaagagtttaaaacgtgggggcctctgctggcggcagaaatgcggccggacccggagcgcgttggcgaaaccttccaggccttcgtctcaatgctgactacggggatatctcccgatcacccggcgctggcggagtgctgcgaattcctgagtattcctctcgacagtgaggatgctgcgcgactggtaaaaggtctggggtatgtcgttgagtatcgtgagctgcgcgcctgtgactacggtgcgccaacgattagaaagcgtttcttcatggtaatgcgccgggacgggcagccgatagtctggccggaagccacccacggagatccgaaatcagcagcggtgcagtccggaaaaatagctccgtggcgaacagctgcggaatgcatcgactggtctatacctgcaccgagtatattcgagcgcaaaaagccgctggcagagaatacgctgaaacgtattgcccgcggcattcagcggttcgtcatcgacagcgataagccattcatcgtgaaatgcaatcacaccacaacacgcggcaaatatgactgtttccgtgggcaatcgctggccgatcctctgcagacaataaccaaaacccacggctttgctgtagccgttcctcacctgacaaaattccgtaccggcgcaactgggcagtctgtcaccgagccggtaccgactgttactgctggaacgtcggcgcgcccgggaggtaacggtcatgcactgggtatcgttgaagcagctctggccccgttcctggcaggcagcggtggaagcgagtaccaggcaaaaccacgtccattgtataaatcagcacatacaatcctgcaggaatcccgcgcatgcctgattgccccgttggtagcacgccagtttggcgcaagcatcggtcatcgcgcagacgaacccagtgcaacaatcaccgcgggcggtggcggtaaatcgcagctggttgtgccgacgttgattcaaatgggatacggagaacggccagggcaggcacctcgcgtgccagggctggacaaaccgctgggtaccgttgtggctggtggcggaaagcatgctgttgtcggggcgttcctggcgaaacactacggcgggaattatcagggcgccggcgttggcttggatgagccgacgcattcggtgacgacagtagaccatcatgcggtggtcgcggcacatcttatggtaaacaacaccggccatcccggcggttctgtagagtccccggcacataccgttacgacaggcaatcaccatgctgttgtcgcttctcacctggtcaaactgcgagggacctgccgtgatggccagtgcactgacgagccgatgccgactatcactgccggcgggcagcatgtgggagaggtgaaaacgacactggcggtcgaggtttacgacgaagagcgcgcccagcaggtgctggcgttcctgaaagagtattgcggaacggatagtaccggcctggtggatattgacggcgtgacgtatcgcatcgttgatatcggaatgcgcatgctgcaaccgcgtgagctctatcgcgcgcaaggcttccctggccatatcgttgatggtgaacgatgcgccggtgatacgaccgcggtcgcttaccgctgcctgcaggcgggaatccttctgctgcgcagcgatttcgaaagaatcatgaaactgcgtaacaaacgcagcggtgatcatgttcttgttggcatcaaatggcataacaatcactccagaaaagtatcgcctgcggggtgtcggtttcccggcccaaatctgcacaatgcggttggcgctggcgcattgcgggaaaatcaggtatccggcgtccccgccgggctggttgtgggaagattgttagcgagatgcgtggtcggaatcccgaccaaataa

SEQ ID NO: 200048 - DNA, 246 bp, Klebsiella oxytoca
atgaaagttaaatgcatcaaagataccgagggctactggactgaaggcgaaaattacgaagcagttgccgctcccggcggttttgtgctggttggggatgacgatgagccagacggtcaaggttggagcgctgaaccgatggaatatcgtgacgatggttctatcgtttacgcactgggcggtatcgaaggtgaagttctgtttgaggagagtacagcagagatggtctcgcaggaggtgagatag

SEQ ID NO: 200049 - DNA, 1209 bp, Klebsiella oxytoca
atggcagcgctgccctacatgcaactttacattgctgattacctggcggacaccatgcatctgtcaaccgaggagcacggcgcctacctgctgctgatgttcaattactggcaaacggggagggcgatccctaaaggtcgtctggcgaaaattgctcgcgtatcggctgatcgctggaaagaactggaacctgtaattaaagagtttttcgaagaagaaaatgatagttgggttcacctgcgcattgagcgcgatatagagactgttaccagctccccgagaggtaaaaaattacctactggcgaatccctgaaagggttcaacggttatgtgtatttcatccgaaatccattgtccgggttgattaaaattggctattcaaaaaatccgtgggctcgtttatctgaacttcgtcgtaactacggtagtgaattatccgtagtagctacgataaagaccgtagataagtcggaagtatctatccacacgacactcgcccaatttcgggtagagggtgaatggtttacggaaagtgagtgcatcaaatcacttattttgcgcattgtagccggtgaaataactaccgtagaggctacgaacacctacgtatcaaactactgtagtgctcctacggctcctacaaatacagatccagataaagatacagatctaaaagaaaacccctctctacgcgggcgagaaattccagatattcaggagccgcaatttctggtcggtctggatatccccatcggtaaattcacgatgtatgacaactggcgaccatcgcaggattggtctcggctggctgccacctgggggattgcactgccagtaccggcatatctgctgactgaactggccgagtttaccgcctactggaaatctgaggaaaaagtattcactcaggtccagtgggaacaaaaattcgcacgcagcgtggtaactgccagagctaaatccaaaccacaaccagtgaccggaggtaacggcaatgcaggacttcaatcagttagcaccaaatcccgggcagtccaggaaattgaggcagccagggagcgctgggagcaggaacgcgaacgtattggcggcggacacggcatggaggctctggacggtcatgggcgagatattttcgaaccgatggacccagaagaacggggcggcgccttcggatatgtggatggctcagattgggtcgatgagtga

SEQ ID NO: 200050 - DNA, 555 bp, Klebsiella oxytoca
atgcagtccatcaccttcgaaaatcataactcgcatgccgctgttcaactgaaatctgaaaatcagtattcgccgaggcgccgggacagcatgaagtgcagaactgtattcgcagctattcaggaatgggaattaacgttacccggacgtgcacaggaaatcatcgcgcagctggtggctgaacagtgggaaaaacagaacgggagggggatcagcgtcaataagcagaacctttatcgctatctgaaaaatgagagtgggtcggaaaagtacaccagttacgtgatgcagctggcgccggccattgctgatgcgatgccgatagagatcgcccgtaaacataatctgaaacgcggcttaactgagagcgagctggtggccaccgcgataaaagaatgcagtgaggcgcatcaggcgaagctgctcggcgctcctttgcagaagctggagcgggaaatccgtgaagcaacgatcgctttaatcaatctgcttccggcagacgtggcgggaccactactggcgagcatcagcgccgtagcgccacagtgtttttaa

SEQ ID NO: 200051 - DNA, 381 bp, Klebsiella oxytoca
atgtccgaagtcattggcgagagactgaaggctcttcgcgaaaagaagaacattagccaagcgcaactttcaaagatgtgcggatgggctacagcctcacgcgttggcaactatgaactaggaacgcgaaatatcggcgttgatgatgcggttgtactggcgagaatacttgatacctcacccagctacttactctttggagatgaggagaaccgtggacaagagctacctgaaaaacagaggcgtatgttgcagctgttcaatcagctacccgaagctgaacaggaaagaatgattgatctgttccaagtacgacttaaagaaatcgacgactacgtagaaaagtacctcaaaggtcgatttaaaccagaatcggaatga

SEQ ID NO: 200052 - DNA, 123 bp, Klebsiella oxytoca
atggttgatttcgctcgtgtagcaacaggccgccaggcagtacgccttaactggatcacagcaagaattcgccagctctgctacttcctcgcgcagaaaggggaccctgaggtaaacgcatga

SEQ ID NO: 200053 - DNA, 195 bp, Klebsiella oxytoca
atgagcaccctgtttgccctagttatcagcgtctgcgcgctgaccggcgaatgctctgatgttttgatcggcgtgtacgacacggaaaaaatctgcactgacgctgcttcagagcagcaagttaatggccaatgcatgccctacaagcaggcgttcgccgcggctgacgaccaacagcctgcagtaagtttttaa

SEQ ID NO: 200054 - DNA, 297 bp, Klebsiella oxytoca
atgtcagctaacgaactggcattgaaatttagcacggcaccagctgagcaacttgtcggagtgttacctgttcttgaggtcaaagaagcactgcgcgatgaggttgaggaagaagttcagggtgaagtgtggatggaccacgaatttgccatggaggtagctgagcaggttacagatgcattagctactgcaatgaaactggcgattacgcagcctgcaaaggcagctaaagcgacattacgaaaagctttaaaagagtatccaggctacgggcaggagccaccagcagccccataa

SEQ ID NO: 200055 - DNA, 234 bp, Klebsiella oxytoca
atgaaagttgaaacaattagtttcatcaaaaaaaatgcagcctctctcgatttagttgaacctattttagtaactcagaatggcgtacccgcttatgtgattgagtcttacgaccagcaacaggagcgggaaaatgccattgcacttttgaagctactcacgctttcagagcaagataaagctgaaggtaaagtactctcaaaagagcagttactagatagtttgtacagctaa

SEQ ID NO: 200056 - DNA, 336 bp, Klebsiella oxytoca
atggacagtaataaagttagtatcgagtacacacaaactgtaaaaatttgcatcactagcataggcactcatcttcggcaacaggatgtggagcccaagccagtgatagccaagattctcgatgaattcgatagtaaggtcagcatctttccacttggctgcccagtgtgctcggagttgctgaaaattggtattgcaaagtatcgtgagtgcaatacacaaggcgggtatcgagtactatactcggtagaaggttcaaaagttacggcgcatgctattttgtcacaccgacaggatatcaagcagctgctttttaagcgccttattcaggcataa

SEQ ID NO: 200057 - DNA, 855 bp, Klebsiella oxytoca
gtgattcggactctgacagcgattcggactcggacagcgactcggattccgacagcgactctgactcagacagtgattcggattctgacagtgactcggactctgacagcgactcggactctgacagcgattcggattctgacagcgattcggactctgacagcgattcggattcggacagcgactcggactccgacagcgactcggattccgacagcgactcggattccgacagcgatgctgactctgacagtgacagtgattccgactctgacagcgattccgactccgacagcgactcggactctgactccgacagcgactcggattcggacagtgactccgactcggattcagatagtgattcggattctgacagcgattccgattcggacagcgattcggattctgacagcgattcggattcggacagcgattcggattcggacagcgattcggattctgacagcgattccgactccgacagtgattcggattccgacagcgactccgattccgacagcgactccgattccgacagcgattcggactctgacagtgattcggattccgacagcgactctgactccgacagtgattcggattctgacagtgactcggattccgacagtgattcggattctgacagcgattcggactctgacagtgattcggattcggacagcgattcggattctgacagcgactcggattctgacagcgattcggactctgacagtgactcggattcagacagcgattcggactctgacagcgattcggattcggacagcgatatcgaggccatccccgatagcaacagcccggacgttgtcgcgctggaaggtaacctga

SEQ ID NO: 200058 - DNA, 273 bp, Klebsiella oxytoca
atgggcagggaaaataacagagaccatgagattcactacgtgggcggaattaaacttgctggagataaagagtattacatacccaaagatggtaataatggtcatgattttgagaatgtggtatttgaaaagtatcagcaatttaaaaagctagatgcatttgataaatctctccctcgaatatacacattcacaaaaaatataacaattggattactgggatggcactttataaattctgaatttgaaaaaacattttcaaagatgatttaa

SEQ ID NO: 200059 - DNA, 276 bp, Klebsiella oxytoca
atggataactggtcagcgcttttcgacggacagacccgatactttctggatatcaatgacagctcggtgaagccggatgttctgcgcttttacggcagggaagcactgagcgaacccttcaactgggacatcgagttcactacgctgcaggcgaacatccccccggaagaggtgctgatgaaatatgcctctttccggatgcggagcggtaaaagtgtgcacggcatggtgacccgcctggaatggctttccacctcaaaggaccagtctcactaa

SEQ ID NO: 200060 - DNA, 315 bp, Klebsiella oxytoca
atgggtaacccgacatttagatcatttaacgatgtgctcagggagcttgaggatgtatatggccatcaagaactatggctgtattcaggaatgacagatgtaacgccaacagaagtgattaacgacaaacataactggaagtcgccaaaaatcctgaaacgtaacggaaggatggttgcagaacgaatggataactcggacttgtggcaactggttggtgactacaaaataccgctgtctcaacattgtgttccgccctggcaatcctgtcagataaataaaaaatttaaggcctattacagtatcgtctcctga

SEQ ID NO: 200061 - DNA, 996 bp, Klebsiella oxytoca
atggcgaccacagtaatagctgcttttaacgaatttatgaaagataccgtgaacctcaacaaggcagataccgatgacgcacatgcaagtcgcgactggcttatcggcaagattaatgactttgataaggacggaacatttccggtgaactatccggacatacacattccattcggctcttttgcccgaaggactaaaatacgcccgcttgacgatatcgatctgatgctcgggttatctgcggaatcggcaacacataccatatacagtgatcacataacgctgaattctaccggagaaaacacgcggctgcaccagtataggcatactggagaaaataccatctgttctgtaaggatcctgaacgcctttaagaaccgactacaaggtgtttctcagtacgcaaaggccgaaatcagacgtaatcaggaggccgttacgctcaatctgagcagtaaggattggaattttgacatcgtgccctgctttatgtctaacgcagatgcttttggtaagaattattacctgatccctgacggtaaagggcactggaaaaaaaccgatccccgagttgaccggaacagggtttcggaaatcaatgttaaaaatgacgggaatgtccttaacgtcatcagagcagttaaatactggcagcggcggcccacgatgcccacaatgagctcctatctgcttgaaacaatgatactggattattatacaaacaagacagactgcttaaagtatatcgatatggagcttcaggcccttttcaatcatttaggcctttttgttaagtattctgttaacgacccaaagggtattcagggcgatatcaacaccctgtcgatggaagatcgtcagaaaatttcggatagatgctatctcgatgcgcagcgggctgcggaagcgagacagttcgagagggataatgatcatgaaaaatctatcaacaagtggcaggaagtgttcggccctcattttccagcttacgggtga

SEQ ID NO: 200062 - DNA, 933 bp, Klebsiella oxytoca
atgaataccatttatacaaaccagtcgaccagggaaaacctggatttgctttatgcacaggctcacatttatgacggagtaaagagctggaacaggttgaatttattcctcagcgtcatacttccggtaatactgtctgctgctgtagcgtacaaccgcagcaaaggtctgctcgataccgaattagcatcctcgttcctaggggtatatggtctgctagtattggcctttaatattgccttgagcagttatgcgtccaggcaacgcaggaaggcagcttctatacaggagatttatgactgcagggtgcttggtatccgacgtaatgagctgaaagtggaagaggttgcaaaggatgaaatcagccgagccgcatcatattttaagcaccggccggaaagaactgaccgtcgatttgggaaggaaggatggtatgtaagcaaagtgtatgacgccccacagcctgtgatggctctgctgtgccacggaaaaaatctcggctgggatcgctcactcagacagattcttcattgggtgtacttttgcgcagtcatcatttttccgacaggaattctggtctatggtattgccatgaaatctaggctgaacgaagtgctcttctatattgtcttcattctgcctctcattcgctacttcttgttacagtttatggataacctgagcagcataaaaagaagtgagaagttaaaaaaatacgttgaaaaggaattatcaaatataaaggtgtccggcagagtggattatgatacgttgggttacaccctgagaaatattcaggatgaaatcttctcataccgagcttcctgcccccctgcgcctaacgtatttcagcgcgctatgaaattcagaaatgaacaggtttatgacgattatttcgagttaaatttaaaagagctgcatttacctgattaa

SEQ ID NO: 200063 - DNA, 1032 bp, Klebsiella oxytoca
atggacactttgcaaaatattttacttgagaacatagacagcctttttgataaaaaacaaaaaatacctagcgatattgaaattgaaggtatgattaataatgtaattccagatatggtttcaatccttaaagagtcccttgctaattcgactcatgaaatgcttagagaacatcgttttctttcagatgagtttgttgctgaaaatatttcaagatgggagaaagcttttgatttgctagagacgctcgtagtgatatgcacggaatccggtgaggaattcaatagatcttatagaccacagtctgcctctgatggtgatttggtttttgatttagtcgttcgacatcatgccagagcttgtcatatcgccaacgaaatattatgcctcctaaaaaatggtttcgcagatgctgctcatgcaagatggcgagcacttcatgaggtatcggctacagctatgtttatagcaaagcatggaaaagaatgtgctgaacgcttttatcaccacgaagttgtcgactcatacaatggaatgattgagcacaaaaagtacgaacaccggttacaagaaaaaggtccaactatcgaagaagtagcagagtgtaaggttctatttgacctgttattaaaaaagtatggtaaaaaatatgcagataactatggatgggcctcttatatttttcctaaccataataaagttgggtttggagccattgagaaagatgttgagttagatcacatgcgcccttattataagtgggcgagccaaaacatacacactggctctaaggcgatgagaaaaaggcttggtctctgtgaagttgatgaggatatattactagttggtcaaagcgattcagggatgactgatccggcccatgctacagctattagtctgatgcagattactacaacacttttatttttaaaaccaaccattgatcacatcgtaatctccagagtaatacaagattattcagttgaggttgggaatgcttttcttgaagttgataggagaagtaagaaataa

SEQ ID NO: 200064 - DNA, 1440 bp, Klebsiella oxytoca
atgtcaaatcctaaattatttatatcttatagctggtccagccctgatcacgaacaaaaagtagtgaatattgcggaggaattgactcagtccgggattcacgtgatcttggataaatgggatctaaaagaaggtcatgatgctgtggcatttatggaaaaaatggtcaccgatcctgagctgcagaaagtcgtcatcgtcagcgacaaactttatgcggaaagagctgatggccgttctggcggtgttggtaccgaaactcaaatcatttcacgcgaaatctacgagaatcagcaacaaaataaatttgtcgcggtcattactgagcgtgatgataatggaaatccctatttgcctgtttactataaatccagaatttatattgatctgagtgatgaaaatcgttatgcagataattttgaaaaactactacgttgggtttatgacaaaccactttttatacgacccgaactaggagccaagccggcgtttctgaatgattctagcactatttctatggcaacgacgacgaccgccaggcgagcgctctccgctttgagggaacataaaccttttgcatcaggtgccttggatgaatactttacattattttgtgaaaatctcgagcttttcagggttgtcacgaaaggggatgattttgacgattcgatagtggcaagtattgatcagttcaccccctaccgtaatgaaattatctcgatgttcacaacgattgtacaatatacacccactgaggagtatctgaccaagattcatcgttttttcgaaaacctgatcccttatatgtatcgtcccgaacatgtaatgcaatatcgaaccgtagatttcgataactttaagttcatcattaatgagctttttttatactttattggattattaataaaacacgaacgtttcagtgaattggatttattcctaaagactcgattttatactggaaaaaatactgaaaccccttccgagggttcgagtacgagctacgaagtcttccgccagtacttagaatcactagagtatcgaaatcaccgattgaagaggaaccgattatctttacacgcagatttgttgcatgagcgttcgaccggttccggaattgattttcgttatgtaatgcaggctgattttgtcttgtacattagaacacttctggatgagaaagctgatcatattagttggtacccgactacattgttatacgcaactcaatcacaacatgcatttgaaattttcgccagggcatcatcaaaattgtatttcgaaaaaatgaaatccgtactgggaattgacacacctacacgactccacacactcgtagaagcatatcggcatggtaaaattaatgttccccgctggcagcatcagtcacttcatattgaaggtttgctaggatataaacacctaaacactaaggcctaa

SEQ ID NO: 200065 - DNA, 150 bp, Klebsiella oxytoca
atgaaatcttctcccgccgggaaaagagaagacaggtataacaataggtgctcctactgcttcaagacgtttctgagttgcttcaaggtcttccacatacaggataaccagtggaccaccagaagacttaacctcactcaacgtcgttaa

SEQ ID NO: 200066 - DNA, 495 bp, Klebsiella oxytoca
atggccttcactcaccgtcctattaagcatgatgacattcatatcatttgcggtttccctgaaacagtgcgggaactgttttttttctttcctaatgcatgttggccactttcaccagaacaattcacagtgacaattaatgaacgggttgataatacagttattatcgacaaggggcaggttgttgcattcgccaatttttaccgatggggagacaaagaatgtgctattggcaatgttatagtttcccctcttgcccgtggaaaaggagtcggtcgctacctaattcagacaatgatgaaaaaggcttttgctcaacatcttaccgaacaggtaaccctttcctgctttaacgagaatattgcagggttactactatattcacaaataggttttgaaccttgtgctattgaagcacgtcacgatcaggatggtcatcctgtggcactgatccacctgcgtatgctttgtgaacggacaaaaaacgggcgctga

SEQ ID NO: 200067 - DNA, 345 bp, Klebsiella oxytoca
atgaaagagattgcattgaatagttataataaaaaacatcttattgctaaaattttacaaggcttttgtgatgagatatataacatatatgaacaagaacctgaaactgcaacctatatattgagttgggggaaactttcagaagttatttatgatgtgttgataactcgtgaaataatgaaatgctctatcaaaaatgatatttctggtataaatcaaaatgtattaaaggaagaaatcttacattggcatctggagcataccattgaactcgtgtttaaaataataaatcaggctgaaaatcaagaccctgcttattggaagttaaaaatgacagttgtttga

SEQ ID NO: 200068 - DNA, 306 bp, Klebsiella oxytoca
atgattgttctctcaaaagagggaaataacataaatgataaaactaaggcttataatatgattgatggatttcacgttatgtatatgtatagaaaaattcaagctgaagcggttacaagcgatttaaaaaccttgaatcaactgttgaaaaatttccgcaaggtagtagtggagcgccgtgaagaatactatcaggagattggtgaggaaaaggcccagaaattaagggctaagagattacaacagctgcttgagaaaatggggtgtgattatgtatcaccggtggatctcattgactggcaatag

SEQ ID NO: 200069 - DNA, 648 bp, Klebsiella oxytoca
atgttagtaaaatactatggtttagtttttaataaagaaaccaatggtttttcaccaagaaccgagtttatatccaacggcttatttagaatgactcagcctaaatatctcaacgataaaggtagtgaagccagactatggccgtattttaatcgcttctcacccgcagattattcttgggcaaagagagaacatgataaaatacaactaaatccgtcatatactccctcaaatgaagagttggaaaacttctttttaaaaccctacggttctagatatggtgacagttttccgcatatggtacatcgagaaggttttaaaacaatggatgaatatgacctgactcaattaactaaagtcgcagagaaagttaatgcatttttggttgaagcattaagctgtcacttagggattatatctctttcaaaatctgacacagacgaacttatgtggacgcattatgctagtgaaggtcaggggttggctataacattcaatgaaaaccatcctttttttaatcagttaccaccgaaagatgtcagttgcactgcagacaaaagggcttctctcacatactataaaggtatgatgagaataaatggcacccctttaaaaaaattgataatattgattctgataatccgctaa

SEQ ID NO: 200070 - DNA, 480 bp, Klebsiella oxytoca
atgagaaaagtaaaaacagacaacagtgatgcaatccagtatttagatacgatcaaagaactaaaaaatcatattacgatagaagaatacagaaatgaatatcgtagactacgctctgatgacattccgtggaataaagttcagaaatttaagtctgaacatactgaacttcgcagactggataaaaagagagaatcccttattgaatgttttattgatgaattaaatcctatcagtagttcaaaagctaacacatcagcgaaatcatcaggtaattttgacctatttaacgagcgtgcattatatcgtaaagcactttcagaaaaaagtgatgaagaaattgttgccttagtcataaaacagcgtacagaagccgctatggagttccagcgttctgttgaaaagagccttgagcgactctctcacatctcgtcagggttcgagccatcaagccaaaaacgcaagaagatgtatctttaa

SEQ ID NO: 200071 - DNA, 669 bp, Klebsiella oxytoca
atgatacagatagatttcaaatcccttaacgatttatcatcttttgaactaaagcaatatattgatgagcatcatttcacctctgaacagaaagtacagatattcgaacattattacagcacacataaagatattaccaacatctattcaagaaaagaaaacatcaaatccatcaagaaagatgttgattatgtccatatgttcactaaaaacttccagcagctcgcagagcttgatatctcaaagaatgagttaaaagtcatcgcaaggatcttaaatatcatggagtttggaaactgctttcatatatcgcaagccaagctatgtcgcgacttagatatcaaaaaatcaaatatgtctcttgtctttaaaaagctcaaaaagaaagggatcattattgataaagacggagacctctttatgaactccaacatatttcttaagggacaagcacattctatcaatgctaaacagcgacctaatgtcaaaaaggcacagggatttgttgttgatgagaaagaaagatttgagaacgtttatacttttcgatcagatactgatgaaagcaataatatggacagaaatagtgaaccatctactgatggtgaagatttgaaactacagaaccctgagaagatgcccaaatacctatttgaagagacagaataa

SEQ ID NO: 200072 - DNA, 648 bp, Klebsiella oxytoca
atgatgtcattactgaatgacagaaggagtcatgcaagccgtgaaggtgttgaagctatagccaggatcgtgtcccgcctgaccctcgcgccggtctttgacatcataaacctctctaaagaacctatcagattcactatgcagactttacctcagaatagtattttctctgaggatttggactttcttagagatactttcacttattttcaaatcaccccggaatcaattgaaaaacatattaatctccctcaaggagggcgggggaaatacaaagcagatttgagaattgatttatttattatcaaaaaaaactgtcaccttaacctagcgactactttttttgaatatgatggcgcgcatcactttatagaaagcagtgtgcgcaatgataagtatcgtgactcatctttagccagcatgggcgctcccacatttcgcatgcaacatattgaaaaaaaaggaattgaaaaagaaaagtataaacaaaagttcaattctctttgcgaacaccatgcgaaaaacattattgagaatttcaggaagaaaatatacgaccacttcaatcctacctaccttatttacgacgataacggtgtgcctagtcaaataaatttcaaattagatttaagctttctgaacaaataa

SEQ ID NO: 200073 - DNA, 1293 bp, Klebsiella oxytoca
atgattttacgctggcaatggattctcaggcagacacttaaaaagctatggttcagggcaacgttatttgcaatggtagcaataataacggcccttttatctattctttttagatcaatgatcccagagtctgtatcagtgaaggttggtgcggaagcagttgataatattctgaacatactggcatcgagtatgctggcggtgaccacattttcactgagtatcatggtcaccgcttacggttcagccactactaatgtgacgcccagagccacgcgtttagttgtagaagacgtaaccacacaaaatgtactggccacttttatcggttcttttctcttcagcctggtagggattattgccctcaatatgggagcctacggagaaaggggtagagtcattttattcattgtaacactggttgtcattgccttaataatcatcacattgcttcgctggatacagcatttgacctctctgggcagggtaggtgagacaacagcaaaagtagaacaggcggcgatcgagacatttattgcgagagcaaaaagtccatgtcttggcggatatccatggcttgagaacaatgaacaaccaaaaggaactgttgccgtatatccggagaaaattggctatgttgaatatattgacatggtcaagctcggcagtctgctgagcaatgatcctcgtcatgtatatcttgtggcgcagccaggcagtttcatacatccatcgatgccagttttgtacctgagttctggtcaggagtcatcaatctgtaccgatttacttgaaacgatcattgtctcggatgtgcgttcatttgctcaggatccccgattctgtctcagcgtcatggccgaaatagcctgcagggccctttcgcccgcagtaaacgatcccggtactgcgattgatgtcattggcagaggtgttcgaatactctccgcttacgcgcagaataaaatagatgaaactgaagtgatatatccttcagtacatgttgcgccacttcagatcaaagacctactggaagactttttcttacctgttgcacgtgatggtgcgagtatgagggagattcagataagagtccttaaaggactgtctatgctgagtaagggttggcctgggatgtttgctgaagccgcacatatactggcatctgaaacattagagcatgcaactcgtactggtcatatagcccatgacgaatatcttataaaatcaatttattataatttattcagtggcgaaaatcctaaggaaggtgcgaacaagttcctgatatga

SEQ ID NO: 200074 - DNA, 858 bp, Klebsiella oxytoca
atgcaccagggggcggctgatctcgccaataccgttcagcaggatgtcgcgctggccctgtttaatttcctggagcatttcccgttttcttccgtgctgtcatttattgcaatggcgatggtcattgtcttctttgtcacctcggctgactccggggcaatggttgttgatacgctggcatcgggtggcgtcgctaacacgcctgtatggcagcgaattttctgggcctcgctcatagggattgtggcaatcgcactgctgattgcggggggactgagcgcgctgcaaaccgtgacaatagcgagcgcattacctttctcagtgattttactgatatccatatacggattattaaaagccctgcgtcgggatttgaccaagcgtgaaagcctgagcatggcgactattgctccgactgcagcgcgtaacccgattccatggcagagacgcttgcgcaatatcgcttatctgccaaagcgctctcttgtgaaacgctttatgggcgacgttatccagcccgccatgacgctggttcaggaagaactgaataaacagggaacgataagccatataagtgatactgatgacgaacgaattcggcttgaagtcgatttgggcaatgagctgaactttatttatgaagtgagacttcgtggctataactcaccggctttcgccatggctgcaatggacaatgacgagcagcaggttgagcaacatcgatattatcgcgctgaggtctatctgaaagaaggcggtcaaaactatgatgtgatgggctggaatcaggaacagctgattaatgacatactggaccagtacgaaaaacacctgcacttcctgcacctcgttcgttaa

SEQ ID NO: 200075 - DNA, 537 bp, Klebsiella oxytoca
atgcacattgcctgcgccgtgattaaaggaaatgtcgacatcctccatatcaccgctgatggataccgggtattgctgagtgggcgtatcctgaaaatcataaaaagagttcatggaaaaacggcttttcttgacactacggctgctgttaataccattgccaggaatcagtttcccgttattccagaagtcacagtttgtgatacgagcgttgactaccggccctgcctcaaagttgacgccatgacgtccgttatcattaatatcgacaccagatatcctgaggcctttattggttacttcactggaataccggacatttataccgtcctcaccattttcaaagatatgacctccagtaattgcgtactctccgataatctcggccgacttcccggtattaaaatacataccgtgttttgcatttcccttgatgatgaggttattaagcttccctctgaaacctggattacctccaccattggtgccaggctcggctacaaaaccgtactggttttcccgaagattcagatttga

SEQ ID NO: 200076 - DNA, 201 bp, Klebsiella oxytoca
atgtctgcaacagagtctaaggtaaaaactgcaccgaaaaccagcaaaaaaacgcttaagtctgccgaagctgaggcgcttaaagtggctctcgatgccgcacaggtcgagtatgtcccggtgacggcactggtgaagtctcccctgaacgtcaggacctgtatgggtccaccacatattgcaatttttactctcacgtaa

SEQ ID NO: 200077 - DNA, 216 bp, Klebsiella oxytoca
atgaaagatgttttagacactttgcgtcaagtgcgtgaaaagagcaaacacactgtagacaatagctctttgaaaaaactggatgatgcgattctgacccttgaaaagagaatcgaggagaattctagaggccacacagccttagattatctttcttatatcgcgaagatctttgctttaattaaacttctgagcggtgattctgattttcattga

SEQ ID NO: 200078 - DNA, 165 bp, Klebsiella oxytoca
atggcgacaggaaagtcctgctctcgctggtttgcggctattgcggccctgttaatggtggttagcctgagtgggtgttttgataaagaaggcgatcagcgcaaagcgtttatcgacttcctgcaaaatacggaatgcgtagcggcgaacgtctgccgacgctga

SEQ ID NO: 200079 - DNA, 231 bp, Klebsiella oxytoca; identical to SEQ ID NO: 199903

SEQ ID NO: 200080 - DNA, 1923 bp, Klebsiella oxytoca; identical to SEQ ID NO: 199857

SEQ ID NO: 200081 - DNA, 783 bp, Klebsiella oxytoca; identical to SEQ ID NO: 199856

SEQ ID NO: 200082 - DNA, 231 bp, Klebsiella oxytoca; identical to SEQ ID NO: 199859

SEQ ID NO: 200083 - DNA, 165 bp, Klebsiella oxytoca; identical to SEQ ID NO: 199860

SEQ ID NO: 200084 - DNA, 228 bp, Klebsiella oxytoca; identical to SEQ ID NO: 199855

SEQ ID NO: 200085 - DNA, 336 bp, Klebsiella oxytoca; identical to SEQ ID NO: 199854

SEQ ID NO: 200086 - DNA, 339 bp, Klebsiella oxytoca; identical to SEQ ID NO: 199853

SEQ ID NO: 200087 - DNA, 330 bp, Klebsiella oxytoca; identical to SEQ ID NO: 199852

SEQ ID NO: 200088 - DNA, 249 bp, Klebsiella oxytoca; identical to SEQ ID NO: 199851

SEQ ID NO: 200089 - DNA, 3975 bp, Klebsiella oxytoca; identical to SEQ ID NO: 199850

SEQ ID NO: 200090 - DNA, 609 bp, Klebsiella oxytoca; identical to SEQ ID NO: 199867

SEQ ID NO: 200091 - DNA, 738 bp, Klebsiella oxytoca; identical to SEQ ID NO: 199868

SEQ ID NO: 200092 - DNA, 609 bp, Klebsiella oxytoca; identical to SEQ ID NO: 199849

SEQ ID NO: 200093 - DNA, 135 bp, Klebsiella oxytoca; identical to SEQ ID NO: 199869

SEQ ID NO: 200094 - DNA, 477 bp, Klebsiella oxytoca; identical to SEQ ID NO: 199848

SEQ ID NO: 200095 - DNA, 246 bp, Klebsiella oxytoca; identical to SEQ ID NO: 180600

SEQ ID NO: 200096 - DNA, 366 bp, Klebsiella oxytoca; identical to SEQ ID NO: 199846

SEQ ID NO: 200097 - DNA, 228 bp, Klebsiella oxytoca
atggataaatcggcattgcttttggagaaactccggcaacgaacgcaaagtagcctggccagcggtggcgacggctttgtctttgcatcgatgctggtctttgacgtgggcttgaatgcccggactattcggcaaatgttggacgttgcagtaaggaacgggacgcttgaaaaaagggaaagaggcataggccgcgcgcataagtatcggacaaatctgcaaatttga

SEQ ID NO: 200098 - DNA, 204 bp, Klebsiella oxytoca; identical to SEQ ID NO: 199845

SEQ ID NO: 200099 - DNA, 288 bp, Klebsiella oxytoca
atgaaagtaaaaggcatcccatttaaccaggtcaaagaaagtctgctcaacaccccggaggcaatccggggttaccaggaagcagataaagagctggcactggtcgaaatgctgtacgagatgcgtgaaaaggctgggttaagcaaatctgccctggcggagcggatggggatcacgccatctgctattagccgcctcgaggggaacccgttgggggccagcatgaagacactgagcaaatacgcgcaagcgtgcggcgctgaaattaacatccaggccgtatactga

SEQ ID NO: 200100 - DNA, 309 bp, Klebsiella oxytoca
atgtttaacgtgataacccacccggcagcactggaagagttacaggaactaccggacgagttacgaggtcgcatgacccgactgattgaaagactggaaagtgaaggaaaactaaaaatgcctcatagccgcgtaattggcgccgggctttttgagttaagggttggagacaaaaacatagcaagaacgttatacgcttacgcagtcggccacgaaatctacctactgcatgcgtttgttaagaagacacaaaaaaccccggcaggggccatagagatagcgagaaagcgcctgaaggagatgagctaa

SEQ ID NO: 200101 - DNA, 222 bp, Klebsiella oxytoca; identical to SEQ ID NO: 180594

SEQ ID NO: 200102 - DNA, 231 bp, Klebsiella oxytoca
atgatgaacgtgaaacagatccgcgagaatatgaccgaagcggccctgagcgttgagagtgtaatgcggggacacccccgcatcaccctgcaggaattaagcaccgcctgcagcattagcctgccagcggtggagtttattatcgagcagatgctttgtatgagggtggcgcagcggggcgcttttgggcggtactcccttaccccggaataccaaaatggtagcttttaa

SEQ ID NO: 200103 - DNA, 1062 bp, Klebsiella oxytoca
atgaaaaacactgtgaaaataaacagtgctgaacttgtgcatgcagattcacttgagtacatcaaaaccctgccggacaacagcttagacgccatcattaccgacccaccgtattaccgcgtaaaggcaaatgcctgggataaccaatggcccagcgtaacggattatttggcctggctggatgagtttttcgccgagttctggcgagtgcttaagccagcagggtcgttatatgtgttctgcgggccgaaattatcatcggacactgagctgttgttacgtgaccgtttcaacgtgctgaaccatatcgtttgggccaaacccagcgggcgctggaatggcgcgcgtaaagaaggtttccgatcttattttccggccagtgagcatattttcttcgcagagcattacggcgcggaaggctttgctaaaggccaggctgggtatgcgacaaagtgccaggagttgaaaggccaggtcttcgaaccgcttatcgcttatttccgggatgctcgccagcgacttggtatttccgctgccgaaatcaacgcggcaaccggcacgaaaatgtgtagccactggtttagcgtcagccaatggcaattgcccaatgaacggcagtacctggcgctgcaggcgctgtttaaccgtaaggccgcagagcagggaataacgggattgtcagagccgcatgcggcgctgcaggaggaatacggcactttaacggcgctatattccgaactggttatgcagtattccgaactgcgacagcagtatgagaatttgcggcgccctttccatgtgacaaaagatgttccacacaccaacgtgtggacgtatccaccggttccgtactatccgggcaaacacccatgcgaaaaaccgctgcagatgatgctcgacatcatttcggcttgtacgcgccctggcgatgtgatcgccgacttttttatggggtcgggtgcaacgataaaagccgcgctgcagttaggacgcggagccatcggcgtagagctggaagaggagcgatttttacagacggtctccgagatagaaaaacaataa

SEQ ID NO: 200104 - DNA, 312 bp, Klebsiella oxytoca
atgaacacagctatcgaatatggaaatcctgatctctggctggtcttgctcatgctggccgccggggtggtatcaagcgccctgctttccgaaacccctatcaacccgcgccgcctcatcggagacgttctgagaggcgtaatcgtggccatcatcctctgggcttacggcgctatgggcaacatctcaattttgaacgtaatcactctcgccggtttatcggctgtggcatggccacacaccgtcaacgaaatcaccggctttgcaaaacgaactatcagccgaattttcggcgggagaaaagaaagatga

SEQ ID NO: 200105 - DNA, 492 bp, Klebsiella oxytoca
atgaattatggactggtgagcaagcaagacgcgcgcctgtatgccgaagccgtttgcgatgtgatcgggcatggcaaggcgaatgcagctgttttgctgtgtgtcgaaacggccgcagctgagacattgctcggcgattacaaagacccgacgccgaccagcgccggaaccggattaacccaggttgatctcggtaccttcgaatggctccgcgataagtacaaaaacagccgttatgccccagtactgctgaatcagtttggtatcgacctgagccgaacagtttatcaggagctgagaacgtccccgctgctggcgatgctgttttgccgcctgcgttatctggccgtttccgagtcgattccggcgacccgggagggacgcgcgaactactggaagaagtattacaacacctcggcgggcaaaggcacgccgcaggactatatcgataaatgccagcgtgctggcgttgatgcgctattcacgcagtga

SEQ ID NO: 200106 - DNA, 477 bp, Klebsiella oxytoca
atgaacagtttaaaacgtatggctaaagcctggttgctgatgaatggtgccttcgtccttctcgtgatggcgacgcaaccagcgatggcaaatgagagccagagtcttggtttggatctggattcaattctgagcgctcttcctactggctgggccagcggcgtaactgccgtatttatcgtgctgtatgcggtggcgcagctgcgcgccgtactccccccgtcagtgaccaaaaggattcccacggtggtcatgaaaattctcgacctcgttgccgcgaactatgcccacgcccggaacgctgatgcgatcagcaaagttgcgcgggatgccgggaaagccaaaggcccatcagatgttgattatcgtgtgatggtggaaacggccaaaaacaatggagagcttcgtggaagccggattgagagtgctggcgattatcctggagatgatcgcccaggcagtaaaagcccgcaatga

SEQ ID NO: 200107 - DNA, 219 bp, Klebsiella oxytoca
atgcgcgtaataacccagctgattatctgcgtcgctttggccgggtgcgtgaaatcaacgccaatgacaccaacactgaatccggctccgtgcgcagcggaaaagccggtgattgatgtggttcacgtcgatgggcatttcgttatcgctgatgacgatatgggtaaactgaccggctacattgccgcactggaagcgggctgcaccgcaccgagataa

SEQ ID NO: 200108 - DNA, 174 bp, Klebsiella oxytoca; identical to SEQ ID NO: 199871

SEQ ID NO: 200109 - DNA, 225 bp, Klebsiella oxytoca; identical to SEQ ID NO: 199872

SEQ ID NO: 200110 - DNA, 1209 bp, Klebsiella oxytoca; identical to SEQ ID NO: 199873

SEQ ID NO: 200111 - DNA, 1077 bp, Klebsiella oxytoca; identical to SEQ ID NO: 199874

SEQ ID NO: 200112 - DNA, 285 bp, Klebsiella oxytoca; identical to SEQ ID NO: 180585

SEQ ID NO: 200113 - DNA, 432 bp, Klebsiella oxytoca; identical to SEQ ID NO: 180584

SEQ ID NO: 200114 - DNA, 423 bp, Klebsiella oxytoca; identical to SEQ ID NO: 199877

SEQ ID NO: 200115 - DNA, 1710 bp, Klebsiella oxytoca; identical to SEQ ID NO: 199878

SEQ ID NO: 200116 - DNA, 1260 bp, Klebsiella oxytoca
atgtttatcccccaaatgttcagagggcgccagcaatcggggaatggcttctgggaagccatgctgggcggggttcgttcaagccagagcaaaactggcatcataatcacgccggaaaccgctctgggactttcagcggtccgggcctgtgtcaccctcctggcggagtccgtcgcgcaactgccgtgcgaactttaccggcgggataaaaatggcgggcgacagcgtgcgacggaccacccggtttatgacctgattcactcccagcccaacaggaaagacacctcattcgagtatttcgagcagcagcaggggttgctggggctggagggaaattgctactcgatcatcgaacgggacggaaaaggctacccgaaagagctgatccccattaacccgaaaaaggtcattgtgctgaaagggccggacggtatgccgtattaccaactcccggaagtcggcgaaattctgccgatgcgcatgatgcaccatgtgaaggttttttctctggatggctatatcggcagttcccccattcagacgaacgccgatgttcttggactgaatttggccgttgaggagcatgcggccgcgacattccggcgcgggacaacgatgagcggggtgatagagcgtccgaaagaggccgcgaccattaaaagccaggatgctattgatcgcctgctggcgaaatggaccgagcgccattccggtattcacaatatgttctctgtggcattgctgcaggagggcatgagctacaaacaactgtcgcaggataacgaaaaggcgcagctgctacagtcgcggcagtggggcgtggaagaggtctgccggctctataaaatcccgccacatatggtgcagatgctggcgaaagcgaccaacaacaacattgaacaccagggcctgcagttcgtgatgtacacgctgctggcatggctgaaacgccatgagggtgcgttgcagcgcgatctgctcctgcccagcgaacgccgcgatttgtacatcgagttcaacgtttccgggctgttgcgaggcgaccagaagtcacgctatgaatcgtatgcgctgggccgccagtggggatggctatccactaacgatatccggcgtatggagaatttgccgccaattgctggcggggacaaatacctgacgccgctcaatatggtcgacagcgcgcagatccttcctggcgataagtcgccgacagcaaaacagctggccgaaatcgaaacccttctggccagagcctga

SEQ ID NO: 200117 - DNA, 921 bp, Klebsiella oxytoca
atgacaacgaaattaattaacctgccgcacctggcagatatggtctttggtgtgccacattacgtgacgcggcaaacaatggactccgtgaaagcggtgctcatcccccgtattcaggggatcaccgaagatgccgtcattcagatggcgctgaatccgggtaaatcacctgctgctgagcaggtccagcccaccggcggggtggcggtgatccccgttcacggcattcttgttccacgccgggggcagattacggcgatgtgctccgagctgaccagctacgagcggatccgcgggcagttgcaggcggcgttaaacgacccctcaatcagcgaaatcgttctggatattaactccggcggcggcgcagcggtggggtgcaaggagctggccgattacatttatcagtctcgcgacacgaaacccatcacggcgattgtgaactacagcgcgtattccgccgcgtatttcatcgcatcggcctgcagcaaaatcatcgtcagccagaccagtggcgtggggtcgattggtgtgatcatggagcacctcgatacgtcgaagatggaagaaaaaatggggctgacgttcaccaccatttaccggggagataacaaaaataacggcacccaacatgaaccactgagtgaagagtcgctgggtatgttccagggcatgatcgacgaaatgtacgagacgtttacggggtcggtggccgaatatcgcggcctgaatcagcaggccgtcattgatacgcaggcggggctgtattttggccctggcgcggtgtctgccggcctggcggatgaagtctctgacccccaggcggcgatcaatgctatcgcggcaaagtatcagcaaccccgtcaaaaaacctccattcagatgcaggcagccgcgatggacctgcaaaccaaaatgtaa

SEQ ID NO: 200118 - DNA, 1287 bp, Klebsiella oxytoca; identical to SEQ ID NO: 180579

SEQ ID NO: 200119 - DNA, 396 bp, Klebsiella oxytoca; identical to SEQ ID NO: 180578

SEQ ID NO: 200120 - DNA, 318 bp, Klebsiella oxytoca; identical to SEQ ID NO: 180577

SEQ ID NO: 200121 - DNA, 339 bp, Klebsiella oxytoca
atgagcctgaaaccgggtgatatgaactgtcgcattgcgattagctacgttcagtccggtcgggggccgctgggcgaaccgctaccggaaaagcaggttgaatcgggaaaagcgtgggcaaaacgggagctggtatcggggcgaaaagtccgcacgctggatcagcagcaggtggtggaaacctgcctgttcacggtctatccgggcgtgctggttgatattgactggaaaatcacgacgaaaaatctggtttataccgtccggaatatcgaccgcaaaacagaccggatcattatcacgggggaggctgacgggcggcatgatagagctggcgattaa

SEQ ID NO: 200122 - DNA, 390 bp, Klebsiella oxytoca; identical to SEQ ID NO: 180575

SEQ ID NO: 200123 - DNA, 402 bp, Klebsiella oxytoca
gtgatccgaatggaagttaaagggctggatgagctggagcggcagttaatggccctgggcgaaaaagtggcgacgaaggtattgcgggatgccgggcgcgaagcgctaaaggtcgtcgaggaagatatgaagcagcatgccggctttgacgaaacgtccgccgggccgcacatgcgggattcaatcaaaatccgctcttccacccgcaagggtaaagggaacgcggttgtaacgctccgtgtcggccccagcaagcagcaccatatgaaggcgctggcgcaggagtttggcacggttaaacaggttgcagacccctttatccgacccgccctggattacaacctccagaccgttttgcgcgtgttaaccgtggaaatccgaaacggcattgaaaacaggtag

SEQ ID NO: 200124 - DNA, 462 bp, Klebsiella oxytoca
atggctgataaaacttcgcctgaatatgcgatgttgccggcgggcaccattgtgaaatacggggagcctggcgctgccacgtcagcgctgaaaccgctgattaactgtaaagcgctgggtgcaatggggcagacggggggctttgtcgactgcaccacgttactggataagcagaaacagtccatcagtgatctgcctgatgggcctgaaaagtcgctgggcttcattgatgatccgggcaataccgattttgccgcgctgctgaacgcagcagaggcccgcaagaccatccagttatacgtcgaattacccaacaagcgaacagcgacgatgctcctggcgctgtccgggtggcagatgaatgaaatcgccgctccggcgaatgaggtcatccagatcactgttcagggtaagcagaacaagatcacctggggaaccgtcgctgtctctggcggcgcctga

SEQ ID NO: 200125 - DNA, 366 bp, Klebsiella oxytoca
gtgaaagataaagattacctgtccacgctgaaatccgcgttgcttaaatcggagccaaccgtcattaaaaccgagttatttggcgccaccgtattcatccgccgcctgaccggggattacctcatcagttacgaagagaaaatggctgaaaccgcaaaagctggcgcagcgcgcgaggcatcggagcaagccatccagctcgtcatcgatgcactggttcagccggatggaacggccattccggatgagtttaaacccacggcagccgaactgctgaaggcccatgaaaaccccgaactgctggccgcagtggaaaaagtgaagcaacacgcaatcggcaagctggaggaagcggaaaaaaactga

SEQ ID NO: 200126 - DNA, 3381 bp, Klebsiella oxytoca
atggcagacgtcgcatctttagcggtcgggctgcacctgaacgcagccagttttaaatcccagctgctgggagcgtatggcgatgcggagaaccagtcacgacggttcaaccgtaatgctcaggcggacgcgaaaaagacggaggacgcctataaaaaggtcggtctgtcgatatccgggatggccagccggctggcggggctggcaggagccggcctttccatcggtacgatcgtcaccacgtccagacaatatggacaggcgttatcagatctgcaggccatcaccggtgcgactgctgctgaaatgaaagcgctggatctggctgcgcaggaaatgggacgcacgacagagtacagcgccagccaggccgccgaggcgctaaagctgatggcgtcggctaaaccggagcttttaaaaacgtccgatgggctgcagaaggcgacgaacagcgcgcttatcctggcgcaggccgccggcacaacgttgcccgatgcgaccagaacgctggcgctctccttaaaccagtacggggcgagcgcgcaggaggcggatcgttatatcaacgtgctggccgccggcgcgaagtacgggtcgtcggagattgttgatacggcggctgccattaaaaatggtggcgtcgcagccgcacaggccggcgttggttttgagcagctgaatgccgcgattcaggtgctggcagagcgtgaaattaaaggcggtgaagccggcaccgcgctgcgtaacgtcatcctgaatctggaaaagggcacggacaagagcctcaagccgtccgtggttggtctcagccaggcgctgactaacctatctggtaaaaatctgtctacggctcaggcagtcaagctgtttggggtggagaacctgaatgcggcgtctatcctggtccagaaccgttcaaagcttgatgagctgaccgcttccctgaccggtaccaaaacagcgcatgagcaggcatccatcagggttaacaacctgaacggcgaccttatggggttgaccagtgcatttgaggggatgatcactaaggtcggaaaaagcagcgatggcgcgttgcgtggcggtattaatggggcgacagaggccattaacggactggctgataatttcagtgtcgtttcagatatcgcgctgtacacgttgatcccgattttatcctcaaaactaacatctgcactgtcggcatcaaccgctggtttacgtgaaaatgtaagcctctggaatcagaaccggatcgctataaagtcaaaggctcagtctgatgccgagaatgcccggcgaacactggaatcaacagccgccactttaaaacgaaatgatgcagaatttggttactaccgtcagatggagcggacagccaaactgcatgggctgaacgtcagttaccagagcgaatttatccggcttatccgacaggaaaccgagcaaacgaacctggccagccaggcgaagctgaagctggcatcagcaaaccgccagctcgctatctctactcgtgcaatgtccattgccgcgggcctggggcggggggcgctttctctccttggggggcctctgggggttgcaactctggctgccacggccatttacgagtttaaccagagcaacaaggtggcaaggcaatcggcgctggatctgaaggacgcagttgtacagacaacagcagaactgctgcgaatgtctcaggccaaaatcgccgtcaaagttgacgattatcaggagcaactggagggaattaacaaagagcgggagaaggtcaaaaatgagttaacccgttacagtgacacgcgcctcaacctggcaaaaagcagagaagatggagccctcagttttctgtttccatcggcgaacagccttcagaaagaaaaaaatcagttgctcggtcagctggaagacctgaattcggcagcggaaaggactcagcaaaaccttattaatgcccggattgccgcgacgggtaaaaccttcgccatcgatacatttttaccacctgagcagccgggtaatactggcccaactggagatgataataacaataatccgtggaccggtgatggtggggaggggaaaaagaacaaggaaaaggttgaccagttcaagcaactgaggcagcaaattgaagaggcgcatgcgtccagtctgggtcgtatcaatcttcaggaggtggaaagtaatcgccagttgcaggatgcggcgaaaaagtacggtgccagtgatgctgacctgcagagggtactgttactgaatgcggagaactaccagaagcagagactggatctggcggcgcagtattcgccggtgaaggaaaccctcctgaaagagcaggaaggcagccgggaactggagtcgatttttaaggctcgcctgctgacggaacaagagtaccagactgcccgaatcactctggccagggatacagccaaagagctgctgcaggcgcaggctgacgaaatagctgctcctaaactggatatcgccggtgaagtcgatcccctcgtctccctgcgcaatcagctggcgcaacgtcagtcgttgctgcaggcgtattacaccggtaatgccatcagcaaggatcagtacgaaatgctgatgcagaaggcgacgaaagagtcggcagatgcgcagtatcagacttcgctggagttgtaccggtcacagggggagatgcagagcctggccgtcgggttatttgaaacggcccatgagcgctcaagcaacttcctgacgagcatgctgacgcggacgagaagctttaaggagaacatggctgacctgttttcctcgctcacacagtcaatcataaaaaacctcgttgatatggccgcacaggcgctggtcaccagttctgtcatgcaaaccatcatgggtgtggtgggagctggagtgagtattgcaggtggtgtttctggagcggctgatgtcggcgcaggaactgcgattcagaatgcgggtaataactttaactttcaaataccgggttatgccaaaggcggtgtcttcgattctccttcattaagtgcctacagcaaccaggtctacgactctccgcagttcttcgctttcgcaaaaggggccggcgtatttggcgaggccgggccggaggccatcatgccgctgacgcgtgccggtgatggttcgctgggtgtacgcgcggtgggtggtggtcagaacgccggcgcgtcggaagggccaaaagtctatatcacgattgaaggcggaaacacctcaacgcaggcgccgtctggttttgagcagtttggccagcagattggctcgtttgtggagaaaaaatacagggagctgatggcgcaggatatgcgccctggcgggatggtctggaatgcagttaaagggcaacgttga

SEQ ID NO: 200127 - DNA, 339 bp, Klebsiella oxytoca
atggctattgagatattcacctggagtccgcgggttaatccccagcagaccgttaactttcgtgtccggaaggcgcagttcggtgacgggtatgcgcaggtatccggcgatggtattaacacccgatcacaggattgggagctgagttttgtcggtacggaggactatatccgtccgattaagcagttcttcgaccgtcatgccggcacccgcgcgtttcagtggaccccgcctctggaagaggtggggctttaccgctgcgaacaatataaaccggtgccgctgggcggcggaaattactcactttcagccacttttattcaggcatttaaaccatga

SEQ ID NO: 200128 - DNA, 756 bp, Klebsiella oxytoca
atgagccttaacgcgaattatcagaagttagagccaggcgatgaggttcgtctcctggagatcgatggccaggcgtttggcctggacgaggttttgtatttccacggctataacgtcccccatactgcagccgaaatcctcgccgctgacggcgacctggataagctgcctgcgaaaagcatctggtggcaggggcgggagtataaagcctggccatgtgtaatcgaagggatcgagtcatccaccactggcagcgacgcgcagccaacgctgcgggtagggaacatcgacgggaaaatatccgcgctctgtcttcattacgacgatctggctctggcgcgggttgtcatccacgacacgcaaaaacagtatctcgatgcgaagaactttccggacgggaatgcctcagctgatccgacgcaggagaaacggcgccttttcttcattgacgtaaagcattatgaagacgatgagaaggtggaatttactctctccagcccgtttgccctgcaggggatgatgatccccactcgccagctgcatgcgatttgcacctggtgtatccgcaatcagtaccgcagcggtaacgggtgcgactatgccggcacccggtattttgacaggaacaatcagccagttgatgacccgtcgcaggatgtctgcaacggaacgctcacggcctgcaaattacgtcatggtgagaatagcgaactgccgtttggcgggttccccggcacttcattaatcaggagctga

SEQ ID NO: 200129 - DNA, 711 bp, Klebsiella oxytoca; identical to SEQ ID NO: 180568

SEQ ID NO: 200130 - DNA, 351 bp, Klebsiella oxytoca; identical to SEQ ID NO: 180567

SEQ ID NO: 200131 - DNA, 612 bp, Klebsiella oxytoca
atgattacagttcaggagtcaatggttaatattgagctgagcggtgaattaggaaagcgatttggtaaaaaacataagcgcctagtagccactacaaatgaagctattcaggcgctttgctgtacgatcagtggctttgaaatgttcatgaataaagcgaaagaacgaggattgacttttgcgatattcaagaacgggaaaaatatagggctaaatgatttttcttatcctgttaatgatgaaactataaaaatagtccctgttgttattggtagtaaaaaagcaggggtattgcagactatccttggcgcagtaatcatagctgctgccgttatgcttggacctgccggcgccggtgctttagccgcaggcactgcgtggaatgtcgggttggctggcggcgccatgatgctcggcggcgtcgttcagatgctctccccacagccagctggcctggcacgaaaagaatccgctgacaataaagcgtcctacgcctttgggggcgtgacgaatactgcctctcagggatacccggtccctttgctttatggcaaacgccgaattggcggagccattatatctgccggtatttacgtagaagaccagcaataa

SEQ ID NO: 200132 - DNA, 405 bp, Klebsiella oxytoca
atggggcagatcaatacgatggctccgctcataaccggaggttgttttacccgtgacagcggtttccagcaccgtctgccaggcgccgccgtcggtctgcaggtcaatcgcatacttgacggtattgcccaccacgtcgccgtcatcttcctgtttcatcagggacggccatttcaggcggacacgaacggcagaaagctgggtattagtaaaggtatgggtccaggctgtcttgctggaaacttccgttcctacactgatttcattttcagtaccgggaataccctgaatataagtctgagcctgcgtgccggggcgaaattcccaggacacgccactgaagttttgcgaaccatcagcattttcaagcggggtgccatcaagataaatatctttcccggttaa

SEQ ID NO: 200133 - DNA, 231 bp, Klebsiella oxytoca; identical to SEQ ID NO: 199903

SEQ ID NO: 200134 - DNA, 1593 bp, Klebsiella oxytoca; identical to SEQ ID NO: 199427

SEQ ID NO: 200135 - DNA, 675 bp, Klebsiella oxytoca
gtgctccagccgggcaagaggggattgtttatccggatcggttacccgcagcgggataaagagcgccagcaggatacccgcgatggtggcgtgcaccccggactgaagcatgaaaaaccacagcacgccccccgccagcagatagggaaacagccgggtaatcccggcacggttcatgataaacagcagagcaaccgtgaccgccgcaccggccagcatcagaaacgaaatattactggtatagaagagcgcaataatagccactgcgcccatgtcgtccagaatagccagcgccgacaggaaaattttcagcgaggcaggtacgcgactgcccagcagtgccagtaccccgagcgcaaaggcaatgtccgtggcggcaggaattgcccagccagcgagggtttcatcgctgcccgcattaaaccatacgtaaatggccgcaggcacggccatcccgcccagcgcggcaaatcccggcagcgcgcgctggccccaggtggcaagctgaccggtgagaagctcgcgcttgatttccaggccgaccatcatgaagaacacggccatcagggcgtcgtttatccagtgctcaacggagaggccggcggcgttgtatttcaggaatacctcatatccctccctgagcggagagttagccacgatgatagcggctgctga

SEQ ID NO: 200136 - DNA, 954 bp, Klebsiella oxytoca
atgaaaactgaacaattgatacctctttgccagcgctatcaggccttactgctcgatagtaatgaacacaccatcgctatcgccgtggttgacgcccccgccccggagctgctggaagcgttacgtttcgcgacgcagaaaaggattgatatcgagtgctggagccaggaccagatggataagcggctgcagacgccgggaatatcaaccctcaccccgcctgttgaagcctcggccagcatcgttgaacaggtaaatagccttctggaacaggccctgcgccagcgcgcatcggatattcatattgaacccggtgacgatcgcctgagaattcgcctgagggtagatggcgtactccattctcttgcgccgcttgcgccggaactcgccgcccccatcaccgcccgacttaaagtgctcagcaatctggatatcgctgaacaccgggtaccgcaggacggtcagtttaccctcacgctcgcagaccgcccgatctcgtttcggatcgccacgcttccctgccgcggcggggaaaaaatcgtccttcgcttattacaccaggtcgaacaagcgctggacctcgaagcgctggggctatcgtctcagcagcttgccgcctttcgctcggcgcttaaccaacctcaggggctgatgctggtcaccggcccgacgggaagtgggaaaaccgtcactttgtatagcgcgctgcaggcgcggaatcgcgacgaggtcaatatatgcagcgttgaagatccgctggagatccccatcgtggggatgaatcagacgcagattaatccgcgggcgggcttaacctttcacagcgtactgcgcgccctgctacgccaggatcccgatatcatgatggtcggagagatacgcgatgcagaaaccgctgaaattgcgataaaagcagcgcaaaccgggcacctggttctaattacaactctctaa

SEQ ID NO: 200137 - DNA, 1164 bp, Klebsiella oxytoca; identical to SEQ ID NO: 199886

SEQ ID NO: 200138 - DNA, 966 bp, Klebsiella oxytoca; identical to SEQ ID NO: 199887

SEQ ID NO: 200139 - DNA, 1500 bp, Klebsiella oxytoca; identical to SEQ ID NO: 199885

SEQ ID NO: 200140 - DNA, 6858 bp, Klebsiella oxytoca
gtgaataccgataaagcgctggcgcagaaagccgatgcgacagcgctggccacgctcgacacgaaagtgacgcagcagggcaaaacgctggagagccagagcaattcgctgacgaacctgtcgaacagcctctcgcaggtcgcggcagatatcgatgccagcgggcagataccgggtaacctggtcgtgaatccctcgtttgaacgcgggctggatggttacaccgggcggtcaaccgctaccagtgtggtggaggtttccgttcctcttagcgggacgcgggcgctgaaggttgatccggggaatgtgactccggggcaatacatcccgtttgttcaggggcgaacctatgaaatcggggtgtgggtcaaggaacccggagcgacgacggataatggcgcggggaacaacaagctgcggatcggcaactctgccggccagccggtttttgagcgtccatacaacagcggtacggtggggacaaactggaccctgatttccggtcgctggaaagcgacggagacagccagcctgccggtgacgctgagtaactatctgattagcggcagccgctacttcgatgatttttacgtcactgacgttaccgaccgggtggacatcgatgccaccgccggcgccgttaccggactgacgagccgggtcagcacagcggaaggggccatcacctcacaaagccagcagctgacgaacctgcagaacagcctgaacacgaccaacagcaatgtgtcgaagaaggccgatgcaacggcactgacttcggtcgataaccgggtgacagaggcggaagggaaactgaccacacagagccagcagctgacaaatctggcgaatgtgctgacggccacccgcaacgccggcgacaacctgatcccgaactttgattttctgcagggcagcacggcctgggatattcagtatccagccggtgtgacctttggcgatttcggggacgggaaagcgggggtccggctgaaccggacgaccactaccagcccaggcattttctccaacaacaacaagccggtgccgctgaatggccagcgcaagtatcgggtggtggtgaaggccaaaggtgtttccggcgcgatgagtctgctgatccgtcgccagaacaaaatcggccagacggacagtacgtatgaggataaaacagtcacgctgaccactgactggcaaaccatcacctgggaaaccggattgacggctgccggcgcggacgggcagaacttcaaactttattctcatccgacaaacggtgaaatctggctcgattccgtccgggtgtttgatatcaccgatgaaaccaacatcaaggcgaccagcaatgctgtttcgtctcttaccgggacggtgacgaaccaggggaacaccctgacatcacaggggcaatccatcacggcgctgaataacgcgctggaaggggtcaaaggcgatgtggcgaagaaggctgatgcgtcggcggtcagttcactgaccaaccgggttacccagactgaaaaggatatccgtagccaggccgacagcctgaccagcctgaatacatcgctgaaacagcaggcgacacggggagccaacgtactgccggacggcagttttgaatcctatgccgtcggcgatgttctcagtaatgcccgcgccgttattaccagtgaagctgcgcacagcgggaccaaaagcctgcgtgttacgcgcagtacggagtacaacccgaacgcgacggataataacgatacccatatcttttcgggcatgcaggttcgcgataacgcggtctattacgtggaggcgtgggttaagttgccggctggctcgaccgccgatccgactgtttatatggtgctcggattttccttccaggattctgccaatggctggtcgtggcctggcctgaatgtgaaagtctctgagttgtcggtggacaactggacaaaagtcagtggctatctgaccaacaaccgaaccgcgctgaaacaggcaatggtgaggatctccatcccgaatacaccaaaagttcgcctgggtgacgccttcctgattgatgatctgatcatcactgacgtgaccgatgcgaaagcggcgctcgatgccgccgatgcgaatgcgcaggcgctttccagtctgtccgcgtcagtcacgcagaacgggaagaatattacgtctcagggcagcgcgatcacgaaactgcagtcggatgtgacgcaacttggtaaggatatcagcggcaaggccgatgccagcgcgctgacgaatctgacgacccgcgtgacggctaccgaaggcagcctgaaatcgcagggagacagcctgatcagcctgcagaacagcctgaacacgaccaacagcaatgtggcgaagaaggctgatgcaacggcgctgcagagtctgcagaacaccgttgaacagcatggcagggatctgagcacgcaaagcagcgcgctgacgaacctggaaaacaacttttcctccctggccgtgggcgggaccaatcttatccgcaatgcggacactctggagggatggagcagccgccacgccacagaaagctatctgggcgaccgcgtggcctacacccggctggcgaaaggtgcatccggctatacccagctggatgaacagacgctggacgttaccgggcgtacggaatttgtattcagtttctatgcgaaaggggcttatgacgggcaggagatggcgagttatttctataacccgtcgaacaccaccaccacggaaaccagccagggcgttaaaggcggggccggtgacggcaaggcggtcacgaaactgaccaccgcatgggcgcgttactgggtgaaatgggttattcctgccaccagtggcaccaaacggctgattgccgcgcgtctggaaagcgcgacgtctgccgacaaagaagtctggctctgccgccctcagctggaaaccgggaccgtgatgaccgactggtcaccgagtccggatgatgcggccagcggtattaccgcgaacacatcggccattaacagcctcaccagtcgggtgacgaatgcggaggggcaactgaccgcgcagtctcagagcatcacgaatctgcagaacagcctgaacaccaccaacaacaacgtggcacaaaaggccagcgcgcagtcggtgagtgatctcaccagccgggtcaccagtgcggaaggcaaaatcacctcccaggggcaggctatcacgaagctgcagggcgatttgagcagcaccaccgataaggtcaacaccaaagcggatcagacggcgcttaacgcgctgactggccgggtggagaaaaccgaggcaggcctcacggcagccaacagcaacatcgtcagcctgacggcggcggtgaacgccgggaatgctgccagggatgattacattccaaacccgtcatttgatccggagtatgaccgcatgggttatgacgtggtggagaccaccgccgatggtgtgccggatgactgcccgttcaggtatgccgtccggctggccgggcgagaccatgtgccaaaaatcaacaatatcgccgtgacaccgggcgacgttttcgaaatgtctgctctggtagcgtgtggtaccggcagcgctgactttaacttctatatcggtcgggccactaccgccaccggtggcatcggagcgaaagcgtccgggggcaacactaagaccacctccgcgtggaaacgagccacctggcgctttacggtgccatccgataccagcttgctgcggccgttcctgcaggttaatcagagcagcccgttcggcaccgtctggtacgctgccgactggcatatgcgtaacgtgacggcggcgaacagtgcgcagaaaaccgcagatgcgactgcaaaagcggtggattcactgaccaccacggttagccagcagggcgatacgctcagcagcatcggcacgcgtaccacctcgctggagaacagcctccggtcgacaaacgatacggtgagtaaaaaggctgacacgacaacggtgacgcagctgcagggcacggtgacgcagcaggggaatgacatcgcggcagctaacagcgcgctgacaaaactcagcagcgatctggccacgacgaatgcgaacgtgaacaaaaaagcggacgcaagcgcgatgaacaccctgcagaaccaggtcacggagcagggcaaaacactcagtgcgcagggggattctctgacgcaactgagtaacagcctgagccagacggcagcagatattgacgccagcgggaaaatgccgggcaacctcattgtcaacggcagttttgagcgcggcgcggcgggctttaccggctggagcagtaccgcgacggtggccgatttacaggttccgcactcgggtaacaaggcgctgaaaatgtccgccggccagtcgaacctggtcggacaggaaatcagtatcacccagggccgtacctaccgcatgggggtatgggcgaagcaggactcggggaccacgattaaagatgcgggtaacacgaagtttcgtgtggctgacagcactggcctgctggtcggctcaaactacggaccgtttagttctggctggcaactggtaacgtttgactggaaagccacgaagaccacgacggccagtttccagctgacgaccgccctcagcgcgggggcaatgtatttcgatgatttccatgtcctcgatgttacggatgaaaaggatatcgcggctaatgccggggccatctctcagatgaatacccgcgtcaccgctgcggaaggggctatcaccacccaggcgcagcaactgacgaaactcagcggcgatctggccgtcacgaatgcggcggtcagtcagaaagcagaacaaagcgctgtcaccgggttgaccacccggatgacgtctgccgagggtaaactggattcgcagtcgcagcagctcaccagtctgcagaacagcctgaccacgatgaatactgagctgggtaaaaaggctgacacgtccgcggtgagttcactgaccggtcgcgtcagccaggtggaaaacaccatcaccagccagtcgcagagcatcacgtcgctgaccagcaccatcaataccatccgcactcagggagctaatccgtgggttgacggtacgtttgaaagctacagcgatggccaggtgctgggcgggaacggcaccgccgttgtggtggcgtctcagaaattcaccggcgataagagcctgaagttgagacgggatgagaacaacggcggcaacagcgataaacagcttggcacctggcagtcagtccgtgaggacgcgaagttccggtttgagttctgggccatgatgccggcggatcaggcgccctcctccgggtggacaacgctggtcggtatccagtcacagaatgctgccgggcaaaatgcctggcaggcggcggtcactgtcagcgaagcctctctgggcgcgcgcgataagtgggtgaaattcacggggatcgccagtaacaacggggcaggcagaacacgcgcggtggtctggatctccacccgtggcgccaccggcaacggtacccctggctattcactgtatatcgacgatctggtcatcacggatgttaccgatgcgaaagcggcacaggatgcctcagacgcgacggtgagtgccgtgagcggcctgacggcgcgcgtaacggatgccgaagggaaaatcactgcccaggcgcagcagcagacggcactggccacgaaagtggataacgccaactcccgcgtcgataacatggcgaagacgctgagcgacagccagagcacacaggccagcctgaatacctcgcttcagtcgcagattgacgcccaggcggctgccaacatcaaaaaccagacgacgctggacaatacggttaaatcggtggccagtatcaccagtacccagcagacgcatgcaacggcactggaggcgctggcaacgcagcaaacgaccctgacatccagtgtcggggatctcagcgcttccgttcaaaacaccgctaaaaccgtggcggatgtgaatggtacggtgagttcgctgtggtcgatgaaggttgagacggttaacgggaagaatgttggcgcggggattacgctgggcagcaatggtgaaacgagcgacatgatcctctacgccgaccgcttctcgctgtttaaccgtaacaatgcgacggcagtgccggtgatgattgccgaaggcaatgaactgtatatcgatacggcacgtatcaaaaacagttccctgacctcaaccaaaatcgcggacggttccatcacgaacgcgaagatcggcaacgtcatccagtcaaacgactatgtcgacgggtcacgcggctggagcatcaacaaggatggtggggcgcagttcaacaatgggatcttccgtggtcacattgaggcggcaagcggcaagttcaaaggcaccctggaagctcagtcatttatcggtgatatcgcagtagctcgccgctacgatgatatggctttccgccgcaaccagactgttcagcgtaacggggcataccagaaccgtggatatgggatgacgattgttctgtcgtgcacactggtttaccacctcactggcgcgggcaatgtccagcagtcgtattctgttgatatcacgttcaacattggcgggcaggaagtaacgcgtcgcttctttgccaacgccggcggtttccaggctggcgacttcactcaggaattccgcttcgctgctgatctgctggctgataacaacaatgtcagcttctttatcaaggcgcgcggcaacgatgcttcgattgactatagctgctcgatccagaacatcaccgccacggcgttccgtacaaacagcaattcattcagctaa

SEQ ID NO: 200141 - DNA, 321 bp, Klebsiella oxytoca
atgacgacgctttatcgatacgacgaaaacgggctatatctcggtgaaatagagcctgtaatcaatcctatgtttaatttccccgatgaacccatcgacaaaggttattatgatgcagatggcaatccgccgcctccgccaactgtcggggatgatgagagagcggtgtggataggctaccggtactcggttgagcctaaatatctcgtatttgcgaatacgactactgtgccccctggcgatgatccggacgggaaggtatttaatggcgaaatatgggggcatgcatctatcacccccgcaccagagagcacggaataa

SEQ ID NO: 200142 - DNA, 258 bp, Klebsiella oxytoca
atgtttacgatagagaaagaagttgcggtcaatcaggtaactgctgatggcattgcggttggcactgcgatgctcaaagtcaccctgacatacaccatcgagaggattgagcttgaaggggagagcggtatcgctttttacacggttacatctgacgcggatgctgagggtgcgaggaattacatcccattcacctattcaggaagtggcgatccgctgtctgaggccgaggcagcgctaaagttaagagttaaatga

SEQ ID NO: 200143 - DNA, 126 bp, Klebsiella oxytoca
atgattcgttgggttattgtcctggaaactgaaaagataacaatttcattattattcatgcattattctcgcagacagcagggtaggcaagccttagtatatgatgagcgcgaggagaatcaatga

SEQ ID NO: 200144 - DNA, 738 bp, Klebsiella oxytoca
atgactcagaccgctgtaattcccgactaccttaaacccgcaatggagcgtcttcagacggccagagaagcgcatctcaccagtgcccgacgcatggatgaaaccacgacggccatcagccaggtgcaaacgcaaaaaaatgaactggagcaggaaaacggcaatgattccggcgcatggcgcaccgcttttcgtgccggtggtgctgtcattaccgatgagctgaaacaacgccatataactcgcgtggcacggcgggagctggtacaggaatgtgacaacatggctgaggttctgtcttttgagctggacagccttaaaggagactgtgaccgcacggccagagcataccgtcaggcacatcacagcgtcctcagccagtacgcagagcatgagcttgatactgccctgcgtgacaccggtagcgcgctggtcagggcaatgaaactcagcatactggtgctgaataacccgcttgccaataccaccgggcatcagggctatgtcgaaccagagcaggccgtcatgcagcaggtgaaagcgtggcttgaacaggcggtgaagggctgcaatatccgtctgaccgatgaaccggtgctgtttaaaacagggctgtcggcctccacgctgccgcatatggaacatgacgttgcggccacgcccgttcagcggaaagtctggcatgaaaaaatgcgggaacgtgaagccgacctgaaagcacgggggttactgtcatga

SEQ ID NO: 200145 - DNA, 246 bp, Klebsiella oxytoca
atgatgcgctgcccttactgccgcacggcggcccacgttcgcaccagccgctatatgtctgacagcgtcaaggagagttacctgcagtgccagaatgtgcactgctcggcgacattcaaaacgcatgagtccatctttgaggtgatccgttccccggtcgtcgatgagaaacccgcgccggtgccgacagcccccgtggcaccccgccgggtaaaaggctgctacagctcgccgttccgccactaa

SEQ ID NO: 200146 - DNA, 567 bp, Klebsiella oxytoca
gtgaccaccctgaccttacagcaggcatttgaagcctgccagacgaacaaaaccgcgtggctgaaccgtaaaaccgaactggccgccgccgggcaggaatatcaggaattattgctggatgacagcgcattaggttcccacagattacagacgctgcgtgacctgattgacgtaaaaaaatgggaggttaatcaggccgccggtcgttacatcctctcgcatgaggaggtgcagcgcatcagcatccgtaaccggctgcatgattttatgcagcagaacggcgcggagctggccgccacactggcacctgagctgatgggaattaagaaccagcccgcgatgttaaaaagtcgcgcgctcgaccgttcggtggcatatctgcgcgaagctctttccgtctggctggccgcaggaaatgaaattaattattctgcacaggataacgacattttaacggccatcggatacaggcctgacgcgccttcgcgggatgataatcgtgaaaaattcacccctgcacagagcatgatttacgcccgtcggcgcgccgaaatggccgcacagtag

SEQ ID NO: 200147 - DNA, 1068 bp, Klebsiella oxytoca
atgaaaaaaataacggtagatgataaggataggttggaaaggcatgccgaaggtttagctaaacgcaagcttcggaaacgctcatacagaactgcgcctgtagaaagactgcgagttttttcacgtgtaagacggtttgcaccgcatactcttaatttattcgatagagaaagttatgatttattcattattttcttgacgcaaattcgagatgaaatagagcaagggaatagactcctccttgattttagaaatacatcctctttaaaagcatgtgctgttcttgttctttatgcacatatagatatgtttcaaagaattaccggtgataaaagtataatttcttttactccttgtgcaaatgtgagagctagtcgcatgtttgaagaatgcgggctttggaagttggttaatttccaaaataagcaagataaagagcatgataatctcccaatagtatcctccgtcgctggcgcgtcaaaagatccaaaagtcaatcaagagtcaagagcaacgattaaacaagtgcttaattttatcaaagataaaatttatggcggtaatattactccactggaagcacaaaatttatatgctgctgtaactgaatcaataagtaacgttggtctacatgcttattcaagtgaagaccaatatgaagagtttattagtttggcaggtaagcgttggtggatttttgctcgcctcattgaggagcagatgttcatacttgtttatgatatgggggaggggattcctttaactctcgttaagagagatgtgtttagtattatttttcaattatttaaaccagaaactgatgccgataaaataaaagcagctgttcaatatggtgaaacgcgaatgaagagtgataagcacggaaaagggcttcctgatatcaaaagatttgttatagacaaccctaaaggggagttgcatatttttagtggcatgggccgctattcttactattctaaaaataaacttgaagaaacattggattataagttttcagtgggtggaactctcattcagtggaatattttaattgaggcgaagtcatga

SEQ ID NO: 200148 - DNA, 330 bp, Klebsiella oxytoca
atgattatagaaaatatcaatattgcagaggaattttccgatttaccattcgggagaaatgaagatgatggcccagataatgggaagcgtttccgtgaggaaatattatacccaaaatttattaatgccgatattgtcaatgtatatatggatggtgcaatggggtatggttcttctttccttgatgaggcatttgctggtctttatcgaaatcatggcattgataaagaaacaataaggagaaaattaaagctacacagcagtttagattttattttaaaaagtgcttggcaatttgttgatgaagcaactctggagaatgggagatga

SEQ ID NO: 200149 - DNA, 501 bp, Klebsiella oxytoca
atgatagagtttctgaaagtgttgggagggtttataaaagctctagctgagacagggatacttgctatcatcgttgcggcagccggttggggatttgtatacaaaaactcaagggcattacaaaaaagaagtgaaacatgggctatagtgaaaaatatttcagatctacttaaggatattgaattatcctcaagaaaattctggttgcctcatgataataaatttatcaaccccatgacatatcaggttgagattaatggttatttgagcgagttagagagatggcttgattatctaggaacaagggttcctgatagtaatcaacattcagctgtgatgataaagatatttagagaggctacgtataatttagagaaagttaaggagactaaagaatctcaaagaatgaggactacaatgatagtctctaaatatactggagagattaaaagaatagtcgatcaaaaatatgaatcacattttttgcacgctaaaaaatga

SEQ ID NO: 200150 - DNA, 276 bp, Klebsiella oxytoca
atgagcaaagaaaacatcgtcaccctgttaaaccacattaaacgcggcgatcaggtcatcgaaaaaatcaccgtgttaaaaccggatgccggaaccctgcgcggtgtcagtctggcagcagtcgcaaacgccgaagtcgacgcaatgattaaggtgctgccgcgtatgactatgccgtcaatgacagagcaggaagttgcgaaactcgaatggcctgaccttgtcgcgctatccggcaaggtggtcggttttttgtcaccgaattcggaacggtag

SEQ ID NO: 200151 - DNA, 756 bp, Klebsiella oxytoca
atgagagagcgtggaatgatttttaacgctgagatggtgcgcgccattctcgatggccgaaagacgcagacacgacgcgtgatttctaatgtgggtaccgataactgcattcctcttcaaaaacaaactaaaaccaaagacggaatctatacacatgtcatagacgctccaatctatgagctgtgcccgttcggtgcaatcggagagcgcatctgggtgcgcgagacgtggggagtcgtcagccacgaacttgatgaggatggtcgaatccaaccatggacgccagaccgcccggctacagccattcacgaaatgccgtttggcaatgggtattactctggccacgccatttatgcagctgatggcgattttacctggggtgatgacgatggttatgaagatggccgttcgtgctggaaaccttccattcatatgccgagagcagccagccgtattctgctggaaatcaccgacgtgcgggtagaacggttaaacgctatcagcgaagaggatgctattgcggagggtatgcagggtgttatttgcccttgctgtaaaggcgatagcgaatactcaacatcgcaatatgacgccgaaacactagcggtggttgatgaaataccatgccgtgcgtgtgaatccaacagaagcaagttttttaccctatgggactcgatttatgggtatgggcagcactgtattggcgaatgggtttgggttatcgagttcaagcgcgttgaaggcggtgcagcatga

SEQ ID NO: 200152 - DNA, 426 bp, Klebsiella oxytoca
atgactatcacattacaggctgtagacgagctcatctcctccctggagagcgcaggcaagccatctctgaaggaagagaagtatctggctctggcgaaagcgtttaagcagctggctgcggagaatgtggcgctgaaacagttcccggaacagatagttaagtttatcagcaggcttgggacaagtgagattggcagcgacacgaaagagacaatcgggttggcggcaagccgcattaaaactcccgcctccgatcgcatcgtagccgggattaaggctgatggggtggaggagtttgctgaaagtcagaaggaatacgttcgccagcatcgcaacgaaatggaccagatgctgcgttccgcatacgcaggaagtgccgttgacgcagaaatattcgccaaacagctgcgcgagggggccaaatga

SEQ ID NO: 200153 - DNA, 252 bp, Klebsiella oxytoca
atgagcaacgttatttatgtcgttagaaaaaaaccagtaagcacaaattatattccgccagcgctgaaaggcattttacctctgattagccaatatgaggttattaaaagaaccgcaaaaggctatcgcttgaaagtgagttatgccggcgataaaggctctgcgtacctggatgagcattattcattttttgaaaactatgccgaggcgctggagtacatcgcgtcagaggccaatcgcgttgctggttag

SEQ ID NO: 200154 - DNA, 1350 bp, Klebsiella oxytoca
atgactgacaaattaactctcgccgtcaaccatgcgttgaacgatgcgcggatggcgcgcgcccgtatggggctgatggcgccgacgatggggctggacaataagcgccattcagcatggtgcgagtatggcttccctgaacaggtcacctacgaaaacctctacgccctgtaccgtcgcggtggtatcgctcacggtgctgttgagaaactggttggcaagtgttggcagacaaacccggaaatcatcgagggtgatgatgccgatgagagcgaagacgaaaccgcctgggagcgcaagtcaaagttggtattcaccaatcggttctggcgctcatacgcagaggcagatcgccgtcgccttgtaggtcgatacgcaggcatcctccttcatgtccgcgacgaaaaggactggaaccttccggtaaccaaaggccgaggacttcagaaaatatccgtggtgtgggccggatcgctcacggtgagcgagtgggataccggcctgaactcgaagacatacggccagccgaaaatgtggcagtacgccgaacggttaccgaatggttcaagccgccgcgtcaatatccaccccgatcgcgttttcatcctgggcgattactcagacgatgcaattgggttccttgagccagcatataacgcctttgtgagcctggagaaagtagagggaggatcgggtgagtcattcctgaagaacgctgcgcggcaactcaacgtcaatttcgaaaaggaaatcgacttcaacaatcttgcctcgctttacggtgtcactgtcactgaattgcaggacaagttcaacgaagttgcgggtgagattaaccgtggtaatgatgtgctgatgacgacacagggcgcatcagttacccctctggtgacttcggtagcagacccgacggcaacatacaacgtaaaccttcagaccgcagctgccggggtggatatccctacgcgcatcttagtgggcaaccagcaagccgagcgttccagcactgaagaccagaaatatttcaattctcgctgtcagtcgcgccgcgtagacctcgctttcgaaatagaggacttctgcgacaagcttatcgacctgcgcatcatagacccgatcagcgtgaaaaccgttatctgggatgatctgaacgagcagaccggtaccgagaagctcaccaacgctaagactatgggcgagattaaccagtccatgatgggcagcggcgaagaacctgcattcagtcgagaagaaattcgcacagctgccggttatgaaaacaccgatgaattcccgttaggagaagaggatggcaacgaagaagacgaagccaccgattctaccgcgtaa

SEQ ID NO: 200155 - DNA, 1077 bp, Klebsiella oxytoca
atgtacttttctaaagagacactggcgactaatgctcgccttggcgctcactggaatgagttgtgggctaaccgcaacatgtggaacgcgcaacatgacgctatgattgctgtcaaccgcgcgcacatgacgccagaaatgttggcatgtaacgctgttggaggtttcgctcgtgaattctgggctgaaattgataatcagatcctgcaactgcgagatcaggaagatggtatggaaatcatcaatgacctgatgggcgtccagaccgtactttcagttggcaagacggcgaagttatataacgtagtaggcgatattgctgatgatgtttctgtgagcatcgacggtcaggctccgttttccttcgatcacactgactacgctagtgatggcgaccctattccggtgtttaccgccggctatggggttaactggcgtcacgcagcaggtcttaattcggttggtgtagatctggtgctcgactcgcaaatggcgaaactcaaaaaagtaaacaagcgccgtgttgcttattacctttcaggtgatgccaatattcaggtgcagggttatcctgcccagggtatgaaaaaccaccgcaacaccaagaaaattaaccttggctctggcgcaggtggcgtaaacatcgatctgactaccgccactactgagcagatcattgagttcttcggaaagggcgctttcggaacaacggcacgtgccaacaaggtttcttcctatgacgtaatgtgggtatctgatgagatctgggctaacctggcaaaaccgtacgtagtgaacggtgtgattagtggcaatgttctgcaggcggttctgccgttcgcgccagttaaagaaatccgcccaacgttcgctctgtccggtaatgagttcattgcttacgtccgccgtcgcgatgtgatttctccgcttgttggtatggctcagggcgttattgcactacctcgcccgctgccaaacgttaactacaacttccagatcatgtctgctgaaggtctgcaaatcactgcagacgatcagggcctgtctggcgttgtctacggcgcgaacctggcgtaa

SEQ ID NO: 200156 - DNA, 294 bp, Klebsiella oxytoca
atggctaaatacgaagtggtgcgcccgtggaatggcgtagcgctggggcaggttgttgaacttgaaaatcttcatccggccctgaagtcaaacgttcgtctcatgcgcggcgaagcaggtggggaactctctccggcaacaccagaagcaggcactgatacaaaatctcgaaaagagattattcaggcccgcctgacggaattaggcatcgagtttaaaggaaacctgggggctgaaaagcttggtgagctgttgccggatggcgaacttgaaaagcttttccctgctgaataa

SEQ ID NO: 200157 - DNA, 522 bp, Klebsiella oxytoca
atgagaaggctaatttttagtattgcactggcgatagcagttgcaggctgctcaaatacttctggtttgagccctgtatctggtgttgacagatacagcaattcaaaaactgtttatattcagccgcacggtaccgactgccattcgatgcaatgcatcatgctcggagcgttctggacggaagcggataaagacaaggcattactgaccatttcgctggcaaactccaccgactttatcagctcagcttggcttgaagttgatggtaaaagatatgaattgcgcaatgaaggtgacctgactcgttacagtactatggttggcggttcagcagtttatgtgaagtccagcaaagatttcattgtgccactgagtgttataaaggacataacaaaagccaaaaaagcgtgggtctttgtaaaaacgggcacaggctccatgtctaacgcgattatagatgcacagggcgatagtaaggcttattacgcactgcaaagatttgtttcttctttgccaaattag

SEQ ID NO: 200158 - DNA, 624 bp, Klebsiella oxytoca
atgtcttctttcatttgcttttctacggatgaattcgcggttgtagcgacggatactcttggtgtggatgccgaagggaatccctttatccttaccaataaagcgacatatctaccaactataaaaacgattatatgcggcacaggaatgggtggatttcattcccgctgggcggaatttgtaaacagccgcatgattttattagacgtggataatcttgattaccatgctccatccacactaaaggatatgtgggaggagtataagaaggaatacaacgtaggtgatgagtgcacggtcaccatctatcatgttggaatatctcagtcatcgggaagaataaagagatttgcctaccgatcttcagaatgcttcaggtcagaggaaataactcatggttggttttacaaaccagagtgctcagtccctgacggggaagacatcttgggaattatcaaggcaatgatgtttgaacaaagggcaatacaggatgcaatgccaagtgctgaaagagtttatattggcgggcaagttaacgtcataatccttgagaaagatagcgttaggctcatgactatagccgacttccctgacttttcatcggtgatcaacaagttgttttaa

SEQ ID NO: 200159 - DNA, 135 bp, Klebsiella oxytoca
atgttttttaacaacataaaaatgtgcgcccgtaacgttctgctggccgcagaaacaaaccgaagcagtaaggccggaaaatattatttccgccggaaaacagaaacgacccagatgaaagaaaatgagatttaa

SEQ ID NO: 200160 - DNA, 597 bp, Klebsiella oxytoca
atgaataactcgctgatggcgaccgggtcgtcggtgctggaacaaagagccgccgaagcgtgtgctgtcatcagtgatttatccgtaccgctgcgtgatttgtggaacccggacgcctgcccggtgaaatttctgccctatctggcatgggcgttctcggtagacagttgggatgaagactggagcgaagaggaaaaacgcagcgtcatcggtgaggcgttctggctccatcagcgcaaaggcacggttgccgccatcaggcgggtaattgagcgaatgggttattcattttctattgaagagtggtggaacgtcgctgaccctgccgggacattccgtcttgaagtggatgtgaatgatatcggtattacatcccggatgctggaagagctgacccggctgattaacgatgccaggcccgtcagtcgtcatatggctcagttcagcattgcggccaggactcaggggaaagtgtatgtcggggcatcatcaggcagtggcgagataatcagtatttatccgccggattatgagccggaagaaaatattttgtataacggcgtgatttttcacgacggcatttttagttacaggtga

SEQ ID NO: 200161 - DNA, 726 bp, Klebsiella oxytoca
atgagaaaggttttgctgtcttcggctggcgtgattgtagctgtatgcgccttgtattacttcaacttcggagtaaacggccatttatccagcaagactgatgtttgggcgcagtttggtgattatttgggtggtgttgtcaaccctatactttcatttattacaatttacctccttataaattcaataaaacttcaaagggaggctaattccagcctgattgatgaagtaaaaaggcaagaatctttagaggagtataaaaaatttgaagtgagattttttcatttggttgaatgtcaggattctaactttgaaaggttttgcgttcaagttggtgatgttgatgggcaaactgacggggtggtcgaagaatttacaagtggtgcagctgtaacttaccttgaagataatattgttattttagttaaggctaaggttaaaaaagaggtaataacaaagtggttaagtgaagtggatgctaatgattgcattttttcagtggtgcgtcgcttttatttgattgtgaagttgatagatgattgcggggttgaacgcgaagattactatgaaacattagttaacttaactgacataaagataatatctctggttgcaatagcttgtacatactacgagtgggatataataaaatatatccataacagtaaaatacttgagcgtgatggagttaaagagtttgtttcgcaaatatccactcacgattga

SEQ ID NO: 200162 - DNA, 819 bp, Klebsiella oxytoca
atgaaagttagctatgacgttgtcatcaaaagtggtgatcaagaagttgatatggagtatggccttgataccctctctggaacggctgaggtgacatgcatactagcagaggcaatactcagaaaaaaaatcattaagcgccgcactcatgttaaccctgcgcgagcggttctcaaacaaagctttaaaagttcttatggacaaaacttcgacttgattgttaatgagccggagttagctgccgaattaaaaaaaatgacccgttctgtgttctcggaagtcatggggtattttatttctgagtctctatatctggaaactaaggagctgtctccaaaagctgcagggattattgaggagcttggggaaattgaagatgaacttattgatcgtatcagacaacctttggtaagaatgcataggataaatcttcaaaaaaactttgatgttgaacttaactataaaaaacctgctggcgagcaaagaatagcaaagttagatacaatgactgctacgaacttgacacagtcaaaaataaagcccggtcaagttaatattaacgcagttattactcgttttaatgcaagaaccggaaatggtaggttagttatcgaaggtgaagatgatacagtagcctttggcttttatatgcctttaaagtctatacccgccgctcaaaagagattggtctcattaaatttacacaataataatggcaggcaagataacttcacatatctaaaacttactgttagcaaggttgtagtaaaaagtggtgatgtggtgaagtatcttatccgtatggttgaaactgtatga

SEQ ID NO: 200163 - DNA, 1452 bp, Klebsiella oxytoca
atgtcatttgatgaccaaactattgatagccgtattacaggaatttggagctacataagtaacaaaaacatacaatcatctatcactcttgatgaattaagaaatctcgccgaaaatagaaacataacagtttatgatataaaagaggtcacttttggctatgatatacaatcaaaaggtattttaattaaaaccagcgtcggaagtgctatttatccaagactaagatcaacagagatacctttagctcaaggacgtatagcaccaacattaaattatgagaaatactggaagcatgtagattggtttttccctccatatatttcaaagggtgcattgaataactcgatgaaaatgtgcggggtaacccctagaaattttacctccattgataatgtaacagcccaaaataattttgaaaatgagttatcttctctatacactttatcactcatcattccagttaccattcaaattctatcaaaatccacagcaatttccaaacatctcccaattattaaggaagcaatattagctttttacagtggtgttaaaatagcagccatatcttcactaattccaataattgaagatattcttagaacaattgttggtgaagaagggagtgagctagacactataagcaaaattaacagttgttttaaagtggcttacttaaatgttttaaaattagacatccacaatgcagactggatccctagcgaattttgcgactttgaatatttaaaagccaacaatgaaagaatattcatgcttgaaacacttcgaacttggttacttgaaagtttttacgccaacacatgcaactataataaacaatcgggattcaatcggcatcattttgcccatgcactttctgacatctggcaaaatgaaagcaatttcttcagagctatgggtctaatacaagcattagcatttgtagaagttttctcattacccgaaagcaaagtgagtattttagtcccagaatacaatgaagactccacgtcctttcacgcagaagtattagcttgtttggaagctcaacaaataaaaaaaatagcgctaaatcgttttcagttaactaatgagctaccttttattacaacagcctctgatgatggttggtccgtccgagctattgtattaagtgaaaagatgaataatgaaattattcctaaattaagggataaaggatggcattgtcacgaaattggagaccctgagaaagatggagaatttataaccgtagaagcaaagaaaaatgggaaaaatataaaaatagctctagtttacagctttgccatttcttcagacgtctacgctagatttaatgactcatgtgattatgtactctgtcaaggaagctcttacagggttaaggagttcacgtctcaactaaaatgccaagccttgccgttaaacgcttggattgctccagaatcttga

SEQ ID NO: 200164 - DNA, 2568 bp, Klebsiella oxytoca
atgcgcgggttccaacagagagcaatccaactagcgaatcaaagtctgtcacagtctggtaaagccttgttgctcatggccccaggctcaggaaaatcactcgtcgccagcgaactcgctcagttgtttatgcaaactggcccagttttaattgttgttgacctcagggttattgccgctcaattacaatatcaattcgacatgcttaacattgaatccaggatgctagactccaaaaaacctgttgaaatagattcagccgaccgtattattatcataatcgcatccaatctcaatagtattcaaaccctacaactgaatttgaatttggttattatattagatggttactctaccaaaaagacattgctaaaagaactcaccactccatcttttaatgcggtaaaaaaatgtctcatcagtagtgttgcctatccagaggccctacagattgcaggtgaaatcattttttcatattctatgcctgatgcatttacagacgggatactaaacaaaactgaaataatagctattaacgggtttgacccaagcctgctcaatgaacaagagatgcaaaataatattgcacgctggattattaaaaatatttataacaaaagtacttcaaaagtagtaataatatgcaagaatcattctatcgcagttagcttaacaatggcacttaattgtagcgcagaagaagaagtagcagtaacaattagctcacatgatgcgatggtcactgagcaaataaataaatttcgacgttcagacaagttaggcattgcagtaaccattaatatgtatcattttctcagcaatataaaaatcagtgatgttgtattgttgcgaaaatttccatccgaagatgcattcagtaaagcactccttaactgcacgcccccaaaggctactgaccctaaaatatgggatttttcagataatagaaaatatttttttgaagaaatgggcgtatttcgtaccgaaactctgaatctacgtacttcagatagcaaaaacaggcgaaagcttatcaatccacttgatgaccgccccgcaacaatagatatgcttgggcgtattgagattgttgacctgattgaaaacatactgaccaagggtgggagaggaaatcttaatttagcactactcggcaactggggaataggaaaaagctctgttctgacaatgctacaaaaaaacaccctcgaaaaaaaagagctaaaattcatcaattataatgcctggcatgaagaacatagcaatgccgttctggcgtccattgctaatcagatcattgatgagttatacgaatcaaaaaacatattccagcaactgttattgaatttaaagtcaagattattatcagcaaaagataatttaaaaatagaagttctcgttctactccctgtgtcattaattgcagcttatttgaccgtaaacaatttgaaacttactacggcatcaaccttaatgaccacagcactatttggcactactctcacctttattatttctttaattaagacctatttcgaaaatcccattgcaaagaaaattcgggatattgtcaaacgaaaaaaattcagtgattatattggattgggacagacaattcggcatcatctttcttatttgtttattagcgatgccacatcattcacccggtgcctttcatcaagattttcagaaccggaggttaagaccaaatatattataactattgatgatcttgatcgctgttccgatgataaaattattgatacagtcagtgctctacaactgctttctacaattcaaaatgttaatatcatcctcgcaattgactacaattctattgcaaaagcattcactctgaaatggaaagagcaggataatacactgacagacgagcaagctactattaaaagcagaacatatcttggcaaaatatttcaagcatctgttgccattgacaccccatcaagagataacataaataacttcatccataaaagtctgtataagggtgtgcaaaaaccagtaacaatcagtgcgacagatgaaaaagagcaagaaattaagttcaatgacatcactgatgttattgttgaagatatcatcacaaccagcccagatgagttgaagttttttgaggagaatgaggaaaaagagttcgagccagatgaatatttagaagaaaatcatgatgaatatgaaatattcgttgaatgcgcacaggtctttcgcattggaaaccctaggacactcatccgactacataacacaataacgttcattaaaggattaaatccaggtattatgcaaaataatgctgaaatagcgatgcatatatttctctctttttggtatgaaacctggtgtggtcaaagcgaaagcaataaagctacaatggaaacagcattgcacactcgcacgcaaggcagtcaggataagtatattgttctggcaaaaaagttagagatccataaattctccagcgctgagctacagctgatgctaaagaatgtcatcagggtatccctaccattctgtaaaataccaaccccttttcctattgagcagtag

SEQ ID NO: 200165 - DNA, 444 bp, Klebsiella oxytoca
atggaaattaaaacttcagattttgaaatttctacaaaagatgttcgcaaagtattagttctccctaatattggcttaggtagcgaaaatatttttagcacagattctattagttttattaaatatctaaaaaaagaaattgatttggagttttatcatcaaccagaaggattttgggaacagcgaagtattgattggctaggacctacactctttcttacagggaaattattatatgataatcctgatttattgaacattttatttgagatgttatcttcttatgtaagagaaaaacttcctaatcgagatagtagtaaaataaaaattaatgtgatttgtaaaaaagatgaaaataccaaaagcatggagataaattatgaaggtgatataaacggacttgatgagataaaaaatgctattgagttggcatttaaggattaa

SEQ ID NO: 200166 - DNA, 753 bp, Klebsiella oxytoca
atgaatataaataaaataatcacatacaaaaatatacagcaagaaaatacagagtttgttgatgctgcaattaaagatctttttataacagcatcaagagatgtaattgctctttgggtaaaaagaatagatgaaaggatagtgaaaaataggggcttaaaattttggtttatgagaaataatgatgaatatgcgtcaggaaccttcctttatagccattgcactctttcagcagtaaaatcaatatacttactattcgatttcataaagtcggatgaaggacaaaaagcttggatgtctttgattgatgcttatgattatattgatgttgcaaaaatattcttaaataaatataaaatacaaagcgaaggacttgacgcctttactcatcggatagaatctttagaaaaagtgattttccctacccatcatttgtttttaagcccaggagccaaagaaactctggggaattgtaatatttgtggtagtgattactttgagtgtgagcatattgaacgggaaatatataatggtatgctttgcttgcgaattaatagaaagatattagaggccaatcatatagctttagtagaaaacccaagggataggcggtgcattattttaacgattcaaaatactgatggaactaaacttgaaatattcagccgtaaaagaaagattggtgaaaagaacgctgatgaaatgactttgaatgcaattatacataattttagacagccagtgtttaattga

SEQ ID NO: 200167 - DNA, 279 bp, Klebsiella oxytoca
atgaacacggtgcttattcctcccggtccgggcggctacggcaaggggctgtggctgcccgttggcagtggcaaaaaggtgctgtctctgaccgggcgcgaaatccatccggttgcgatagaaatcggcgcactcaccgaatcggaaatcgtcaacggcttctctgacattccgccggataacgacatcctgtgcgtggtgattaactgcgccgggtccctgcgctgcggcctgtacccgcagaagggcatcccgaccatcaacgtgctgcccacctag

SEQ ID NO: 200168 - DNA, 309 bp, Klebsiella oxytoca
atgcaccatagtccattatttctgttactgactattcccatatggtcactggcttatacctccccggaatccacccagctcgccctcgcgctaaaacaactcgacggcgtaaaaacttcactagctcgcgcccggaacagcgccagcaccgatccaccgtcacactactacttcgactacttacaggcgcagcaggatatcaccgccgttgaacagggcatccgtctctatcttgccccggcaagagcgcagccgcgtgccgtccagcccctgagcgccagctaccaacgggagaactccgatgactga

SEQ ID NO: 200169 - DNA, 1086 bp, Klebsiella oxytoca
atgcacatcatcaacggagatactattaacgatctaatgatgaaggttatagaaaaagtgctctttgagggtgtcagcataccgactaggaatgggaatgctgtaacaatctatgatgttagtatgatcctgcgtaacccaagatcaaggcatttgagtttagtcggtcgaaaaaataacatattctcgactttcgccgaggcaatgtgggtttttgcaggtgataatcggattcatccatatttaactttttttctgccaagagctcctaaatattcagatgatggaatcatttggcgagctgcttatggagaaaggctctacgctcacgggcaactagagaacgttgtacaacaattcaaaaatgacgggatttttactaggcgagccgttatcagtttatacatgcctgacagagacaccaatgatagtcttagaaaaatatacaacttagaaaatagcgttgacataccctgtaataatttaattcatttctttattactccggataaaaaactaaacattaaaataattcaaagaagtggggatttgatattcggtgtaagcaatattaatatttttgaatttagtttactccaggatattgttctatctatattgcagcgagaagttgatagtcaaatcaaactggggtatttacatcattcaataacaaatctgcatatttatgaagataggatagagcaagctagagatatttttaactttaaggaaagacaaataacagatttagtcaataatgatgaaatttcattcccatcatcattatctggtataaaaatgctattctgtgaaatagtctcatttcttgattcaaagataacagactcacctcataagattaaaactttaactcaggaagttgctaagctaaaaaacatattcgataaatacgctgtaaaaatagaaaataatctattatggggatatgcagaagctgttttatcatatatatatcaagttagatttgaacagtcaatagcattgggcgcgaagttaagttatgatttcagcttaagcgtaaattcaaactactttaataggtccagcaagggaaatctatga

SEQ ID NO: 200170 - DNA, 195 bp, Klebsiella oxytoca
atgaaacgaattaacttcctgaatttaagggcaggacagcaggtaataatcagaacccaaaaaggcgaaacgcttaggggcgttctggttgataaaagcgactggtctgtaggatgcccagtggttgaggcaagcggaattcgttatggaattggctatgaggctgacattgtcggtttgccgaaacataaataa

SEQ ID NO: 200171 - DNA, 141 bp, Klebsiella oxytoca
atgagcgtgttgagctgggcaataggtctgtgcaggaagacggaagcatggctggttaagcgccaggcaaaagatcagctacagcgtgcagagctagggctgagtctgacggaaggagagttagatgaccgctatgactga

SEQ ID NO: 200172 - DNA, 609 bp, Klebsiella oxytoca
atgaaagttacatggaccgtcacgcccgtggggtatcagcgcattgcgaaacgctgcccttcatgcaacattaaacgggacttcacgccatcaggtgcatttcggattaattcgcaaaagaaggtgctgggcgtgtggagtatctataaatgcacactctgtgattacacctggaatatctccctgttttcgcgcctgcacgtcagcaaaattgaccgcggacttcatcaccagttgatgagcaacgatgctgccatggttcaacatttttcctgtgatatcgcgatgctgaagcggaacaacgcagagctatcgggtcggcctgattttaccgttcatgagcgctggccggtaagcgtcaccatccaccagcgggtccgcgttagtgtcaggatttcccgttcatttcaggtcagcctgctatcgattttgcagaagcaactcatgctgagcacaggcgaaatcaagagacaagttgagtcagggaaaataagtggtatcacgatgaaaatgcttaaatcgcggaagctgaaggctgcggaatatcactttcagctatctgtggaaacgatgttcgccaggcgcaagattgttctgacacatcgttaa

SEQ ID NO: 200173 - DNA, 1911 bp, Klebsiella oxytoca
atgtttctaagcaaattaaaaattaaaggttttagatgttttgatagagaatttagtatttcattaaatgaaggtcttagcgttattgtcggagaaaatggagctgggaagtcagctattataaattcaataaggcaattgtttatagattcagaatccgaacgatataacattactgaaaatgattttcacagaccattttgtaatcctccaaaagttagtgattcatttacaattaacgcagaattttcaaatttaggtacaatagagaaaattgccttactaccctggacagggaactcagatgtagctaaattaaatttatacgttgagaataaggaaataagaggaaggtataaaaaaacactttggggtggtgattcgcaaaattctcaatttgattatgaattattagatataatttattgcatatatctccctccattaagagatgccgaatcaaaactaaccaatggaaggcagtctaggttatcgaaactattaaaagctataaataggaaagatttaagatcacttaaaaaaaatggtggtgtacaccctcttgtaaataaagtaaacactttcaatgatgaattatcaaatagcgatttatacggtattaaagcagctaatcagttaataaaaaaccatctacagaatgctataggacttaattttggtcaaaatacagcaattcaatttgcagaaagtgactttactaggattgttgaaagtttacggctaatattcttccctaatctgaatgaggaagacaccaaactttttaggaatttagagcaaaacagcttaggttataataaccttctttatattgcttctatattagctgaactaactctcggttacgaacaagatccatccacttgcagattattattaatagaagaaccagaagctcatttacacccacaacttcaaataagactacttgatcatttaaaaaaagtatccgaagacaaagataataatgtacaagtcattgtcacaactcattcaacaacgcttgcatcctcagtcagtgttgattcaatcattcacttatccaaatcgtcttctccagttgcaacacgtttaaaagactgtgggttagcaacaaaaagtaaagagttcattgatagatggatggatgtaactaaatccaacttgcttttcgcaagtggggtaattcttgttgaaggtatagccgaacaaatgctattgccagttttagctaaagagatactagctgatagagacgtagggaagaatacattatcagacttaggtgtttctgttataaatcttaatggaatctatttcagacacttcatgggattatattgcaacttcacaatcccaagcgaaaagacaaaacatgaagggttaagtatacctattcgctgtgcgggattaacagatcttgaccctcccaaaaagataaaaaaattagtagaaggaaaagagtttattgaaaaaataataatccctcatgatgctgaaatgtatgaaggaacaaatcatgctatcaagctcgtagaagagataaacagttctagatacgcaaggttgtatgtaagtaaatacaaaactcttgaatacgacctggctatggaagggaataatattgcagctatgtcatctgtgctttatgaaatttggccaacagatggggatataaagaagaaaataaaagcaattatggatgtaaaagatgattggtcgaaaaaaaaatcttacgatcgagccataattgcaaatgaattattacaatacatcgaaaacagtgagttaggaaaaggatattttgcacaaagtatatcggagaaaatatcaaagaatgaagttaaatttgaaacgccagaatatattaaaaatgctattctctgggtatgcccagatgagacggtgtga

SEQ ID NO: 200174 - DNA, 1521 bp, Klebsiella oxytoca
atgaaggattttaattctcagcagatcgattatatcgaatcctcaattaactctagtatttaccttgaggcttgcccgggtagtggtaaaactgaagtaattgcagcaaaaatcgtaaaggaaataaataactggacactcagtccgggtggtatagctttattatccttttctaatagcgcgacagatgagcttttatcgagagtgcaacagcactccattaatatagcaaatagattccctcacttcataggaacttttgatagttttatatttaagttcttaattaatcctaacgctaaaagtttgactcattttgatgcagaaaataacaataatactgtaagaatcatagaagcaacatcacctttattcattcagacaaaatatgcatacaacaagcgaggaaagataaaagctcatcattatacatttgatcggaaaaataattgcatattgttcaattcagatgaccccgagcttgatagaatcagaaactccatcaaatgggaacaatggcagctagacgatctagtaaaaacaaaacataagctgttcgaatcagggtttatgacgcacgatgattcattatatctagctgctgaaattttcattgatgaaaaatataaagactatgcttcgttactttcaaaaagatttccactcattgttattgatgaatgccaagatttatcaagcgagcacctattcatattgcaagggcttagtgacttaggcgttaagctacactttgtcggtgatttagatcaatcaatttatggttttcgtgatgtagaccctaaggatacaataaaattcatcgcagataataaatttaagaaaatgccattgaaaattaattacagaagctgtcagcaaatcattgatctttgctcaaaattaacatcaacaggtgaagttaagggacagttttgctctattgagtcaccatgcgtcgtattacaatataatgaaacaccattagaattaatcgacaacattggaaaattatgcctcgactacagcaacaatgtaattgttgcccgtgggcattccattttggaaaaatttacatttgatggtatcgaaggaaaccaggtaaaaaatcttgttaacgcaataaattatttctcaatgaaagaaactcagaacatcaaaaaatcattgcagttattatcgatagtaattcgttcaaaattaaattatccaattagagagtccatatttaactgtccaacgcaggtagaatcatctgtacaatggagaacttttcttttcaacatattggattttcttgcgaggaataatcttcatgactttgagataacttggagtacgtggtgtaagaatgctaataaaatcctgtccattatccatcaacaaccatttgttagtgaagatttaaaatctataattgaggaagtattttcatcccccataaaatcacctacggggcttgccaagcttagcgtgtcaggatctattaaaacaaacaatactaataatgaatcttataaatag

SEQ ID NO: 200175 - DNA, 1254 bp, Klebsiella oxytoca
atgaaggatacagaaatttcattagagaagtcgaaaagagcacaactatggctagaacagtttgaagaacaagatcaaccctatgccagcttattgttgaaaaaaatccaatgggtttcaagccatgaatttgaggttaagatcaatgccttaatcgatgaaatatgcaacaaggaagaggataaaatagccctgtttgttgaaagagaagttttagatgatgaaacagtctattcttttaatactgagaagcctcaacgtgcttttggcaatgctttccctcctatattatctaccattgataaaaaaatcgaaataggtagtgaaggaatattaaataatatcattactcgtttccaaagattagacagccgaaaatattataattatccatcagcagaaatcatgcgtagtaaaagaataaataaagttattgtactaactgatacaatcggaagcggaaatcaattaaataaatatttaaactgtttttggaatactccatctataaaaagctggctgtcatcaggacatatcaatgtttatgttgtctgctttgcggctacagaattcggtctgagtcgtgtagaacttaacaaaacgaaaccttcagttttctactcaagaatatgtccaaccatagacaatagcttcaccaatcaagagagaaaaaaaatatatgaaatctgcaacaaatataatcctctaaagaaacatacaaaaacaatcagttttttaggatatggtggtgtatcttctctaatatgctattctcatggattacctaataatgctccattgatattatataaaagatcagctacgtggaggccattttttcgtgggcgagcgacaaatgatgtcattgcagaacttcctggtagtatgcccaatatagatgaaaaagaatatttgagggtgatgggagaaaagaggctttctgcttccaaaaaattagcaacacttgatgaggaagcaaaaaaaaccattctattactagctgctttgaacaagtcaccacgaagtaatagtgctatagctagccggagtggtctatcttctaatgaggtttgcacaatgcttgcgaaattaatgtatttagaatgggtcgattcgaaacgtagaatcacagatgaaggacgttttttattgtcttatctaagaaaagagaataacaaactgtttagtgaaaaaacacttccggcttcagacaaaatatattactatcctaagacgttgagaggaccatcataa

SEQ ID NO: 200176 - DNA, 936 bp, Klebsiella oxytoca
atgagacaacggtggtcctctcaacgcttccaggcaaatgcgaaaaatcagggtatcgatcagaatactattgaacatgctataaaacatgcaaaaaatataatccagcatggtaaatatattctacctatttttacccttagaaatttatctttcttagctggtgtcgaatactcattcttaagagaaatagttagtagagaatatatacatccttatcgttttttctacattagaaaaaaaggaaggaatcgtagaagaaaaatatgcattcctaatccacaattatgcaaagttcaaagatttctgcataaagaagtccttcaagaatttcagatacatccagcatgctttgcatatattcgtgactcatcgattgtggatgctgcaagtgttcacgttgaaagcagatggttattgaagttagatataattaatttttttgactctatatctgaaatttctgtttatcgtgcatttagggataatggattcccggcgcttatttcatttgaaatggccagaatttgcacttggcttagttttagaaatcctcacgaaattgatgcaagatggaaaattgaccatcggcacaactataaaatttaccatcgttccagcatttcagaaatgggtagtcttcctcaaggagctcctagcagcccaatgctatcaaacattgtatgtttcaaattagatgaaactttagaagaattagcagttgaaaacgggctaagatataccagatattcagatgacctcacattttcaacaaactccattaactttaatagaaaaagtgccacactctttataagtaaggttttttcaattttaaaaagccatggttttgaaccaaacaaaacaaaaacagagatcatcccccctagttccaaaaaggttgttttaggcttaaatgttgataaaaaaatgtga

SEQ ID NO: 200177 - DNA, 1428 bp, Klebsiella oxytoca
atgccaattttgcagccctaccattcaaatcatctcgatacgaatgggcaaaatgttatgacagtttttcattccgttagcgacctgattggtcatactcccctgctgcagcttcataagctggataccggcccctgcagcctgtttctgaaactggaaaatcaaaatcccggcggctcgataaaagaccgcgtcgcgctatccatgattacgcaggcagagcgcgaaggaaaattaaaacccggcggcacgattatcgaagccaccgccggcaataccggcctcgggctggcgctgatcgccgcgcagaaaaattatcgcctgatcctggtggtgccggacaaaatgagccgcgagaagattttccacctgcgcgcgctgggagcgcaggtacagcttacccgctcggacgttaacaaaggccatcccgcctactatcaggactacgcccggcgtcttgccgacgaaacgccaggcgccttttatatcgaccagtttaataacgaggctaacccgctggcgcatgccaccaccactgccccggaaatcttccggcagctggagggcgatatcgacgcgattgtcgtcggcgtcggctccggcggaaccctcggtgggctacaggcctggtttgctgaacactccccgaaaacggaatttatcctcgccgatccggcgggctccattctggcggaccaggtcgaaaccgggcgctacggtgaaaccggctcctggctggttgaagggatcggcgaagactttattccgccgctggcccatcttgagagcgtccgcagcgcataccgcgtcaccgatagcgaagctttcgccactgcccgccagctgctgcaggttgaaggcattctggcaggctcctctaccggaacgctgctcaccgccgccctgcgctactgccggtcgcagacatcccctaaacgcgtggtgactttcgcctgcgacagcggcaataaatatttatcaaagatgtttaacgatgactggatgcgccagcagggctttttaagccgcccttcgcgcggcgatctcagcgattttatcgctctgcgccacgacgaaggggcaaccgttaccgccgcgccggacgataccctggcggccatcctcgcgcgtatgcgtctctacgacatctcacaactaccggtgctggaaaacggccgcgtcgtcggcatcgtcgacgaatgggatctgattagccacgtccagggtgacagtcagcgcttttctctgccggtcagggaagcgatgacccgtaacgtggagaccctggataagcacgcgccggaaagcgcgctgaaggccattttcgatcgcggtctggtggccgttatcgccgacaacgatcgttttcttggcctcattacccgcagcgatgtgctgaccacctggcgtaaccgactcgaacagtaa

SEQ ID NO: 200178 - DNA, 1023 bp, Klebsiella oxytoca
atggataataaaaacgatcagctattttgtaatgttaatgaaactaaaatcaaaaccgcgaaaccaatattgaatgaaaatgttatcagagaatggttttatcatcagcgagaaagaacttctatatattacaggaaggaaatacttaataaaccaccttattggacagatgacgaaattttaaggaattataaatttgttaataccaaaagaacatgggatagagaaacaaaatggcttttggcaaatgtaattaacaattgcaatgtgagttacgaaaataaaattctaaattcatttctctttagggtaataaacaagagtgagaccctacatgaaattaacgctccctttgatttctctagaatgaccattgttgacattgatcaggcaattagagaaaaaactcatgacatatcaataaaaaatccagagtatgttttttttagcgccgcgtatatacttggcggacctaaagttaattttggaagatttttagaagaaaaagaacataaaacggaaatgaacatgattatcaggatggtcaagtttgttttttataatcaagataaaatagtaaagggagtaaagtctgcggtaaatcagttagaagtatttaatcatcttaaatcattcgctgggattggcgattttcttgcttatcaaatctttgtggatttaacatacatagttcactttccatttacagaaatgaactttgttatttctggacctggatgtgaaagaggtattaattggattttttctgatagaggaggaatgaacagcgaagaatgtttattttggttcactattaaccaaagcaatattgcagaaaaatataatgaagagtgggaaatggacaaaatatttcattttttacccaaagaagaaagaatatatacactaatggatatggaaaatagtggtgcctgcgaaatagacaaaagatgtagaacgaagtttggtaacaaaaggccaaagcaaaaatatcattatcaaaaaaacatgaggctattttga

SEQ ID NO: 200179 - DNA, 663 bp, Klebsiella oxytoca
atgttaatagaaaataactcttatctttatgcctatgcaataacacgagactttggctttgcacctaacccatttcatggaatgtgtaccttagcaacatgcaaacctagaattagaaaggcagctaatattggtgattggattctggggattggcggttctaatttaaaagcggttaggaaaaagtgtattctactaatgaaagtgactgaaaaaattagttttaatgattattgggaagacaatagattcgccatcaaaaagccagcgagaaatggtagtcatgtgcagatattgggggataatatctatcatcaggacgacaacaatgattggattcaagaagattcacatcatagcaatgctgatggctcattcaatatgacaaatcttgaacgtgatactcgtactgaccaagtgttgatttcaaggcagttttattattttggtgataaagccattgatgtagacttagactcgattggctattacagaattagagactatattaagctctccttagatacctctatccccgcaaatgatcttataaaaaaaatagacgctgagtttcatagcgagaaaaatttagttatatctgatccatgccagttctctgatttctataaacgtgtagatcagggaactggtgaactctattaa

SEQ ID NO: 200180 - DNA, 1143 bp, Klebsiella oxytoca
atgcttcctatctatcagcttgctgttataggctctccttcagacgcgcaacttcgcgatttggaggatgcggttgacactgcagtggcgatgtacgggctacgactcggtcaggagatcagttgggaggtagctccagagatgtttacgccaaaccagtcgcgctcgagcgcggttgtattttttggaggagaaggcgtagatcatccaagcttaccgagtttgctccgcagcggtactcctgtaattccagtggtatccgatctacgatatgtatcggcggagatccctgagcagctgcggccgctaaactgcctggcctacggaaatggcggtgcgaagcgtgtctcgatagctcttcttgaatgcgctggattgcttccgaaacaacgaagggtcttcgtaagctaccgtcgggatgaggccagagttgccgcgctccagatgttcgatgctctatcagcacgccatttcgacgtattccttgatactcatagtattgcgccagcagaggattttcagaccatgttgtggcatagactctgcgattctgacgtgctgttgatgttagatactcctgactattttaatagtcgttggacatcagctgagtttgggcgggctctcgcgaaaggtatcagtgtccttcgagtcgcttggcctgaaacgaagcagactcgtggattgggtactgcaagcctctctgagttagctgaaagtgagttggacggcgaaacaggacgcatcgagaattccgctatcgaccgcatttgtcttcagcttgaggcggtgcgcagcaaaagtcatgctgtaaggactatcaacctagtcagcaacttgcgcattgggattgagaccataggtggtgaaatcattggtatgggagtgggaagggaaatcaaagttcgtctgccctcaggccgaataatagtggtctacccgacggtcggggtcccgacgtcatcaaccatgcatgaagcctcaatgaactatccagatgaatcagttgctatactgtatgaccatgtgggactacatcctcagtggctgaatcatatggattggctcggctcgcacatccaggcaacgaagtgggtgaaagcatgcgaggctagttggcagtttgcagattggggggtttaa

SEQ ID NO: 200181 - DNA, 837 bp, Klebsiella oxytoca
atgttcctggacttgaaaattgagaatgtcgttgcgtccgtttcagaatggagtgattctgacgtcgcatcctataaagcgaaaaaagacaatattgccatcaagcttgaagagtacctgcttaatggtaacaacctgctggatgcagtgaaaatccagcaaagcgtattcccagagactgtgattgacgtatttatatcccactcacataacgatgaagatcaggccatccgtattgctttaagcctagaaaaaattggtctgaagccttttgtcgattcatgcgtttggggctacgctgatgagttgcttcagaagattgataacaaattctgtatcccttcgggttgggaaaattatagctacgcactgaggaacagaacaacaactaatgttcacctaatcctgaattcagcgctccagcagatgatccatcgctctgagcttttcattttcttaggcacggaaagttcgatcaaaattgatgagtacatgtcggatacagagcgactttcctctccttggattttctccgaacttatgtttgcacaaaatgtaaaacgtacagagcgcaagcaactcaaactagtgggattggagagttatgggacgttgaatgaggcggtgtttgatagtaaacctgttgagtttagatacttactaccgcagtccacttactcgatggattataggcagtttattaaatggctaagttcctactcccatccggatgatctcgatagcaataggcgaatccgcggattcgaacatattgataagctttattcggaacttggggttgatgcgaagttactagaggcacctcgattcatctga

SEQ ID NO: 200182 - DNA, 1269 bp, Klebsiella oxytoca
atgcgtgattggatggccgatcgctcagatgcgatagtctgtgtaggtggtgcctggtggaataccaataaagcgaatgcgggtgtactcaatgaactagacaccatgctggagcttggaaagcctgggttcatcgcagccgggtttggcggcgcgattgctggctatctcaatgaagatccgtcgctaataaaacgcctgaaaaacggactgagtcaagaggctaacgaagtcattgcgcgtggcactaatgttgattcggttgtcgatctgattgtcgagcagctcaaaaatttgcccctctcacgaaggaatgtaacacgaggtcgaaatttcagaattttggctttagacggtggcggattgaggggcacatttactgcagctgtactggccaagtgggacgatatgctcaaagccggcggcggtaatggcatcatatcccatttcgatctagttgcaggtacatcgactggtgctatccttgccatcggtctagcccttggcctgaacccaagtgaaattctggctttttacgaagacaagggcccccaaatttttcctaaggatcgaaagcttaggcattggctcaaatccaaacatgattcaactaccttgcgacagctacttacagaggtgttcggcgaaaagaccctggctgccgattcatgctgtcgcttggtcatacctactgtaagagcgaaacagggacaagcagaggcgatagtaacacctcacagtccagatcgtactgcgtatcgcgatatctctgccgtcgatgcagccctagcttcgtcagcagcaccaacattcttcgacgagtcgacatgggaggggccaatcgccctcgaaacgttccttgacgggggggtttgggcaaacaatcctattttgcctgcgcttgcggaaactgtcaggtacctaaaaattccactggatcgtatcgatgtactgagcattggaacactcagcagcgaaaacgattttactgaccagttaggcaaaggcaaagcaggatgggcacctcatagcgctgatctgttttttgctgctcaggagcacggcgcactcgctcttgctgaaagtttcctaggacccactcgccatttgcgtatcaaccaacaaacccctgtcgaaatcaagctcgatgacaaagaggcaattcaggaaatggctgcacgtgggaatgaagcgggaaaagaatactttgcagaagtgcgctcgaggttttttgacggtcgtcttgctgatgaatgggagcgtttttaa

SEQ ID NO: 200183 - DNA, 834 bp, Klebsiella oxytoca
atgtgcttattcgattctcgcaactccacaagaatacacatgaagttgcaggccattcgacattattatgtgccggatttatgtcgcgggagaatggatagtgataccttactaaaactaagcctttgtcgatgtagatcagtatccctagggtgcctcacggtatttttagtggtcgtcataaacggatgctgggattacgtagatagaaattcatacgaaaggaagcaaatcatgccgagaaaaacattcttttcttttcactatcaagaagatgtatggcgtgcgtggaatgtcagaaacagctgggttgtgggtagaggtaaagaatcagtgggattctatgatgctagcgttttcgaagcatcacaaaaggaaagcgacaacgcgctaaaaaactttctacgcgacgggctaaaaaacacgtcagttacgtgtgtcttggctggccagtacactgctagcaggcgttgggttcgatacgaaattgtacgtagcgttttgaagggaaatggtttgttgacagttgacattcatggcgtaaaaaacaatgcgaatatttttgggaaaaaaggaatcgatccactttcagaagttggagtttactgttcgaacggacaaatttattttgctgaaattaaaaacggcaaatggataaaatatgaggactacaccttggctattcctgcatccgatctgtggtttacagcccccactacattgggtgtaacaagaatttcagaccatgccctgagatacgattacgcagctcagaacggcagagcgaacatacctgagtggattgaaacagctgccggacttgctggtcgctag

SEQ ID NO: 200184 - DNA, 627 bp, Klebsiella oxytoca
atgagtgagcagcgaacgcctccgtcacgcccaccacagggaccgattggctggctgctgtcgctgaccgggcagctcatcgggctggttattggtgcgctgattctacggatcgtactggaactggcggggctgtatttctggtggccgcatgaggggagcagacatgtttttcaggtgatgagacaagagcgggcggaactggttattgcgttacaaccgcatccgctggggaatgaaattctggtgctgctggaaaaaggggcaaatagcgggattatggtaaacaaacttctgcagaaaccactcaccgccctggcttatacactgttgagttttatgctgcgccttgtatggcttgccgccatgttccccctagtctgtctgtgtgcattaatcggactgacagacagactggtccggcgggatttaagacggtttggctccgggctggaatccttttttttccatcgctacgccatcaaatatggctgttcagtagctataacgctttgggtggtttatctggcgcagccgctgtttctgcctacgacgctggttttgctgcctgccgctttatggtttggagtaacgatttggatggcggcagggagttttaaacggtag

SEQ ID NO: 200185 - DNA, 1041 bp, Klebsiella oxytoca
atgaaaaatggagtcaggacagggctgttggctctgacgatactaagcgcccctctgatggcgcaggaaagcggcgcatccttcagccataaggactgggaagtggtgtgtgataacacgctgacctgccgggcggcgggatacagctctggggaaggaacaggaggttcagtattactgacccgccaagccggtgcggggaccgctgtgttgggaaaggtgatgttgtcggagattgatgcagaaagtgatgctcaggtccctaggctgacgctctggatcaatgaccagccagtcggtgaggtgaagtccggtaaggatggcgatgggttgctgtcggacaaacagagccagtacattattgcggcagtcaaaggcagcggaaaagttgagttcaaaggcgggtccgatccgtttgttctctctggtgaaggggcttatgcggtgctgctgaaaatggatgatgttcagggacgcgtcggaacgcccggcgcgctgaccaaaaaaggcgacaagccggaaagtcgcgttaaggctgccgttccggcgccagttattcatcaggtaaaaactgagaaagcgcaggaaaggcctctcacagcgcctgaactggcaatactgcagccaaagcttctcgcaactctgagtgaggatgactggtgcgatcgcatccagccttcagaagaacaggaagccgagacgatcagcctgacaccgctggataacgcccattccctgatttcagctctgtgctggcgggcggcgtataacgagggttatggttattgggtggtggacagcaaacttgcggggaaaccagaactcatcacggtttcaggttctgattatggcgatggcgttatcttcatgagccagaaaggacgtggccttggggattgctggggggcggcaagctgggtttgggatggcgagacattccgcaaaagccgcgaagcgacgaccgggatgtgccgttatctccgcctcggcggcacctgggatctccccacctgggtgacggatgttaaaccggcaaagtaa

SEQ ID NO: 200186 - DNA, 1188 bp, Klebsiella oxytoca
atgcgatacgatcatacagtccctgtatcaccttcacttctggaaaaatttcttgcgaatactaaaaataatgtattttgtaaacttgttccggattgtctacacagtaaaatcatctggtggaaaggttatggcgcatatattggttcagccaatttaactgagagagcatggtacacgaatatagagtccggtattttcctcactgagagtgacttatacagttctaatctaattgaacagctagaggaattctttgataacttagcatcgcttgactcctgcgttgatcttagtaaagatattattgatgaacaaagacaattattaaaactaaaaatcgaattagagaaaaaagaacgggatattatcaagaagcgaaaaatacctgaatggggtggagtgagctttattgataacaaaaaaaccaaagataaaagaaaagagagtttccataaagaatgggaaagcacgttttcaattattgataatatctcagggcagattaatgattacagacctgtatggatatcagaagacactccaaaattttggcaaaccgatcagttcttacatgcctattattataatatagttcgtcaaaaggataacacttatccttttgaagattatcatcgtacaaatagtaaaaatccacaggcagcgctgatgagtatgctctcctggtggaaagaccaatcagtacctccatctcatgaagataccaacttaggaatcaacgccccctatattcgagaacatttgtctaatgctcacattaattcattaaccaaagatagtcttcataaaatattcttttacacacatgcaacgatggatcatgtattaaaaatgagtgctgagacatttggtcatactgctaaaacatccttaaacaaggaagaacgtgctgttttattcacagaatggatcatgagcaaaaccaatcaaaaaggcatgaccattgctgaattactcaattacgtcctctatggtggaaaggcctcattgatgtgggaaagaatctaccaagctggaaaagacgatgaatataaatttcaacactatggtattaactctatcgctgaagttgttggctgggccagacctgatgatacgcctcccagaaatggcagaactaataaagctttacgtgcattaggctatccagttcgagtgaatatttag

SEQ ID NO: 200187 - DNA, 3621 bp, Klebsiella oxytoca
atgaataccaataacatcaaaaaatacgctccacaggctcgtaaccagttccgtgatgcggttatccagaagctaaccacgctggggatttccgtcaataaaaaaggtactttgcagattgcagatgccgagatcgttggcgagaccgtgcgctatggtcagttcgactaccccaaatccaccctcacccgccgcgatcgtctggtcaaacgcgcccacgagcagggctttgacgtgctggttgagcactgtgcctacacctggttcaaccgcttatgcgccattcgctatatggagatccagggttaccttgatcacggcttccgtatgctctcgcacccggataacccgaccggtttcgaagtgctggaccatgtgccggaagtggcggaagctttgctgccagagaaaaaggcgcagctggtcgagatgaaactttctggcaaccaggacgaagccatctaccgtgaattactgctggcgcagtgtcacgccctgcaccgtgcgatgccgttcctgtttgaagcagtcgatgatgaagctgaattgctgctgccggataacctgacccgtactgactctattctgcgtggtctggtggacggtattccgcctgaagactgggaagacgttgaggttatcggctggctatatcagttctatatctctgagaaaaaagatgcggttattggcaaggtggtaaagagcgaagatattcctgctgccacccagttgttcaccccgaactggattgtgcagtacctggtgcagaactccgtcggtcgccagtggttgcaaacctacccggactcgccgctgaaaggcaaaatgaatttttacattgagccagccgaacagacgccagaagtgcaggcgcagctggcagccattacgcctgccagcattgaaccagaaagcatcaaggtgctcgatccggcctgcggctcagggcatattttgattgaagcttataacgtactgaaaaatatctacgaagagcgcggctatcgcgcccgcgatattccacagctgattctggaaaataatatttttggtctcgatattgacgaccgtgctgcccagctttccggctttgccttattaatgatggctcgacaggatgaccgccggatatttacccgcgacgtgcgcctgaatattgtttccctgcaggagagcctgcatctggatattgctaagctgtggcagcagctgaacttccatcagcagaaccagaccggcagcatgggggatatgtttgccgaaaataccgcattgccccataccgacagcgccgaatatcagctgctgatgcgcacgctgaaacgctttgtgaacgccaaaacgctgggctcgttgattgaggtgccgcaggaagaagaagcggaactgaaggcgtttctcgatgcgttgtaccgtttggagctggaaggcgattttcagcagaaagccgcagcgaaagcgtttattcagtatattcagcaggcgtggatcctggcgcagcggtatgatgcggtggtagcgaatccgccgtatatgggcggtaaaggcatgaatggtgaactgaaagagtttgccaagaataattttccggaaagtaagtcagatttgtttgcaatgtttatgcaacatgcattttctttgctcaaagaaaatggatttaatgctcaagtcaatatgcaatcatggatgttcttgtcaagcttcgaatcactccgtggatggctgttggataacaagactttaatcacaatggcccatctaggctcaagagcttttagtcaaatttctggtgaggttgtgcaaaccacatcatggataataaaaaataatcatattaaaaattatttaccagttttcttccgcttgacggacggaaatgaagaacagaaaaagaaaaatctttttgaaaaaataaatcgttttgataacactgctcaagatgatttcaaaaaagtccccagcatgcctattgcctattggttacctcatacagttagcgatacttttcatgaaaattctttaatcggggacgcaataccagtcagggggggaatgacaaccgctgacaatgataaattcgttaggttttggcaagaaattaacatttctaaactaacccaaaaaatatggatcccatacaacaaaggtggtgaatatcgtaaatggtatggaaatcagtcttgggtagttttttgggagaataacggtcaagcaataaaggaaacaggtaaggcctcagtaagatctgaggaattatatttccaaaaaatgattggctggacagatatatcgagccactctcaattgggcgttagatattatcctgatggattcatttttgatgccagcggcccttctttatttccacagagtgaagaggaaatttttttcatccttgcatatattatttcatcgccagtagcattcattgtaaatgcattaaatccaactctacatgttcaagcaggtaacatagccaacttgccattacttaatcttcataaaacagacattgtgtcattatcaaaagagaatgtggatatttcaaaatccgattgggactcttttgaatcatcatgggattataaaaaaaatccattgatttctaggaaaggcactatagaatactgttacaaatataatattattgaaaatgaaagaagaataaataaaacaaaagaaaacgaagaaattattaatactacttttgctcgaggacttggcctaactgaaattatatataatacagtcccaatcgcagaagtaactttaaattgcaacccattatatcgatatggcaatattaaagatgataaaactctgcatctacgatttcagtctgaaacattatctgaattgatttcatattccatcggctgcatgatgggccgctactctctcgatcgcgaaggcctcgtctacgcccatgaaggcaacaaaggctttgctgaactggtcgctgaaggtgcctacaaaaccttccctgccgataaagacggcatcctgccgctgatggatgacgagtggtttgacgacgacgtcacctctcgcgtcaaagagtttgtgcgcaccgtctggggcgaggagcatttgcaggaaaatctcgaatttatcgccgaaagtctctgtttatacgcgatcaagccgaaaaaaggcgaatctgcactggataccatccgccgctatctttccacccagttctggaaagatcatatgaaaatgtataaaaagcgtccgatctactggctgttcagctccggcaaagaaaaagcgtttgagtgcctggtttatctgcatcgctacaacgacgcgacgctggcgagaatgcgtaccgaatatgtggtgccgctgctggcgcgctatcaggccaatattgaccgcctgaacgaacaggtcgatggtgcctccggcggcgaagccacccgtttgaagcgcgatcgcgacaatctgagcaagaaattcaatgagctgcgcagcttcgacgatcgcctgcgtcactatgctgatatgaggatcagtattgatctcgacgacggcgttaaggttaactacggtaagtttggcgatctgctggcggatgtaaaagccattaccggcaatgcgcctgaggtgatttaa

SEQ ID NO: 200188 - DNA, 369 bp, Klebsiella oxytoca
atgcaccccgccgacaatgccgttacggacattcacaaactggtatttatccaggaacagcccttcaacatagtccgggcagtaccaggcatattcgaggttataaaaccggagtcggctctgattaatttctactggccaaccaccgccgcgctggagaaggccaataccgagcaatttatattccgtcccaagctctgcacagccagttacgttgatgctctccatgtcgtaccagccgagcgaacgcaaatcgaaatgcacgccgaacccgatattttcacttcgattttcagccgtaccgcacacgcgcagattgcggaaaatgccacgcccctttgtgcgccgtggaatttgcccgcccggtga

SEQ ID NO: 200189 - DNA, 171 bp, Klebsiella oxytoca
atggaaaatttaacgttgtctgtaaaatttgataccacctcattagatgaggctattgagaaggtaagaattttgaaaaaagaattaagggagcttggtcttccttatttcacaggtaatccacttactaactttaatacacaacaagaagacaataccaccagccagtaa

SEQ ID NO: 200190 - DNA, 555 bp, Klebsiella oxytoca
atgaccggatctcttcaggaagttgtctttactgtcgcaaagcatgaggttggtcattggcttgcatggcactactatgggggctgttcatctggtattgaagtgaaaataatatcaactcgaggtcgtcatacaggagcatttattcctgatatggcgacaagagtttccaatatagatgatgcctgtaaatatctaaaagctaggttaatgtgtctccatgctggtatttatgcagagtcatttctcggtgatatttatgacgcagagaaaataaatcgtgaatttaatcatttgggtggtgcatcttctgattttcaccggagtattgaactcacttgggcttattgcaatctcttaggacgtgccgaccaatacagcgtcgtttgtagcgaaatagaccaggaggccgcccatttggtggcagataactttgcctttataaagcatgctgcaagaacaatatcgaacatggctctgtatgaaggacaactaatcaaggtccctgatcatgaattacgttcaatgtacgataaatttaatcgacagaggtga

SEQ ID NO: 200191 - DNA, 465 bp, Klebsiella oxytoca
atggctgacatcttctacccacatgactaccttccgatgccacttcaggatgggtacggcttccagccagtaagccctctaaagcgaacccaacttaccaccggccgcgcgcgtcagcggagggcttacacgtccactccgacgcaggctagcatatcctggttcatggagacggacgggcaggctcaacttttcgaggcgtggtatcacgaaaccattaccgacggtgcagattggttttatatgaaactgcaaacgccgctgggggttgagttctataagtgccggttcactgacatctacgaggggccaacgctggtagcgccgatttactggaagttcaccgcgacactggaactatggaaacgtccagtacttcctgacggctgggcagagttccctgattttatagtgaacagcgacattcttgatctggcagttaacagggagtggcctgaagcatga

SEQ ID NO: 200192 - DNA, 2694 bp, Klebsiella oxytoca
gtgacagaacaaacctcccgcctggccattattattgacagttctggggcagaaaagcaggctgacaatctcgcaactgcacttgtaaaaatgacgcaggcaggtgaacgtgctgccaccagtgcagggaaagtgacaaaggccactgatgaagaaaaacagtccctttctgaacttttagatcgtatcgacccggtaaacgccgccctgaacaaactggataaacaacagcaggatcttgcgaaattcaaatccaaggggatggtagataccgatacattcgatctttattcaaagaaaatcgaggaaacacgaaacaggctaacaggatttcgcgacgaccttggtaaaaccggccaatccgccgcccagactgcctatgccatgcgcatgatcccggctcagatgacagatattgttgtcggcttatccaccggtcagtctccgtttatggtgctgatgcagcagggcgggcagttgaaagatatgttcgggggtattattcctgcaattaaaggtgtatccacctacgtcatggggttggtgaatccatttacagtagctgcgggggcagttggtcttctcacttatgctgtttatcaaaatcggctggacattgaagcggcaacaaaaattgctacagagtcgcttggcactaacggtgatgctgccgagcgtcttgcacttaatatggttgcgatatccgataagacggggctggcgatcgaagacgtcggcaatatgtttatcactacgaatgacggtgccagcgaggcagtaaataaattaattgatgtggggtttagttacgatgaagcacgacaaaaagtctcacaatataaagattcggctaattttacggctctgaatgctgatattgatatgcatcgtcgagagatcctgaaaatcggcgactcatggacggctgcggctataaaggtcaaaaattattacacagcagccgacaaaggtaagcagaatgttgcccttggtggtgcaatagaccccacaatgagatttatcggccaggctatcgacctgcaatcaacgatgaatgctttgactattcagggtaataaagctgttgcagagtctgttgactggattaataaggagtatctggcggcagacagagttgccggtgcagaagctcggttaaaggaggcaagagagcagtccagaaaaattgctttctcaggaaataaagaagccatcgatcaggcaaatgcgttaattgctgtacgagaaaaggaacttgagcaggctaaaaaggctgaacagcctaagacccacaaaggaaaagcctatacagaggacgcggcaacccggctgcttgatcaaattaaccagcagactgccgctatgcagtcccaactggacactagcgataagctcaacagcgcgacacaggctcgcgtgaagttcgaacaacagattgctgacctcaagtctaaaacgcagctaaccgcagaccagaagtcaattctttcccgttctgatgcaatcttgcaggcctacaagcagcaggaggcgttacagaattccgttaagacactggacgactaccggaagatgcaggaagagataacgccgaaggagctacgacagaacgagacgctgcaaaaacgtctcgaaatcctgcaaaagatggtcgatcttaaaaagctatcaccggaagacgcagggcagcaggccagcgatctgattggtaaatctgtacttcctgattccgttatctcaggggtgaacaaagctggtggaacgcttacttccggtgcgactaatagcgacctgtcagggcaggggctgaatatgatagggctgcaaatcgatccgcagcttgaaatcattgagaagctgaaagttgcccagattgattatgctgcctggctgaaccagcagcagcaggcgatcatccaggacacactgctgaatgagcaacaaaaacagcagcaattggcagctctccagcagcaaggaatgcaaaatcaggagatgataagcacggccctgtattctgctcagatgcagtctgcacagaactcattttcaggaatcaccgattcgcttgggacgatgtttggtgagcaatccacgatgtacaaagccgcctttgtcacgcaaaaagcctttgcgattgctcaggcagcgctgcaattacccatggcaatgggccaggcgctggctggcttgccgttcccggctaaccttgcagctgtcgctcaggttatcgggctcatggcctccattacttccagcatcaccagtgccgctgctgttggcttcgactctggcggttataccggccccggcggtaagtatcagcccgcgggtattgttcacaaaggtgaatatgtattcgaccaggcatcaacgaaccggatcggtgtgtctcagcttgaggcgcttcggaatggtaaaccgctcgatgccacgctcagcaaaccgggttttgggaccggggtgcagaacgtgaatagtgacaacagcaggcgaactacagttcatgcgccgattaaccaggagtttaaccttcaaggtgttacacctgagcaacttagcgctacgctcaaccaaaacaacaggcagctttccaggcagctaaaaggggaactaaccaaggaggttatgattccgcaaggggcgtttggaaatgctttaaagagtcgctatgtgaggggatataaggaataa

SEQ ID NO: 200193 - DNA, 258 bp, Klebsiella oxytoca
atggccggattgaccaaagagcagcgtgctgaacgtgctgcagcaaaacttgcggccacgcaggttgatgccaatgctcctgaacagcaggaacagcaggaacagcaggaacagcaggaacagcaggaacagcaggaacagcagctggtggcgatgattaccgatttcccggcattccccggcggccccaataccgccaacgttcaccctgatgaagtggagaactggaaggcgcacggctggaaagaaatggagtga

SEQ ID NO: 200194 - DNA, 240 bp, Klebsiella oxytoca
atgaagattttcttaaaaggtgggcctcgagatggtgagtccgtatcccttcacacggatgactacggagtgccattagaacgagtgcaatttccgcagcctgtttctgatgcatccccattgtttaataacggatttgatgcctgtgatctcgaacaggatattctgatatatacgctagaaaggatagtaatagacgggaaactgcatcactacgaataccactatcaaggtcgctaa

SEQ ID NO: 200195 - DNA, 237 bp, Klebsiella oxytoca
atgagtgaagcaaaaccgcaggacggcagcaccgtaaagggctatcgcaaacttgatgagaaagatattgcaaatatgaaccggctgaaagaaattagccgccaattcatcgcacagctggagtttcttaaaggtggtgatgctgacccacgttggatcgccatggccaaaactgaaatgcagaaagcttgtatgttcggatgtcgcgctgttgctcaacccgatgacgactgttag

SEQ ID NO: 200196 - DNA, 393 bp, Klebsiella oxytoca
atgtccgcagaaccgatctcgggtaccgcagttgcgtcggcggggctcgctggtgccagtgtatttggtctggcaacaggcattgattacggcgtcgtttttggtgcctttgctggttccgttttctacgtagcgaccgccgcgaacgtaacccggttgcggctggtggcctatttcgtgacgtcgtttattgtcggggtgataggtgccggccttcttgggtcatacctggcgtcatggacacactatagcgatcgcccccttgacgccctcggcgccgttattgtttcagcgataaccatcaaggtcctcaccttcctgaataatcaggaaatgagcggactgattggcatgctttcccgcatgcggggaggaggttcaaatggtaaatga

SEQ ID NO: 200197 - DNA, 684 bp, Klebsiella oxytoca
atgagaaacttatcctacattcgccagcaactgatagtggccacagccgatctgagcggagcgacaaaaggtcagctcatggcctggctggagaatgctcagttcgacacgaacacattcccacgcaaaaaacagcgcgtctgggatgaggaaacggaaaagtggataacgctgaacaactctccgatcccgggaaaacaatcccacgccaaaggctcacatatcccgttggtgcagccggtggagtacgcaaccgcatcatggcgtcgtgcgctactgtccctggacgaacatcaaaaggcatggctactgtggaactacagtgaaaatatccgctgggagtatcaggagacgatcacccggtgggcgtgggagcaattcagcgcgcaactggtcgggaagcgcattgctaagaagactgtagagcgtctgcgtcagcttatctggcttgcggcgcaggatgctaaggcggggctggcagggcgtgatatgtataagtattgcgagcttgctgagatggtaggtgttgaagataaaaactggtccaagacgtttacggatcattgggaagctatgcttgccttgtttgggcgcctggatcaagagtcattgctcgtcttaacgaaaacacgttcacaacaaaaggctacaaattcgcagcagagtattgcagaagtagattaa

SEQ ID NO: 200198 - DNA, 345 bp, Klebsiella oxytoca
atgacgactgaaaccgaaaacgaactgagcaatatcgtcgcgtttcccacaaaagaggatgagccgcgtgatatgaccaactttctgtatgaacaatccgagcggcctttttgccgtcatcctgccgtcagtgtcaacgagaaagaacgacaggttcgttgccgcacgtgtggcgccatagtggatcctttcgactggatgctttcagtggccaaaaaagagacacagcttgcagacaacgtgaaagccctgcgcaaagaggaaaaggaacgccgtcagaacatcgagaaacttatccagatcgagcgtaacgcgaaagccagaatccggagggcgaaaaattga

SEQ ID NO: 200199 - DNA, 750 bp, Klebsiella oxytoca
atgaaaaatatgattggtactggtagtgcgctggaacgactgagaaagcttatccctcctggtgttgagccgaagttcgccagcgttgacgagtggcgcacatggcaggcagaggaaggccgaaaacgctgcgaggagttggaaaagcagaaccagcgtgcacgttcagagaaaattttcggtcgtgccgggatacaggatctgcaccgcagctgcacgttcgcaaattaccaggttgcaggagatgggcagcgtcgggcgctgacgatggcaaaaagctatgcacaaaacttcggttccggtttcgcaagctttgtatttagcggagctcctggtaccgggaaaaaccatctggcggcggcaatcggcaatcacctgctggctggtggccactccgtattggtggtgactattcctgacctgatgctacgtgttcgcgagtgctatgacgacgggcagtcagaagcatctctcctggacgacctttgccgtgttgatttgctcatcctggacgaagtggggattcagcgtggcagcagcggcgagaaggtgattctgaaccaggttatcgatcgtcgcctgtcatccatgcgtccggtcggcattctgaccaacctgaattatgaatccctgacggataccctcggtgcgcggatccttgaccgtctgcagatggacggtggtatgtgggtgaactttgactgggatagttatcgcaaaaacgtccgccatctgcgcgtcgttaagtga

SEQ ID NO: 200200 - DNA, 909 bp, Klebsiella oxytoca
atgcgtgactatgcaacagtcgcaccgcaattctggctaggaaaaacaggtcgtgaactgcggaaaaaaggcgctgaagcgcaggtggtctcgttctatctgatgacctcgccacacgcaaacatgctcggtttgtattacctgccaattctctatatcgcccatgaaacaggtttgggctttgaaggggctttgaaggggcttaaaagcgccatcgaagcgggattttgtagctatgacgaggacaccgagatggtctgggtgcatgaaatggccgcctatcaagtaggcaaagcattaaagcctggtgataaccgctgcgcaggggtcaggagtgagtatgcatcacttactgaaaaccctttcctttcatcattttacgaacgttataaaaatgatttccatctgaatatcaaacgtgaaacgcgccaagttttggaaggggcttcgaaggggctacgaagccaagatcaggaacaggatcaggaacaagaaaaagataaagatctcttggggtatggctctgccacacccccggatagtgaattttcagatgaagttccatctgaaaagccgaaaagcagttattcggaggaatttgaactggcctggaaggaatacccgaaacgagccggaggcaacagcaaggctgacgcgttcaaagcctggactgcccgaattaaatcaggcgcaacagcgcaggagctcatcgatggcgttcgtcgatacgctgcatacgtgactgctgccggaaaactcaataccgagttcgtgaaacaggcatccacatttttcggtccgtccaagcactacgaggaaccatggaccgcaaccgcggctgccggaaagcgggatccgaatatggtgtcccagcccagtaagttaattcccagcgggttcagggggtag

SEQ ID NO: 200201 - DNA, 189 bp, Klebsiella oxytoca
atgtcaggaacaagtgttgaggtaaatatccagccaactcacaagtgttctttctgcggggtgagtaatgtcgagtttacaggcgttctaatcgccgggcccggcgtcgctatctgtcagaaatgcgtctttctgtgcgtagaaattgtttttaaatacgccgaaaagaccgataagccaacgtcataa

SEQ ID NO: 200202 - DNA, 294 bp, Klebsiella oxytoca
atgaagtcagtaactaaaccgtgtcctatctgtggtgcagactcattgtcttttaaccatgtcaatcaggttgttaacatcaactcaaagccacctactattcgtgaagtaccatcggttgtttatgtgtgcgatgagcacggatggttttcactttcggaacaggttaatgatctcgttacgttaaataacgaccctgcggttaaccaaaaactggcaactatcgttaaagagcgatacgtgccggagcaggatcagccattggccctgaaacctatcgagtccctcgcataa

SEQ ID NO: 200203 - DNA, 678 bp, Klebsiella oxytoca
atgcgatatgaattttctggcctgcaagccgctaccttaaaaatccttctggccgatatgggttttgaatatcaacgccgctggtttatttcacaaaaacgggtacgccacattaccaaaacccggcagtgtggagctgactggtatttctcactggaagcactgattgacgccatcgagaccgggcgcagtcagtattttattgccccaggtgaaggtaactcactgtcaaataaccgccgatggatggttcacttttcccgactggctggcgtcaatattgcccctgatgactcagccatccggctgacaaacggtgctgaaattcagtttattggcgagcaacacacccttgccgcgtgtaacggtaacgcttacgtcagtgaatacgcctgggctgataaaccggccaatatgttcaaagtggcgaagggtatttcagcccataaaaactgccgatttacggcttatacctcaccctcgccaagtgatgaggcttacgcgctttggtcttctgaaaaaccagataaccagcagcgactgtctgcatattcagcgcttcaacaaggcagcactattttgaatctgccagacattgaggccgaattttcaaaagaggactttaacattcttttttcggctatctggccgcaggaaaatagcgaggtagccaagtga

SEQ ID NO: 200204 - DNA, 846 bp, Klebsiella oxytoca
atggcgaaatttggtgatggtgcagctccggcaatagaaagaatcctttctgcttatggacttagctctcagaaggagcttggtgaaaaactcggtatttatgccaacaacatcagcagttggcttgctagggatagcgttcccgggaacgtttttgtggagtgtgctctagaaacaggggtcgacattgagtggttggtgactggtaagtttgcaaaatcgaaatccgtcagcagcaaaatccagctaaaagggaaacctctttacgaagagataatgtccagcggcggcaaaacggttctgagacgtatacttgacgcttatggctttcggcagcaaaaagaacttggtgatttgctcgatatcccttctggcactatcagcacttggatccggcgtgatttttttcctggcgatgttgtggttacatgtgctcttgataccggcgtttctttggaatggctggcaactggaaagggcgaaatgtgggaaaaccgcgaagatgcaacttatcaaaagtcatcagtaaaaaaatatcgccttgaggctggtgagctaaaacctgctggcttatggttggctgacccatcattactcaccgataaccatgagtcgttgatgcttatcgagggcataggatcgtcatggctagtagacagttcaacctcaactattggaaatgggcgatggcttattggtattgatggggcattagatgtatttgatgttattcgactgcccggtagcaaagtcagactctccaacaaatcggcctcatttgaatgtggcctatcagatatcacgccatcaggcgcgattgttttaacattagaaaaacacttataa

SEQ ID NO: 200205 - DNA, 405 bp, Klebsiella oxytoca
atgaaacgttcatttttcgcagtagctttatttgcctctttttcggcattagctcagccatcaaatttagcagtattaaaaaagtctctgaatgatatgcaaccactaacaattaaagagaacaatcgggttattactgttgcgctcgatgctgcgagtattacccctgaaatttacgatactgccatttatggtgtttgctacccggtgtggttacataaagaaaacacctcttatctaaaaaatacgaaggagattcgtattttgaataagttcaacttcatgggctatagcttggaaaatcccagagccacttgtgataaagccggggcagaacagccgaaagaatccaaagtcacaatcatggctaatacccatctcgtaacgaacaaagaccctcagtaa

SEQ ID NO: 200206 - DNA, 573 bp, Klebsiella oxytoca
atgctcgcctgcggcaccacggagatgggcgtgcgtcgctactgctgttcatcatcagactgcacccatagccgattcttctgccagagctgcaagtcaaaagcctgcagcgcctgcggtttcaaagccaccgagcaatggatatcgcagcagagccatattcttcccgactgcgactggcagcacattactttcaccatgccccatctgctgtggcccttcttcaacaacaactggacactcctcaacgccctgttccgggctgccacccgcgccatactccggtgggtacgcaaacaggatgttgaggtcggtatcttctgcgccctgcatacgtacggtcgccagctcaacccgcaccggcaacagacgctgacccgggaagagatgatcgggcgctatatcagtcatatcccggcgaagcattttaagatggtgcgtgactacggctttttgtccaacaggaaacggggcgagctgctgccgaaagtgtatgaagccctgcagatgcatattctggcccaacgtgaacccccattctggcgctgcgttacttcgcttccggctcaatga

SEQ ID NO: 200207 - DNA, 1809 bp, Klebsiella oxytoca
atgacctccgcttttgttaacgaagaagcagtattaaggatcggtgaagttcgtgaagtatcgggcagaacactcagcgtgcttgtcgataaaaataaaaatctgagtgaccttttctatcacggtaaggtgctcaaaaatgtttcagtaggtagtttcatcgaagtcaaaaaaggcttcatgagtctgattgcaaaggtagaaaccgagaaaattgtcgaggaaaaatcgcctgttggtagcggaagcgattcgcttcgcttccgccgctatcttacagcctcactggcaggctacattgaccggaacgggcactttactggtggaacacgcgagttaccccttatcggcaatgaagtttttctgatgtctgaggaacaacttcatcttatccactcgatcgcgccagcgggcgagtccgggctgaatttttcgcgcaccgatctcgaagatattgatatcactctcccgataagcggccttctgaactcacacatcgccatcttcggtaatactggcagcggcaagtccaatactcttgccgcgctttaccagcatggctatgaggccctgaaaaatctactaggcgaaggattcagaagtcggtcacggtttcttttatttgatttcaatggtgaatatggtgggagacgctgtattacgcgcgacaaggttgtttacaatcttagcacgcatgatgaagagggtgatcgcattccgatgcctgctgagatactgctggagcatgagattctctctgtcctgacggatgccaccgacaaaacgcagaaaccttttctgaaacgagtgcttgaattcaaaaagcgagtggagtcgaagctgaaccctcagtcatattttcgtgaaatactgaaacggcgggtcaccgaaactctgtttggttgcgaaaagaaaaaaagtgacgacctgattgatttattccgtcccgtactgaaggacgaagacctgatagcagatattgattttttttataacaacggcggcgtatggcgaactaagacaggtgtttacttttctaatgaagaaaatactcatcagtgcaatatgtaccagagggctcagaattatgaattccccgatgatataatggaagagttgctggactatatgtatgttcagttaattattgaatatctttcaagtcgctcaaatcctgaacatctttctcctgtcatcaaccgaatgagcggactgaaaaaagatattcgtaaaattttcaatactgcgtccggcggaaccatctgggcagaaacgaactttgttgtcctgaaccttaatatggtcaatctgaccatgaaaaaaacgctaccacttttaatggccaaatgggcctattcagcaaaaaaaatggataaggtaccgtccactctccatctcatcatagacgaagcacacaatatcctttcgaacacctcgttcagggaatcagaaagctggaaggattatcggctcgaaacgtttgaagagataatcaaggagggcagaaaatttggtgtctttgtgacgatatccagtcagcgaccaaacgatatctccccgactatcatttctcaggcacataactatttcattcaccggttgataaatcagaacgatctgtatgctattgaaaaatcagtttcctacatagaccgcatgactgaagaatctattccaacgcttgcaaccggcacctgcatattcagtggcgtgatctgccctatgccacttaagcttcgtataaacgagctgtctttcagcaaaaagccgcacagccatacgctgaatttcgaagacctaatgctttag

SEQ ID NO: 200208 - DNA, 1047 bp, Klebsiella oxytoca
gtggcgacttatcgggcttactacgggcaggacagagatcgtgaatactttgaacgcatatttcagtcagcaaacatcaatttcatcattggctcaggagcatcactgcctgcaatcagcgtgttaggtgatattgaaagcgagcttgaggctctggtccgcgccggaaaggatgatgaatacttcagtaaatctgagtcttttctggacaatgtatggaaggcaaacaacgtcctcctgaagcgaagcaggcccgcagaggtgatccttccaaatttaatagatgatgtcgtatcgacacaaaacaactacgcgaagctcatgcgtgcattagaaatgcttctaacgaggcggcggactggattgctaccgcggcgcatcaacctctttacgactaactatgatttgttcattgaggatgcggcggttaaaaataacaacgtcattctgaatgatggattccgtcagcgcgccgatatttacaaccggacagttttcgatgccaaatgtttttatcagacgatacacgcaaccgggaacctttataattacagcgtggaattacctacggtgaatctcatcaagctgcatggttccctttcctggcatagctatgataagaaaatctattattccattaaggatatgaagccagttgcgttcaatacaccaaaggagaagcaggactgggttatgtcgcatcaactggttctgccgcgaaaggataaatttcgtgaaaccttacttgaaaacgtgtattacgacctgctacggacttattcaaatgagctggataaagaaggctctttgcttatagttttcgggttttcttttgcggatgagcatattgaaacccttaccaaaaaagcgctgcgaaacgccacgctcaaaattgttatattcgcttacaacgaggcggctaaagacctatttcttgataaattccgtgattattccaacgttgatgtagtttttactcctggagcgccgttggacttcaaaaagatgaatgaaattataaccggctttcttggaggcatgaaatga

SEQ ID NO: 200209 - DNA, 939 bp, Klebsiella oxytoca
atgccattagccatgattaatgtccgcctcgatgcggcactgaaagaacgcgtcgatcccaaattacagcaaatggggtattcagccacccaggccattgccgcgtactatcagtatatcgaccagaatgacagcctgccgtttaccatcgaaacccgtgtctaccggccggaagagtcactgcagaacacgctggatggtctgctgtctgcccggccccggctcgcagagatcagccgactgctgaccgctgatatgctgacagccgaagtgcgccagaaatacgcccaggagctggccattgatgtcggtatgatcaaagaagacatgcgtctgtatgacgcggccgggcgcgcgggagaacatctgcagcactacgtgcagtattcgctcagcgaagcctacctggcactggtgctctgccacagcatcctggaagatgcgccgaacagctatgggcgtagtctgttcctgaaaaaagaaagagtctttgccgaagcgctggaaagagcggaaaaacagatgattgagatgggcctccaccaggccggggcggtgatcacctcgacattacacaagggcacgtactgtacagtcgaggtttaccgtccggaggattaccagtatggcgcctggcaggtccgggtgacgctcaatccggcccgcaaagggcagccagtaccgaaaattgaaagctggctgaccttcgccttcccgaaaatacctgagcggatctttaacgtgaccagcccttacagcatgccggtgacggtgaatgagcagcttgagatcggtttccggtttgtggaaggctacacgttcttccacctgtactcgaacggcacagctgaggagaacaacacgattaatattgacgaggtggcggggaggctcggggactatattgacagcgaactggctaagcatctgcgtgcttaa

SEQ ID NO: 200210 - DNA, 678 bp, Klebsiella oxytoca
atgacatatatggcgcgtctcagagagcaggaacggcagaagcgaataaaacaagaagcagaggaggcttgtgttgataaggaatttgattttagtactttgattaaaaatctagagacgccgcaaaaacgacgccagagaatcagagagtccgttttcattgtttttcgcaaggattttgaagcaggaaaaatacattctttatatgcgttatggcatacagtagcgacagctttgtcttttactttcttcatggcactgtttagtgcagagagttacttttccacatcaacttgtttgaagctggcatctgtttgttttgcgttatcaattgtgtttaacggttttttttgccttttttatcagtcgcatagtgtattatttaaaatggatataaaagaactttttaaattacatatgctgtccttttttgaattgactcgttatttaggccttttacttactcttctgggaacgttctgtgttatctcttatttttctacagttgcagtgatcctgtcttttgctttttcggtggcattgttagccggttttctggtgtatcttccgaagaaattaattaaaagagatgatgctattttcagaatgaagatggacgccctggaacgcaaggatttcgatctgtatgaacgaatttgccggatttatgaggattaa

SEQ ID NO: 200211 - DNA, 1089 bp, Klebsiella oxytoca
atgctgagtcagctgacccttcgctttcacaaaaaactgatcgaggcgctgaaagtgcgcgccggtcgcgaaaacacctccgttaacgccctggccgaacgcttcctcgatgacggcctgaaaacagtatcgacaagcgacggatattttcagctgatcgccgatccggaggccacggtccggcagctgtaccggcatatcattctcggccagaccttcggcgcggcatcactctcccgggatgaactgcgcttcatcctggcctatgcccggaaggccttcctgcgcgggcagggcaggctggccaccctcccggccctgcgcaccctcatggacatcacacgtgatctgctggcctggcatgtggcatccgaccgtccgctggacgtccattacctgacggggatcttccgcctgcagggagataacctggttgaggagtttgacgtcttccgggcagatctgcgcccggtcgtggatcagatgtatgccgagcacctcctgcgtccgctggagagcgactgttttgtactggcagacattccggacgcggcgctggcagaaatcttcacccttccacggctgaaagccgttttcccgctgatgctgcgcgggctggactggagcggggagaaggcccgagatctggctcaggagctgcgcccggtgatcccggccgtgaccgaaaccattgaggccggcaccctgcgcctggagatccgcattgacggccagcaccccggagaacggccgggggcctggtacaccacgccccgtctgcacctgttgatcaccggccaggacttcgtggtgccgtacggctgggaagcgttctccgaactgctgggcctgttcagcctgtacgcccgacatccggaagcactggcgcacggtcaccagggggagcgcgtgatgttctccccgcccgggcatgtcacgccggagggttttttcgggatagacgggctgcggatatttacgcaggcggacgacttcgagtcgctggttcacgtgatggatgtacgttgcagtgacggtgtactgggcgaagccctgaccgggctgcgctgtctgtacggagatatgtag

SEQ ID NO: 200212 - DNA, 2187 bp, Klebsiella oxytoca
atggcgactgaaaatgctctgtcccgcgcgggctttgaaggcccggttctcaaggctgaaaatgattgttacgggtatacggcgatagcagaggggctggcccgcagcatcagcgccctggatgaaaatgtcagcaccgtcattggaatcgaagggcagtgggggtccggcaaaaccagcctgctgaacttactgactgaacaactgaagtctcaggtaccggcaaacacgcagattgtggttttctctccctggatcaattcaccggatgaaagcccggtaaacgcgctgatgatgaccatcgcggccaggctggcgaagctggataagtcggccatggcgcaggcaggacaggcagtgcccctcgcagagaatatcctcaactacgcgcagcagacctcgcgccggcttgcgcctgtgacgcgattcgccggtaattttgttccgggtctgggacttgttgccgacggcatggacgccctcgcggaaaccagcctgaagggtcgggaacagactgcggccgaactccggactgacattgaaggtaaaatagccgcgctgggcatcagctttatcgttgtcattgacgatctggaccgtctggagccagcgcaggcgttggaagtgctgcgtatggtacggtcggtcgcggacttttcgcgattccgctacgtcatgtgctacgaccgggacgtgctggcacatgctgttgaaacagccctgcaagtgcaaagcggtgctctttacctgcaaaaaatcattccgctctcgttcagcttgccacgtccggaaaacttcgctttacgcagagagttttatcggggagccctgaccatatggcaggaagtatccggacctgtaacagagcatgagtcattacaactcttttctcactatgtagatgtatacggtgcgggtcttggtacgccccgtgaagtcaatcaggtactaaatgccatccgcttccgctatccggggctgcgtgattatgtgtattttcccgacctgtgcctgctgcagctgatttctgtggttaaccctgcctttgccggctgggtggaacagtacctcaccgtatggtctgtggttgaaagccgggacggcatagcccatgaagaagtacagaatgccctgaaggctgaacttgctgaagctctcaagaagtttggtccatcccgcgccggttcgttatgggagcttcgtgcatggctacccggtgtatccgggtttgagcctgatcatctccggctgtttgaaaatatcaccctgccggaaactgaacactaccgtcagaaacacaggctgtgtagcagtgagtactggcgctattatttttcatattcttcaccccagaacgtcatgtctgatgaagatatcagtgccattatagagcttgccgcgagtgattatcccggcctgaaaaggcgtcttctggacagtgtgaccagtaacggcgtctcatcccggacctggtttgaacacattctgactcgcctttccccttccgtgacggccggagcagaagccagcgtaaagcgcaattttctgaaattcttctttagctgcagcgatcaagtcctgccatggtacagaaaacgggacatcttctttcgccaggagaaaactggtatagatggcatggtcagccagctggctttgcagatgcttgatcagcagcgcagccaggcaattcaattcttaacccgttgtttccgtcgtacccgcgcatttgtctgggcgacggtctttctgcgcaatattcgggctaattccggtcagggcaacgctgttttcacccaggatgaaattaaccttttcagcaatgctctgaatgagcggttgcaggaaaaaaatatcaggaaaaaaatgcctgatgtaccgtatctagcaacattcctgtacgcatggcgtgacataacaggcgagcaaaccgtcgcgcagtggatctcaggagtagaccagtctgaccgtgattttctgaaaatgttgcttaatctgcgcacggcagtcagcagcagtaatcagggcgattatctgcggcttgacctggatgtgatctgtactgtttttggtatcacaggactcatggaacggtttgaagatataaaggccaggcaggaagccaaccttacgggtatgataagcgaggttgacgaagccatcttacttaataaagataccatctga

SEQ ID NO: 200213 - DNA, 258 bp, Klebsiella oxytoca; identical to SEQ ID NO: 162563

SEQ ID NO: 200214 - DNA, 153 bp, Klebsiella oxytoca; identical to SEQ ID NO: 162564

SEQ ID NO: 200215 - DNA, 612 bp, Klebsiella oxytoca
atggttgtgaaaactctgacttcgggtctggcagaagaaacgctgatacgccggtttacgctcgcagtgggtacgcccctgactgcgctgatgatatctctggtatttgccttctggtcgctcggtctgcgacagggacgctcaatgctgcaactacttgaaataagtcagcgcagtttcccggtgcttgctgggattgtattcgttatcggcgcaggtggagccttcaactctgttctgctcaaaagcggagtgggggaagttatttcaggaatgttgctcagcacccatattaatcctgtcatactggcctggtttattgcctggataatgcacctggcagtgggatcggcaaccgtggcaatgataagcgcagccagtatgatcagtccgatgcttgccgcagatcatcaactgactccagaaattctggtaatagccattggtgcgggttcaattagctgggttcacgtgacggattcagccttctggatagttcgggaatacctgggaatttcattatccgaagcgctgaaaaagtttacggtggcaacgatccttgcttcggttgtggcgcttattgccacccttattcttgatcacttcatctga

SEQ ID NO: 200216 - DNA, 1224 bp, Klebsiella oxytoca
atgcatatcccccgtcccgctaaacttcttttcaccgtcgatgacggctggaaccgttacctcgaaaaacacggcgacagcatcagccagtggacccgcctctgcgttgagcgcatgctcgcctgcgggacctgcgctatgggtgttcgccgctactgctgcgcctcgccggactgcacacactcccgcttcttctgccagagctgcaagtcaaaggcctgcagcgcctgcggcatgaagtccaccgagcagtggatcgcggagcaacagcacgtcctgcccgactgtgaatggcagcatatcacctttaccatgccccacctactgtggcccttcttcaacgacaactggtccctgctcaacgacctgttccgctgcgccacccgggctatgctgaagtgggcacgccggcagggtattgaggtcggtatcttctgcgccctgcatacttacggccggcaactcaatcagcacccgcatatccacgtttccatcacccgcggtggacttgacgtaaagcacggcgtctggcgcagccttttcttcaaaaagaaggccgttgaggaaatctggcggggagccgttatccgcctgctgcgcggcagctatgagcgggtcagccccggcaccctgccgggactgggacacattcgcgatgagcgacagtggcggcgttacctgaaggcacagtatggccggcactggaaggtacacttcgcgaagaaaacccggggagcctggcacagcgtgaagtatctgggccggtacctgaagcgcccgccggtgtcggcttcccgcctgcgacactacgccggtggagcggtggtacaccattacctcgatcaccgcacgggaaagcataaacgccagacgctgagtcaggaagagatgatcgggcgctttatcagccacgttccggcgcgtcattttaagatggtgcgctactctggctttctggccaaccgcaagcggggctcgcttctgccgaaggtttacaaagcgctggaaatgacggtccgggaaaaaccaaaacgtcccgggttcgcggtactgatgaaaggcttcctgggcacggatccgtaccagtgcatcctctgcaaaggccggttgcgttttgccggcgccgtggcgggtgaacacgccacaaaaatgctctcagacaggctgcatcagatggcgaaaaaacgatggctgcggatgcctgagctgaatcagttcgcctga

SEQ ID NO: 200217 - DNA, 945 bp, Klebsiella oxytoca
gtggcgacttatcgggcttactacgggcaggacagagatcgtgaatactttgaacgcatatttcagtcagcaaacatcaatttcatcattggctcaggagcatcactgcctgcaatcagcgtgttaggtgatattgaaagcgagcttgaggctctggtccgcgccggaaaggatgatgaatacttcagtaaatctgagtcttttctggacaatgtatggaaggcaaacaacgtcctcctgaagcgaagcaggcccgcagaggtgatccttccaaatttaatagatgatgtcgtatcgacacaaaacaactacgcgaagctcatgcgtgcattagaaatgcttctaacgaggcggcggactggattgctaccgcggcgcatcaacctctttacgactaactatgatttgttcattgaggatgcggcggttaaaaataacaacgtcattctgaatgatggattccgtcagcgcgccgatatttacaaccggacagttttcgatgccaaatgtttttatcagaccatacacgcaaccgggaacctttataattacagcgtggaattacctacggtgaatctcatcaagctgcatggttccctttcctggcatagctatgataagaaaatctattattccattaaggatatgaagccagttgcgttcaatacaccaaaggagaagcaggactgggttatgtcgcatcaactggttctgccgcgaaaggataaatttcgtgaaaccttacttgaaaacgtgtattacgacctgctacggacttattcaaatgagctggataaagaaggctctttgcttatagttttcgggttttcttttgcggatgagcatattgaaacccttaccaaaaaagcgctgcgaaacgccacgctcaaaattgttatattcgcttacaacgaggcggctaaagacctatttcttgatggttag

SEQ ID NO: 200218 - DNA, 1215 bp, Klebsiella oxytoca
atgactcaggcgcgccgaccatcgccgctgcagcggcgggtgctgattgtgctggccgccctcgatgtgaaacgtcctggaccggtggcgacaagagatattgagcgggtgctggagcagggcggggacgcccctgtgtacgggccgaacctgcgcgcctcctgccggcgcatggaagccgcgggctggctgcgcaccctgcgcgccccgaacctgcagctggccgtcgagctgacggacgccggacgtgcgctggccgccccgtttctcgctgacgaacaggcgcgcgtcctggcggagaagcgcgcgacggcgatccgggttctgcctctgatcccgcctgtccaggcagatgaggctgacgaccggccggtggagctggatggtcgatggcacctggcgttgcggggtgactacgtgatccgtcttgacggcaccacctgtctgcagctgtggaatgcggccgggcaggtgacacgcctggaaggcgatcccctgcaggtcgccacctggctgcaggcctgtcacgatgcggggattgcggtccgggtgcagattaatgagagcgctgcgccggaggagggtacaccgggcgataccgcgccggcggacctgaccggcacctggtaccgccagctggacgctgcgctacaggcggaggggatcaccgggctgactgaggatattcgcctggccgtggtcaggcctgaagcgtccctgcggatgctgccggcaccggcgcgcctgctgaacgttctgcgcgacagtacggaggcgttcccgctcacggctgccacatacgaggaagacacacaggccgcgctggccgacctgctggcccgcgcggggttcacgggcgaccaggcgcaggagctgcagtggcactgcatccgctggccgctgatggatcaggaagaggctgaccggcgcgagctgaacagcctgctggatgaactggagcatcgacagctgtactgcaaccgcgagcaactgacggagattgtgttttcgccggtccgtaaacccggcgagagctggactgaacgtctgcagtggctcctgatgacggacggattcgggttctgcagtccgctgtcccgtgacgcggccgaccgggcgctggctatcctggccggctacacggggcgggaggtggcggagcatctggtcacagtgatggtgtgggacgacgccggcgcgggaaagagggcatga

SEQ ID NO: 200219 - DNA, 378 bp, Klebsiella oxytoca
atgaaaacagtgatatgggttgtggtgtatctcgtggtatccattctggtctttacaggatggctgatctgtttttcacagcatgctccgctgaacgggcctgagcatgatttgacactaacgtatctgcttaatttattttatgtttatgttttgatggaacccttctaccagttctttcagattgacacatatattattgcatttatgacgctgtcagatgacaccgaacagatgatacctttttataaagagatccctgtcatgtggatatacagcctgtccgcagtcttaacttttgtgatttacctcgtatccgtcaaatggttttttcgtaaaacagtacaaagaaaattacaggcaggagaaaaggaatga

SEQ ID NO: 200220 - DNA, 189 bp, Klebsiella oxytoca
atgatatttagcgtgttaggaaatatcgtgtttgcatcaggttgcactgctctggcagtttctttgatgagaaggaaagtgggaagattcagtgaggtccgtatccccaggccagtcatgattatcgctctggcgtatggcgcaattcagtctgcttattttgcaatggcctctctgattacatcatga

SEQ ID NO: 200221 - DNA, 216 bp, Klebsiella oxytoca
atgaagatccctctggatatctaccaggttatttttgagcataacctgacgcgggggctgattgaagaaatggtcagaggctcccgggttctcggttttgatggttttgtaggctacgaaattgaccggcattatgctgagggccaacgaaaaagcagggaaattattgcattattaaatccggggttcattacccggccagaatggctggcgtga

SEQ ID NO: 200222 - DNA, 402 bp, Klebsiella oxytoca
atgagcttatatgaaaaaaaatggttccatggtacgaatgaaaaatttgaagcgtggtcttttccccctcccagaaaaaaaggcaatgaaagactgcaggtaccgcatacagcagtatttctgacatctgaaaaagactatgcacagggcgcaggacagcacttgtgcactgttaattttattaagaccccaaaactgattgatactgtcaataactatgagttcagcgaacagttacgcgtacaggtaatgaaaaatccgtggatggcccgttcgctgaatatcaacaaaactttctggcatgaaggatggaagacaggggatgttctgagatttacctatcaggatgaatttctggccagtgaactcgacagaagcatgagagaccaggcaaaaaaatga

SEQ ID NO: 200223 - DNA, 198 bp, Klebsiella oxytoca
atgaatgtctgcatggtaggttatggaatgatgggaacctggcattccgaaagtttgaagaaccatgattgcgttctgcatactttggttggccataacgcagagatagtcttaatactagtttttagactagtcattggagaacagatgattgatgtcttagggccggagaaacgcagacggcgtactacacagtga

SEQ ID NO: 200224 - DNA, 1404 bp, Klebsiella oxytoca
atggctatggatttatggaagctggcagcagtcgagattgccagtctcgtcagagcaaaagaggtttccgctgtagaagtagcaactgacgctcttgagcggatgtctgaagtaaacggacgagtgaatgcagttatagcaagcaattcagatcgcgtgctcgcctcagcccgtcaggtagacataaaaattgccaagggagaagatcctggctttatggcaggggtaacggtaaccattaaagataatattgatcagattggctacgctaccaccaatggccttaggtcacgtacagactggtttgccagtgacaataaccccatcattgataatcttgaaaaaaatggcgcgataattattggccgcaccaacgttcccgcatactgcttccgctggtttactgacaataatctttacggcacaacgtggaatccccataaccgtaagctgacgcctggcggctcttcaggcggcgcagccgccgcagtagctacaggtatgggttcgatcgcacatggtagcgatattgctggctcaattcgctatccggcctacgcgtgcggaattcacgggcttaaacccgggctgggtcgtgttccgacattcaacactacggtaaccgaacgaaacattggcgttcagttgatggctgttcatggtccacttgcgcgaagcgtaagtgatctgcgtctggcctataacgcgatgtcgcaatacgatgcacgtgatgtatggtgggtacccgctccttttgaaggcaaagcattaccccgtcgcgcggcactttgcctcgctccaggtggtatgcaacctgctcaggaaattaaagatgcactgctgaaagcagctaaagcactcgtttcggcaggctgggaagttgaagaggttagtgacttaccacccagccagcaagcggttgaagatcaaatccggctctggttcggcgacgggttcaatactaccctgactgctgcaatagaagaaggcgatgccggagcaatagcggctctgcaggggcagaagcaattactggaaagcatgagccagaacgacttcagcggtgcactgacaaaccgggccagcgttttacgcaagtggcagcatttccttgataactatagcgtaatcctcgcccctgtttcatctgaactcccgtttgctcagttacttgatacccgggatgctgaatcttaccagcgcgtgtggaatgctcagcttacccagatcgttatcccctatcttggccttcccgctttgacgttaagcatgccattcgacaatgcaacgccggtcggcattcagctgattgcaaatcgcttccgcgaagatgtttgtcttgcagtggcagaggaactggaatcgttgcttgagattaacatcaaacccgtcaatccggtttga

SEQ ID NO: 200225 - DNA, 831 bp, Klebsiella oxytoca
gtgtttgaaccgggagtttctcaggaaggctaccgcgctcttgatgtcggactctctcaacagtactcgataatcgacagactgagggcgcagtacccggtagcttcattgtgccggctgttcggtgttcaccgcagcagttatcgctacacacgtaaaaacagcactgagcctgatgctgaccgtgtcgttaaacgcagtctggtcagtgaagtctggaatgccagtggaggttctgccggcgccagaagtatcgccatgatggtcagtgctaagggcgtaaaactcggccgatggctggccgggcgactgatgaaggaactgggcatcgccagttgtcagataccggcacataaatacaaacgcggaggcaatgagcatgttgaaatcccgaacctgcttgcccggcagtttactgtcacagaaccagaccaggtctggtgtggcgatgtgacctacatctggacgggaaaacggtgggcttatctggccgtggtgctggatctgttcgcccgtaaaccggtgggctgggcgttatcgtattcaccggactcagacctcaccataaaagcacttcagatggcatgggagctacggggacggccatcaggcgtgatgttccacagcgatcaggggagtcactataccagccgtaagtataggcagatgttgtggcgatggcggatcacacagagtatgagccgccggggaaactgttgggataacagcccgatggagcggttcttccggagcctgaagagtgaatgggtaccaaagacgggctacgaaagcttcggggaggcacggtcgtccataatccggtatatctga

SEQ ID NO: 200226 - DNA, 363 bp, Klebsiella oxytoca
gtgacagccccggcactggcgctgttcgtggcctttgtcggcctgtcattcaatgcctcggtttccgggtattttctgctggcggcacatgagcttgtcgacggggcaccgcccggtacggtgaatacgcaggtctgcgagccgcccgccgcactggatggtggtgaagtccagacgctgacggaggcttacccgcccctctgcaacaatctccagaaagatgaccgggtatggcagcgcgacacagaccgcagccttcgtacgctgtatctgctgacgtccctgctcgggctgggtgtctggctggtcctgaacccggtcagcagtctctggagcagtctgttccggcgaagggtcgattaa

SEQ ID NO: 200227 - DNA, 399 bp, Klebsiella oxytoca
atgctcaggtacatgctggacaccaacatctgcattttcaccatcaaaaataaaccggaagccgtcagggtgaagttcaaccttcaccgccagcggctttgcatcagcaccatcacgctgatggagttgatatatggcgcggagaaaagcagcgcaccggaacgcaatctggccgtggtggaaggcttcgccgcccgcctgaccgtcctggattacgatgcgcacgccgccacgcacaccgggcaaatccgcgctgaacaggcaaaagccggtcagcccattggtccatacgaccagatgattgccggtcatgcccgcagtcagggcctcattgttgtcaccaacaatatgagggagttttcccgcgtgtccggccttcggtccgaagactggatttaa

SEQ ID NO: 200228 - DNA, 228 bp, Klebsiella oxytoca
atggaaacgacagtatttttaagtaaccggagtcaggccgtgcgcctgccaaaagcagtcgcactgccggatgatgtaaaacatgttgagattgtggccgttggccggagccgcatcatttcacccgcaggtgagtcctgggatgcgtggtttgatggcgacgcggtgacgtcagactttatgtcaacacgcgagcagcccgacacacagatacgggaagacttctga

SEQ ID NO: 200229 - DNA, 372 bp, Klebsiella oxytoca
gtggatatgtcaacgggacagccattatcgatgacacaggaagagatgattgcacgctatatcagccacgtgccggcgaagcattgtaagatggtgcgtgactacggttttttgtcaaaccggaaacggggccagctgctgccaaaagtctatgaagccctgcagatggaggtgaggaaaaaaccagagcagccgggcttcgccgcgctgatgaaggcatttctgcgcacagacccgtacaaatgcatcctgtgcggtaaccggctgcgttttgtcagcgcagaagcgggcaggcatgcttcggtgttagtggccgaaaggctgcataacatcgaccggaaacgatggcttctggggcagactgcaggataa

SEQ ID NO: 200230 - DNA, 1812 bp, Klebsiella oxytoca
atgaatcacttgaaaacggcattagagataatcaagcaggtcggtggtgctgagaatatcgagcatattggacactgttctacccgcttaagattgagcttatatgacaacagtaaagtgaatgaagctgcactttcaaacaccgatggcgtgctaggcgtacgcctcaatgtgcagtgccaagtcattattggtcatgaagtcgtacaagttttcgaagcggtgcagtcactggttggcccacaacaacctagtgagcaaaagagttctgccaaagaaagccaaggtgcacgcattgttgattttgttatcagcgtcttccagccattagttcctgccatcgccggcggtggtgtactcaaatcactgttactgttaatggatgccatcggctggatgagccgtgacagttctacttataaagtcttggataatatcggtaccgccccgctctattttctgccgattctggtcgcgatcaccacggcgatgaaattaaaggtcaatatactggtggcggtgtcagcggcttcggtaatgatattaccgacaatgactaaacaattggccgaaggggcaacgtttatgtcattcgatttggtcaatgttgcctacgcctctcaggtatttcccgcgatcctatgcgtacttttatatgccctgacagagaagttctttaatcgctattcaccgggcgcattacgcattttcctctcccccatgctttctctgctggtaacagtacctattactttactgatcttagggccgttaggttctgaattaggtaccgggctggcaacccttattctctggctatacggtaaattaggctttgtcgcgacaggcctatttgctgcggcactgccatttatggtcgccgccggcatgcataaaccgatgctaccttatgcggttgcctccatgagccagtttggcaaagaaatgctctaccttcccgcctcactggcacacaatattgccgagtccggtgcttgcatggcgattgcgctaagaagtaaagacaaagtgatgaagtccaccgctttttcggccggaatttctgccctttttggtatcactgaacccgcactttacggcgtcacgctactccataaaaaagccttatatagcgtcattatcggcggcgtgattggcggcgcatttattggttgggttgggcttgaggcctttgcattagtgggaccaggccttgcgagtatctcgatgtttgtctcgccagaaaacccactgaatattctctgggcctttgccggtgccggactttccttcttggtctcatttatctgcgcgctactactgtggcgtgacaaagtcagtgaaaaaagcgctgaactcaatttcgctcggcccattgaaggaaaaatcatcccacttgaaaccgttaacgacgatgtattttcacgcaaaattatgggggatggtatcgcaatcattccttctcaaggagtgttacgcgccccggcggatggcaccattgtcagtgtcttcgatagcgggcatgcgctcggtctgctgactgacagcggcgtggagctgatttttcatatcggtatcgacaccatcaaactgcaaggagaaggctttagtccgaaggtcacggaaggacaacaggttaaatgcggtgacactttgattgaattttcaattgataccattaccgcggtcggtctcgatccggtggtggtgatggtagttaccaacggtgaacgcttcactctgcttcctgttaatcagaacgaaaaaaatcctaatcctcatatcatcatgacacttaaggagtccatgtaa

SEQ ID NO: 200231 - DNA, 1464 bp, Klebsiella oxytoca
atggcaaaacaatcctcatttccgcaaggctttttatggggcggggcgattgccgccaatcaggcagaaggagcatggaatgtcgacggtaaagggccatccgttgccgatgctatcacctggaaacccaatttatcgttgaaggattacagcgggcatatggctctgaccgatgaaaatatccaagatgcctttagcggtaaaaatgatgcattttatccgaagcgtcgcggtatcgatttttatcatcactataaagacgatatcgccttatttgctgaaatgggttttaaagtgctcagggtatccatcgcttggtcgcgtatctttccaaccggagaagatgcaacccctaacgaagctggcctgcaattttatgaagatatgttcagcgaattgcgccgtcataatattgaaccactcgtcaccctttcacattatgaaatgccgctggcgctcagcgaaaaatataatggctgggtgcatcgcaatgtgatggatgcttttgtgcgttttagcaatgtctgttttgacagatataaagacttagttcgttactggctaactttcaacgagatagatagtatccatcgccatccatttaccaccgctggcattcgagaagagaaaagtgaacccggtaaagcaacacaagatatttaccaaggactacaccatcaatttgttgcctctgctctagtgacccgtgattgccacgcgaaaattcccggtagccaagtaggatgcatgctgaccaagcttacgacttacccacacagctgccgcccagaagatatagaagcgacattaaagaagaacttagaaaactacttctacgccgatgtacaagtgtttggtgaatatccgccgctgatcctacgcgatctcgctagacgaaatattcatatcacgatggctgccgaagataagcaaatattaaaagactataccgtcgattttgtctccttcagctactacatgtcgctgaccgaatcgacccaacctgatgtagagcgcattcctggtaacaccgtgcttggtgttagaaatccctacttaccggcatccgaatggggctggcaaattgaccctattggactaaaaatctcgttacttgagctttatgatcgttaccagaaacccttatttatcgtcgaaaatggtttaggtgcgaaagatgttgtggaaaacgataagatccacgacagttaccgtatcgactattttcgtagccactttgaacaaacgctggcagccattaatgaaggtgttgaggtgatgggctttaccacttggggatgcattgatctcatcagtgccggcacatcacaaatgtctaagcgctacggcttcatctatgtcgatcaagatgacgaagggcacggaacattaaaacgccttaaaaaagactccttctggtggtaccagaaagtgatcggcaataatggttcagacatgagctag

SEQ ID NO: 200232 - DNA, 837 bp, Klebsiella oxytoca
gtgataacgataaaaaaatcactcaacaacagtatgctgttagtggataacgaccaacaagagatgattctttttggtaaagggattggctttaacgccaagccggggacgaatatcgatttagctcaggtagagaaaatttttctgccgctaagcaatatcaaaggccgtcattttctatcgcttacggacactattccttcggagtttttcgatatcagccatgaaattctggtgctcgcgcgcagcatttgtggggacaaactcaattcgctgttacttctaacccttgccgaacaccttcattttgccgtcgaacgcagccgtaagagccagactattctgaataaattaagttgggaagttaaacgctattatcctcaagaatacggcattggccaacaggctcgcgctaaggtcaatgagagatttaaggtcgaactccccgaagatgaatcggtgaatattgcctttcatcttatcagtgctagcagccaagagagcgacagttccgcccatcaacaagttgaattagttaaccgactcgccgccattgttcactataaattgggtaagaataccgataccgaatcagttaattacatacgctttatcaatcatttaagatatttttcagagcgggtactggcgggtaaaatcgtgatgagcgagacagaagatttttatcaggaattgatgcgctaccgtccagatgccatgaatgtcgcttggggtattcgcgattacgtgcaggacaaatatcaactgtcgttaccgaaagatgaactaacatggctcagtattcatattagtcgcttaatagataagcagtcctga

SEQ ID NO: 200233 - DNA, 1224 bp, Klebsiella oxytoca
atgaaaaatcatgctgtaaacggccaggttgctccttccgtggagatggtcagatcacgcggtgcgctgataaaggcgcttctgtctcttgctatgggtggatttgcaattggtacgggcgaatttgtcatcatggggctgcttcccgacgcggcacatgggctcggcgtatccattccttctgccggacatctgataagtatttatgcactgggtgttgtggttggtgcgcctgttctggccgtcgccggggcaaggctgtcccgaaaaactttcctcattatcctgatggctatgtttgctgcgggtaacctgatgagcgcatgggccccggactacgaactgatgctgctgatgcggttcattgccggtattccccacgggaccttcttcggtgttgccgcactgctggcagcagagctggtagagcgttccagaagggctcaggccgtttcaatggtgcttcttggactgacggtcgccaaccttcttggcgtcccggctgtgaccgccatcggtcagtctgtcggctggcgtacggcatttgctattgtgggtgcgctggcggtgctgactatattaatgatttatgcatgggtaccgtggaaggcaggagataaaactgcgagtccgcttcgcgaactttcagcgattacacgaaaacaggttcttctgactctggccattgggtcaatcggtaatgggggcatgtttgcggttttcagttacgtaaaacccaccatgcttgaactcgcagggcattctgcggcaatgatccctgtaatactgtccatgttcggactgggtatggtcgcgggtaacgtcatcggtggaagaatggctgacaagaatctagaaaaaaccattcgttacctgctgctgtggtccattctgataatgtgcgtgtatgtctttacctctcactacgcatggcccggggccatcaccgtaatgttgataggcacgatggtttccctctcttccgttttgcaaatacgactgatggatgtcgccggagatgcacagacgatggctgcagcgctaaatcactcggcgtttaacactgctaacgctctgggagcctggctcgggggcctgaccatcacggccggactgggctggtcgtcaaccggctgggttggtgctatcctggccttggctgggttaggtttgcatttatgggccgtttcggataccagaaaatcggaacgcattgcctgttga

SEQ ID NO: 200234 - DNA, 759 bp, Klebsiella oxytoca
atgcttaatcaggaaagacaggatgagatcctgaaacgcctcagcgttcgtggtcgtgtaatagccgctgagctggccagagagtttggcgtatctgaaaacgccataagacgtgatctcaggcaaatggccgaacagggtctttgcaggagggtttatggcggggccttactgcctgctcctgacgcaggaaatattcagatcagggcggggaactttgttgaaaacaaacaaagaatgtctcagtgcatcactaaataccttaaaaatggtcagaccatttttattgatgccagctcaaccaacatagccatcgcagcgggccttcccagagacgtatccctcaccgtcgtgacaaacgccccggccgtcgctatcgccttatcagagcacacgctgtgcaaaactatggtgcttggcggcatatttaatgcgattaagggtgcctgtcttggaagccagaccgtggaccaggcccgtcagattttgccggatattctcatcctgggtgcctgtggggtggatgttacgcttggtataacggcacttgagccggaagaggcagagctgaagcgttgtcttatgcagcaaagctcaagagtgattgtgccggtcaccctcaataaaattggtacagcagcgcctttccgtttgtctgatatctctgatatcgacgtacttatcgtccctgagggactcagcaatgaaaccctggaacaattcgttctgacgggtatcagtgtcgaaatagcagactag

SEQ ID NO: 200235 - DNA, 1182 bp, Klebsiella oxytoca
atgaagtctcagacgtcctcagggacccttctgaatacaacagataactttgccatcactattctctcgcttgctgcgtttgtaattgtgacaactgaatttgtcattataggccttatgccattaatggcaggggatctgggcatatccatccctgtagcaggacaacttgtcacggcatttgctgtgactgtggtgtttgccggtcccccgctgacggcgtatttttcccgtgttgagaaacgggcactttttatgtggatactggttgcgttcagtgccagcaatgctgccgttgctctcgcgcctggctactggacaattcttgcggccaggctgattccggccgctcttcttccggttttctggggaattggaagtgatgtcgccggaaaaatagtttccgcagacaaagcggggaaagccatttctcaggtctatctgggcgtaaccggtgcactgttatttgggttaccgctggggacacttctgggggacgcagcaggatggcggggaaccttctggtttttagccgttctgtcagctgcaatggcatttcttctcagagcggcgatgccaatcattcccggagaaagtaacgtcagtgtgatgacgcaggtcagaatgcttaacaaccggtactttattgccaaccttatactttcgcttgccgtttttaccggcatgtttggcgcttatacctatcttgcagacatgctacaaagccatgccggaattgagggtacttatatcggttggtggctgatgggctttggcacggtaggcctgataggtaattaccttgccggtcgttatgttgaccgccatccggatgcagccggtgtcatttcctgcgttatgctgggaacaggggcagtagcttcagtacttctgactaaatcagcggtatttttcattttctccctcgttttatggggtatagcacataccgcgctctttccgctcgggcaaatcagggtgatgaaagcggcccggggcggaaaggcacttgccggcacgcttaatatttcggcctgtaacagcggcattgcgctgggggctattctgggcggctgggcaatagatcttggggggatcggtgctgcgattaccggtgcgagtctcctgatgttcttatgtgcagcagcatatccttggattagacgtcttgatgccggctga

SEQ ID NO: 200236 - DNA, 630 bp, Klebsiella oxytoca
atggatcaatatgttcaggaaggctttaaagcctcagaaggttcttcatggtcatacgatgcgcagacaggctcactgtctgtatcggccctgccggaaagcgatatttatatcgatccctcgtgcagtaatccggactcaatgatcaaggcaaggcatgatgctgtgacgatgatgaccccctgcccgcagggcgactttcagtttagcgctaccgtagaagtggacttcagggatacgttcgatgccggtgtgttacttctgcgcgcgaatgaaaaaacctgggcaaaattgtgttatgaaatttcacctgatggtaaacccatggtggtttctgtggtgaacaagggagctacatctgatgatgctaacgcatttgttgttaccgctccccgggtttccctccgtatttcacgacgtgacaatatctacgcatttcatgcctcgctggaatcaggaaagtggatatttatccgcgcattttcatttgatgatgcactcgataatgattcagaagagatgacggtaggttttgaagctcagtcacccaacggcaggggatgtctggttaaatttgaagatatttcattttccaggagcacactgaacctgctgcgtgacgggaattaa

SEQ ID NO: 200237 - DNA, 1071 bp, Klebsiella oxytoca
gtgagggaaattattttagaactgagtgaggaagacagccggaactacagggaatggctgcttatgcgggaggactggtatttcccgttccctgaacgctacagcgatttaacgttttcaggttgtaaaatcacatccggacaatccgaagcgatccctctttttacccgtaacattctcccgctcacagcttatctgctaaaaaaaaatcccaccccagaactgcatcgctgtgcagttattctcatgatgaagtcctgttatgctgctttcagaaatgcgccccccgtgatccactccggacgcctgaagacatttctgaacgtgatggcagatatttacagttttgcgtatgcccgtggaatgaagatagatgaccagaactgtcttcatgtttttaaaattaaaagctgggatgaagcgccagagataagtaagcatgtcgcggacattaccgatttcatcagttcagcccgaactggaaatctgctccatgccttaccccaggcgctgcatttactcggcaggattaatgcaacagaattgacaacggttatatcaggtaaatatctgactgaattgttgccggtagtttctgtttcaatgaaatactgccctgaagattatgacgatacaacatcacatttacatcagtccagatatgcagagcatcagttcaaaagcggggagataactataagtgtaacggcaataacatttcccttaaatccgttcagtgaggtttatcaggccattgatacagaagtctgtatcacacactatggcagcggattttacttcgggtggcccgttttacgtgagcttgtgacggcagccgcctttttatgtgcggaaacaaaagtaaatcacaacagcaattacaggggaaaggaagtattcacgaatttcaatgctgaaggtaaaaactttaatttaaccatagcatcattcactattcagatggacataattactttcagacagttcatatccggattaaattcatttttcgaaatgacggagttaaaaattattctggaacaggtcagtcatcacctcggtaattactga

SEQ ID NO: 200238 - DNA, 411 bp, Klebsiella oxytoca
atgaagaatacctatatgctcgacacctgtatctgctcgttcatcatgcgcgagcagccggaagccgtgctgaagcgcctggagcaggcggtgctgcgcggtcaccgcatcgtggtctcggccatcacctgggccgagctgtcacaggcagcgaaggagtccggtcccggcacgcagaatctggctgacgccttcgccgcacgcctcgatgccgtcctgccctgggactgcgccgcggtggatgcgaccacggatatcaaggtcgcgctgcgcatggccgggacgccgatcggcccgaacgacacggcgattgccgggcacgccatcgccgccggcgccgtgctggtgacggggaaggggggagagtttgagcgggtgccgggcctggcactggaagactgggttaaatag

SEQ ID NO: 200239 - DNA, 2211 bp, Klebsiella oxytoca
atggctcaactcaggatccggggcgtcagaagctacgcgcctgacagggatatctgctttgatctcagcagtaaggtgacactcatctatggccagaacggctcaggaaaatccacggtatcaggctatttctatgaccggcaggcggataaataccggcactgcgcttttgagagcccgcacgtcagccactttcaggtctttaatcaggaatacattgacagtaagttcacccgttctgactatcagcccgggatcttcaccctcagcgaggccaatcaggaaagccaggacaaaataaacagtaataataaagaaagcgcaaaactgagtgcccggacagataagctgaatgaggagatcgccgagaaggaagggatgaaggaaacggtcactgaccgctgtgccagagatattttcaaccggacagtcaatgataggaaaatcctcagcgatttcctggatggcgctaaaattaaacgatcgttttacgaacgtatggtggcaacaccgctgtcggaggttagcaccacggctgaggcgctggcggataaatggcggatgttaagtcagagcgaaggaacgcttgtcgccgaaattcatattcccacgacaactgttttaacggaagacaccctgatactgatgcaggaacccgtgatgcctgcaagcagtacgcaattctctgctctcattcagaagatcggtaatgctgactgggtgcgccagggacagcagtatatacatgacgatatctgcccgttctgccagcagtctctggatgtaacggccttttcgcgcgaactgattcagatgtttgatgagtcataccagacgtctctcggggcgcttagccaggccgcagaacgacttgctcaggactgtgatgccctggccgaatttgaacgccgtgttacgacccatgctttcgttgatgaggacagtcagattttaagcctggtgaaaacggtcaataaaggcttccggatcctgttacagcagctccttactaaaattaaagagccttccctgcaggtacaacccgagaacgtccaagatcccctggtgcagctccagaaggaagtggacgttttcaatattcgggtacgggaaaacaaccgtcttgctgaaaacttcggtcaggaaaaacagaacctgtatgcggaagttatggcgcacctcaggggaatttgtgaggagttctttgccgggcgtgaccggcagcttggcgaactgcagaacgaaatcgaaaccagattgcgtgaagtcggcgccctggctgcgagtaagaaaacactggatgatgagacgaacaggctgaccggacagctctccgacatccagccaacaattaacagtatcaatgcgaatctcaggctgctggggatcaccggctttgaaatcatctgccatgatgctgagatgaaactgtaccgtcttcgccggggaagcgagccagaaaaggcggaagtcttcaaatccctcagtgagggtgagaaaacaatggttgcttttctctatttcatcgaatcgtgttcgggcagtcttaccccggaaactatccatccggaaaataaactcattgtgattgatgacccgatttccagcctgtcacataactatatctatgaagttgcagcgctcattaagcgaaagataattaaggccgctgcagcgagacatgtggttatactgacgcataatatgtttttcttccaggagatgctgctgaacagcggccgcctgcaggatggcaggaatgcgccagcaaactggtcgctgtttcgcatcatcaagtcggattacagttcctgcgaaacgctttccatgcacgaaatgctcaatgaatatcaggcgttatggcagaccctgaaagatgtcagggatgcgaaaacccagcccgtggtgttgttcaatacgatgaggaatattctggagtattatttcagctttgcctgcaaaaatgaaaagcttaaggaggccctggagtctctggctacggaacacagcgatgccggagaatacgattcattttaccgggccatcaaccgccactcgcattcggacggcagaaatcttttctccaccggcatcatcgataaggatcgctatctgaacatgttcagaaaagtgtttattcacactgatgaccttgaacactatgttgccatgatgggggaatccgaagaaccgccggaaacagaggcgtaa

SEQ ID NO: 200240 - DNA, 201 bp, Klebsiella oxytoca
atgtgcgtgatcagaactctcaggatgcaagttatccgcttcaatgaaatgacgagtgaacttgccagtaaggaaggtgaaggtgatttaagtctggagtattggaatgaaggtcataagcgttattttgagcgtgaaggcacttattctgaagaaatggaacttatatttgaggaatttgaacttacagagattttgtaa

SEQ ID NO: 200241 - DNA, 903 bp, Klebsiella oxytoca
gtggattccattgatatcaaacacatgcgtgtatttctactgctggttaaagaactcaatgcctcaagggtggcttcaaagctggatatctctcagcaggcggtcagtgcatatcttaaaagactgagaacttatttcggaaccgagctgtttgtacgcaggagtgcaggacttgagccgaccgactatgccctttctcttgtgcctaaaatagaaaaaattctagatgaggttagccagcttcgttcaccccaggtatttaatccgaacattcaggacttcagcatatgcataatggcaaacgaatatgctcaacttactatcatcccatccttactgaagacactacatatgcaggcaccgcgggccagcgttgaaatcaaagacttcaattccaggcaccacgttgaaagtcttaattccggcgatgtcgatctggtactgggtttttcgaatcatattgatcccggactgatacgcaaaaacatccggcgtgaagagtactgctgtgtggtcagacacggctcagctattccgggaaaacttgaaatgaaaatgtccttttcagacattcctgccgttaaatttgctccgagtgccggtaatattgaaaatctggttgatgatttttttaacaaagccggaatgaaaaataatgtcatcgctacgttaccgtgttatacgacgctcggcgcttttttcactgcgaatgacgccattgctttcattccatcagcgataggagcgcagggaaattactgtaaactggagatgccagaaaaaatggtcccgtttgatgttactgtcgcctggcatcggaaaagtaatgataatccgctccgagtatggttgaccaaaatactggaaatgacgactatttccggggacacgaattgtgtttaa

SEQ ID NO: 200242 - DNA, 609 bp, Klebsiella oxytoca
atgaaaactgtaattctgattggtgctcaggggaagatgggtaaagcggcgctgaccggtttgggggatcacaaagttattaccgccagtcgctcaggaaaaggtacggactatcaggtagatattaccagccatgaatctctgagagctcttttcaaaagcgtcggcgcatttgatgctgttgttaacgcagttggtcactgcgagtatgccagttttgtcgatatgacggctgagcagtgggagcttactgtccagagcaaaatgctgggtcagatcaatgttgttaaaataggccttgagtacatcaacgaccgcggctcattcactttaatttccggcattcataatgtgaaacctatccccggctctattgctgatgcgacaaccagcggtgctatcgacacatttgtacagtgtgtggctaacgaactaccacgcggcatccgtatcaatgtagtgaacccaactgtactggaagaagcctgggatgtttacggccctatgctgccagggttccagccagttccgggcaaactggtcggaaaagcgttccagcgttctgttgacggatttatcaacggtaaagttctctttgtcgatgcctaa

SEQ ID NO: 200243 - DNA, 1182 bp, Klebsiella oxytoca
atgccaatagcactcttcgctttgacaatcagcgcttatgctatcgggacagctgaatttgtccttgttggaatcattcccatcatttcagctgatttatcagtttcagtaccgtcagcgggtctgcttgtcagtctctatgcgctgggggtggcagtaggtgcacctcttttaactgcagccacaggaaaaatgtcccgcaaaacgcttcttctgtgcctgatggtcgtttttactcttagcaatttgtatgcctggcaagctcccgggttcgtttcgctgattgtggcgaggatcatcaccggcatggcacacggcgtgttctattccattgcttcaaccatcgctgccagccttgttccaaaagataaagccacgagtgcaatagctatcatgttcgccgggctgaccgttgctctggtcaccggtgttcccctggggactttcatcgctcagcaccttggctggagagccacatttttgtcagtgtctgttctcgggatgatcgcctttgcaggcagcttgttactgatccctcgcggcataaaaaaatctgaacccgcgccagtaagatttctactcagggttctgacaaacccccaactgatactggcatattccctgacagcggtcgggtacgggggatcgtttataacgtttacctaccttgcctctactcttgaggaaatatccggattttcacccgctgctgtaagcggtgtcatgctggtatacggttttgcagctgcactgggtaatctgtatggcggacggatctctgacaaacacggccctattaatgccctgaaaattatatttttattactgtccctggtgttgttcgctttatatctgacagcatctaattcatggctgatgctggtcactacatttgtctggggtgctgctgcatttgcaaacgtccctgtactgcaatatctggctgtcaggcaggctgagaaattcgttcctgaagctgtggatgtggcatcaggtctgaatatatcggccttcaatattggtatcgccggcggaacctggataggtggcctggtcgtaatgcatttaggtctcctgcataccacttggcttgccggtgcagttgttttcttagctttcctgctcagtattttcgcgggagcgctagaaaaaagggaaagaagcactgaagctgcgtactga

SEQ ID NO: 200244 - DNA, 897 bp, Klebsiella oxytoca
atgaaaacaactttagcagaaatgcagatatttattgctgttatagaaacagggacattatcacgagctgcgtatgagctggatcttaccgtatcagctgttagcagagcgcttcgacgactggaggagaaattagataccgtactggtcagacgctcaacgcggagactggaatccactgaagaaggaaggacattcctggaatatgccaaacaaatcattgcttcagtagaggatgcagaagaacatgtcaccatgaaacgtcgtcatccatccgggaagattcggatcattgcgtccacgtctcttgtactgcacgtcattacaccggttctgcatcgatatcagaaatgctatcctgagatagaaattgaaataatttcaaatgacaatgtttatgatttgcttgaacacagaagtgatgttgctgtttgcatcggaaaactcaaagactccggcttacatgcgaagatacttgggctgtgccagatgatgtttgttgcctctccgcgatacattgcagagcatggtatgcctcatcgagttgatgcattaaaaagccacaggctgataggttacaaacaaaactccttaatgaatgactggcctctggatacgggcgaagaacactattataaaattcagccatccattgtcgcttcaaacagtgagattataagacagctggccattcactcgtcgggtattgcttgcctgccagaaccgtatgtaaaaaatgatattacaaagggtgatcttgtcaatcttaatataaaagagaaactgcgtgtccgcgaaccactcaatgcggtttattataaaaacattgttcttccatcaagaacctcatcatttgtagagttcctcgcggaaagtttagtgttgccctcggaataa

SEQ ID NO: 200245 - DNA, 444 bp, Klebsiella oxytoca
atgatacaaaacccgctgctgccggtgtcggagtggggctggaccattgacccgacgggaatgcgcatcctgttaaacatgctgtgggatcgctatcagaagccgctgttcattgccggaaacggactgggtgccagagacaagcttaacgaggatatgaccgtcaatgatgattaccgtattaattacatcaataatcacctgtatcaggtttatgaagcaatcgaggatggcgtcgaagttatgggctttacagcatgggcccccatcgatctggtcagtaacgccaccgcagagttagataagcgttacggctttatctacgttgaccatgatgacagcggtgatggcgattatgcaagatatccaaaggatagtttttactggtttcgggatgtcattactacgaacggggaaaccctgatccctttccggtgtcgttga

SEQ ID NO: 200246 - DNA, 918 bp, Klebsiella oxytoca
atgttaaataaaagggaattacgtcaacaaaaattcagggaagcaggaactcctgcactcgcgagaaagatcaaaagcagcagagcatggctaaatgttcagcaaatgctaaagcgcagtggcaaagtgtgtgtcccgggtttgttttctggtacggaaaaaacaggcccgaataatttcaattttgcggatgtggtacatctgtatcagctctatgccgtcgttgagagatttaaggctgaatccagtggcgtcattgagctggagatatgtgccctgccgagagtaaggcaaccctggccacacaattttgctattgttccaaagttcatcagacgaaaagctgatgccttcatgcaacgtgatgagtatgtccgacagtttcccgtaagtaacactcctggagagtttaaaggaagtctctatgccgctctgcgaaattcgtgtggtgacaggcaaaaacttgacatcgctcttgctgaactttttcctgatgagctaaaaccagtgcatccgaaaacgcttcatccaggggtaaacctcaatagccagcccgctcctgtctttacacttttgtggcttgagtgcaacagactgggctttcatcaagaatcagacaggattcgtaatctgataaaatatattcgtgatgcatgtgggcaggagagaatagctaaagcattattttttgcctttatgtactacagtgacaaggaagatttatttactgctttcttttcagataactgggaaaacagaaaagaaatatacaatagcgttgaagccaaaaataattacattgaagagcaatttttaaatcaacagaaaaaaatatcagaatacatcagtgatatagacaagcgttttctatcgaatgcatataaaagattgttaaaaaaggatgacaataagcaatag

SEQ ID NO: 200247 - DNA, 903 bp, Klebsiella oxytoca
atgtcggtgacggaaaaaacaggaaaagactcaaattatcgaaatgctaatgaagagatatccagccgaaaacggcgctttgtccagaagaaaaggatagagagttttatatctggcaagacaacggaacccctaaaacgagaatcatttcaggataattcagaagtgaaccttcttgactggattaaaggagaacgtgctattttttttgcctgggtttacgttaaatgtgctacctgcgatattctgggtatcaaatttccagagcttggactagatggcagcccttataagacactttctctcccagagaaccctgttaccagcaaagaaagattatcaattattcagcgttggttttgtgagatagaaaaaagtgttgattttcgttcagcatgcgaaataatgcttcagatgcgcacagaatggctttatattcaagagaatatcaatcctgtaaactggataagaaaaacggatgtacatacacgatggttatggggacgtcttaaaaaagatgaactcttcacagatggcttcctttcctggtttaaccccgcaaatcctagtgagcgtttacttgcgattaatgccgcgattgacttttttacgcccagtcaaactttagatgttcaaaaatttaccagacttaaaaacaacttcgtctctcgtgaaaaaagaaattacaacgcacacactgcttttaaagctaaaaaaacatgtcaggtaagtgtggatttatctccggatgcgaaaatcatgctggataaacttgtcaagtcaggtggtaaaactcagagcgcgacaatcgaatggttaatccgtgacaggtggacgacaactagctcagttcaagatgtaagtgaacagcaggagacaaattctcgattcggtaatgattaa

SEQ ID NO: 200248 - DNA, 630 bp, Klebsiella oxytoca
gtgtccgttaattactcttaccatccgccatacatcgcacgtattctgcaaacagtcaactctgcagtcagcattcattcccagttggcctgtttctttgtcacgttaagatttccactaaacggaacaggtcgtgatgatgataaagcaatttcacgttttattgatgccctgaaataccagattaacgcctacattgattacaagcgttcggaaggtaaacgtgtgcatccgactatgctgcattatatctgggcacgagagtttggtccccgcaatggaaacaaacattaccacgtcgttctgatgttcaataaaaacacgtttcatcagttgggtaattacacccttcctgattcagggcctggaacgcttgcaaatttaatccagagatcatggtgtagtgcaattaaattacccattgaattgtacgcaaaccttgccagttttccatctgacttcccctgtatgtggattgaaaataacaacactttccagcgtacggatgcggaacagcggatgttttatctggctaagcgctattccaaatgcaatggtgatgataaacactccttcgaatgcagtcagttcagaccctcgttgctgaatggtcgtaaaagccgcctataa

SEQ ID NO: 200249 - DNA, 234 bp, Klebsiella oxytoca
atgaataccaaaaacagtatgacgactaccgcaacaatactgaacgcagatgatccactaatcgatatggtttttatcaccacatacacgaacatgactgacaaatttttcttcaaactcattaaaaacggacaatttccgaaacctgtcaaacttggacgtagcagtcgctggcgtaaaagtgaagttgaagcctggatgcaggatcgcgtggcggaatcccgccctcgctaa

SEQ ID NO: 200250 - DNA, 306 bp, Klebsiella oxytoca
atgaaacagccggagaacacgatcacggtaaaggtggcggaataccgtttatacatcacccgaatgaagatctgccgggatagcttgtttgggtattgcaatgatgccgagcggcgtggctggcgcctgagagcccttgagcagttaagtaaagcctcactgctctactgccaacgggcaagttctgctgatacctgcaagtttcaacaggcctgtgaaggtctccagcaacacatctgcagagttttaccagaaggccagtggtgcggtgatttgtttgggcaggggatgcaggcaaaattttga

SEQ ID NO: 200251 - DNA, 138 bp, Klebsiella oxytoca
atgactgcgaaagatcagtttgctgctcatgttggtctggactgggcggataaaaaacacgatgtctgcgttcagtttaaaaacgatgatcgcatatttcatgtgattgaacatacgtctgaggcgcttgatatctga

SEQ ID NO: 200252 - DNA, 1080 bp, Klebsiella oxytoca
atgaaagacaggattgctattgccgttgagctgaagaaaggcccggtggtctatgccctccagaagtacccatttgtcactgtttttccattacacgccttgtcccaggcccgctaccgacaggctttctggcccagcggtgcgaagtatgatccgcaggatgctgagctggcattagaccttatgctacgttatccccacaagataaaagccattgaagccgacaatccggatatccgattactccagcaattagttgagcagcgccgactgctggtcgaagacaagcgtcgctttgttaatcggctcatcaacacacttaagcagtattacccacagcccctggaatggttctcccatcgggacagctcactgttctgtgagctaatcattcgctggccgagcctgcaacaactcaaacgggctcgcagcgatactgtccgtcattttatgaacactaaaagtggtcctgctgttgcatatacccaacagcgggttgtaagtattgccagcgctattcccctgaccacagataaaactgtcatcgaggcaaatgcattgatggcaacagcacttacatcccaaatcaaactggcaggcaatctaatcagaacctacgacgaacgtattgaatccttattcgatgagcttccggatgcagaactgttcaaatcactccctgaaatgggaccgtgtatgggcccacggatgcttgccgcactgggtgataaccgtgaccgcttcaacagcgcagaagaaattcaaaactacgctggcatcgcaccagtaaccgagcgaagtggtcaaaaatcctgggtacactggcgttggcagtgcgcaaagttcgtccgacagacattcgtggaatggactgcgaagacggttaactcatcgtactgggccagactttattaccagggccagcgagaaaaagggaaatcgcatcaatcagctatccgggctctggcgtttaaatggataaggatcatttaccgttgttggaagaccaaaacccggtacgacgaagcgaaatacttgctggcactggaagcgcggaagtcgcccttactgaagccataa

SEQ ID NO: 200253 - DNA, 2070 bp, Klebsiella oxytoca
atgaaacagtatgaaattgcagttgatgtgggtggtacattcaccgatctcgtgcttcagcaaacgggtaaacgtgctgaactttttaaaacgctgactacaccagatgaattatcagccggtattctcaacggtatctctcaaatcgcaaatttcctgaagttgtctaaccgtgagcttttggagcaatgtcgtgccttttcctgcggcacaactgctgccaccaacgccattcttgaaggtaaaacagcaaaaacggtgctgctctgcacagagggcttccgtgatattctgactatccgtgagggtggccgaaaaaatggttacagcctgaaggaagaattccccgccccttacgttccgcgtgaactgacatttggtattcgcgagcgtattaacagtgaaggtgacgtggaaatcatgctggacgaagaacaggcaaagcgcgtcattgaagaggtaaagcgcgtttcacctgaagcgatcgccgtttctctgctctggtctgttgctaacccaaaccatgagctaaaagtgaaagcgctgttcgaagacgcttttccgggtataccgttgagcctgtctcatcaggtgaacgctgtggtgggcgaatatcgccgcacttcagcaacctgtatagacgcatcactgaagccggtattacgcactcaaatcagtaatctggaaaagatgctgagtaaagaaggttttacaggaatgccgacatttatttgttcaaatggcggtcggacgtcctcttatgaaatcacgcagaagcctgtgtatctgagcctttcaggcccctctactgcacctgaagcggctctgcaccttgccagagaagccgggattggagatggcaatattattactgtcgacctcggcggtaccagtatagatgcctgcatcgttcacaaaaacaacgttgccatgcaccgtgagggctcgattgccggtcattcatttggtgtaccgtctgtagatattgcgacagtaggtgccggtggtggctccattgcctatgtagacagaggaggaatgctacacgtagggcctgaaagtgctgggtcattccccggaccagcttgctatggtcgtggcggaaagcgtcctacactgaccgatgcaaaccttgtcagaggactgctgaatgcggaaacttttgccaacggtcagattaaactttctcgcgagaaatcgattgcggccgttgaagagtatgtcgctataccgctgggcatttccgttgaaaaagcggcaacactgatagccatggtcgctgagcagaatatggtgtctgctattgaggatctcgccatacggcgtggacatgacccgcgtgagtttactctggtatctggtggggcggccggtgggttacactcagccagtattgcgaaagaattgggtctgaaacgcgtactggttccgagagtatccagcgttctttgtgcttacgggacagcaacgggaccgattaaatttgatttcacccggagcttctttacctcagacaagcattttgatttgaaccgcgtaaacgacgtgctccagagtctaaaagaggatggacttgccttcctcaaccgcatggatattccagccagtgagcacatactcattttctctgctgaggcacgttaccagggacagatttcattgttatctgtcaggctgaatggcgattccctcaagggtttttcagccgtagaagcgctggtcagcgcatttcatcgccagcatcagaatcagtatgaggtgtgcgccccggatgatactgtcgaatttgttgcatggagcgttgaagctcttggaaaacaacgtcacagcgatatcgattgcgcttacctgcaaaatgttaaagatgctgaagtattcgaaacgacgatggggtgtattgatctcaccggcaagccagtggagttgaactgttaccgaacgagccatatcagtaccggcgatcttataaaaggtcccgcgctggttcaggacagtctgacgaccattctggtgccggctgacagcaaagcagtggtcactcctgaaggcggtgtgctgattacgctgtag

SEQ ID NO: 200254 - DNA, 1797 bp, Klebsiella oxytoca
atgtccgataaaagccccatgggtgaacttgatatgtttgagctggtcgtgctgcgtcgccggtttgagtctgttattcgagctatgtccacggcacttgcgaaaacaggacgctctggcgtccttaacaccgcacttgacttctcatgtactgtaaccgatcgtcagttccagtccgtcagcgccgggcagggcctgccggttcacaccggcgctattcatcttattccggaagctgtagttaataagttcactgaggaagcgttgcggccgggtgactgctttgccaataacagtagttatatggggaatacgcactgtgcagacctgacactgtgtactcctgttttttatgacggtgagctggtcttttactcgattgcacgtgctcacttcagtgacatgggattcccgacgcccgatacctatgcgccactggcggcggattattatgccgaaggcctgttccttccctgtatccgcattcaaaaggaaggcaaagatgtagccgaagtcatcgatatctgccgcgcaaatattcgtgcaccagagcagttctatggcgattaccttgccacactctcggcggtacgaaccggcgaacgcatggttaaagaaatttgtgaagagttcggtctggcaaaagttaagctgttcctgcgtgaatatcaggattatgcggagacaatggcacgtaatgccatcgaacagcttccttcgggcgaagtgacaaaagaaacgctccatgattcggttctggctgactatccggatggcattcccgtacgtgccacaatcaaggtaaagcctgaacaagggcgtattaccgttgatttgcgagacaacatcgacaatatcccgcttggtatcaatatgaacgaagcgacggtgcttgcctgctcaatgacggccatcatgaatatcctgggccaggaagttcctcgctgctctggcgcttttcgctgtattgaggtgctgatgagggacggttctgcaatcgggaaacctcgcttcccggcagctacgtcagcctcaacaactaaccttgcgcatgtgctgattgaacatattcagtccatgttctcggaactgcgccccgatctgggatcagcgtatgcaaccatcggccaccccgcctctgcacctggcgtcagtggttatgactctcgacatcaggggcgcatgtttgtaaaccagatcatgctcggttactggggcggtccggcttctccgggctatgacggatggctgacttttggcagcggaaccacccaaggaatgttatggcagtcgagcattgaacatgtcgaaacccagcaaccggttctggtcgaaaaactggagattcgccctgattcttcagggcccggagagtggattggcggtggtggtgcatcctgtgtaatgcgcgcgcgaagcgatgtcctgcgttttacctgcaacagtggagcacgaacgttccctccaatgggcgtggctggcggaaaagccggagcacctaacctggcctggcgtgaagcgacagatggcacgcgaactgaactgcctatcttcttcgacattgaaatccggccgggagaaaaactggtttctgaaggctgcggaggcggtggatttggcgatcctctgcgacgtgatcccggtaaagtacttgagcatgttcgtgcgggattaatcagcccagaaaaagcagacgaaaactacggtgtcgttttgaccagcagagacaatggtttcgacgtggataccgctgcgacagaaatcaaacgttcaaagatgactacggcagctcagtga

SEQ ID NO: 200255 - DNA, 981 bp, Klebsiella oxytoca
gtgaataaactcattatggcttcaattgctgcggctttgtgctgcgtatctaacgctcatgcagaagtgacaaaagttattggtctttcatggaactctaaagagaacgaaatcgttaataaatgggaagagtacatgaaatctgaagctgaccgtcagggagcagcggcgggaattaaatacaaatggattattaacgtagctgataatgacccaacgcgtcaggctgcaaatattgaagatctgattaaccagggcgtggatgtcattattgcgcgtggcgaagatgcagcagcaatcgggtcatccatacgtgcggcaaagagagcgcatattcccttcatttcgtttgaccatggttcgaccaccacccagcccgatgcatatgtgagtggtaacagctatgaccagggaaaaaccacggcggaagctttcgtcgcgttaatgaagaaaaacaacattaaagggcaatgtattgagcttcaagggccactgaaggatgtgaatgccgttcagcgctcaaaagcatggcatgacattacggataaatcaggtgtcgtatcaacattacagactgtgccaaccgaatggaacccacagctgttccgttccggcaccgtgaatgctttccgcgctcacccggaagcaaactgtatgttccttggcagtgattttgcctttaccgccgttaaatctgctctggaaagtctgaacaaatggcacccagaaggccagcttgaccacatctggattgcatctcaggacctgtttcctgatgccgtcaaagcgatggaaggcaaatatatcgatgtagcgactacctatgatgcttatgcacatgcgaaagaagccattcgcgtggcgattgccttaacagagaaaaaggatccggcctgtagcgcagaaggttgtcttgctccgggccgtgtcgctacacctgaaaacgtagaaaaactcgatcatctctggtcgcgtcagtaa

SEQ ID NO: 200256 - DNA, 969 bp, Klebsiella oxytoca
atgaaatttggcttagtaaatattaaatctcttggttttagcgcagcagtcattgttatgtttgtagggtttggcatagcagcacctaactttgctacaccgggtaatgtcttttctatgctacacaccatggcgccgttgacgattgcgtcgtgtggcattgccctggttattcttaccggaaaaattgatatctccattggctccgtttcttttttatcggcgtcgatcgcaggtttgttgatggagcaacttcatctgccatggggactggcgatgccagtaatcatgctcagcgcagctttgatgggagcggtaaacgggtttctgatcgccatcctgaaaatcgattcgctcatcgctacgctcggaacaatgatcattttccggggcattgcactgatgctgacgaattcacgagttatcgccttacctgatgatgctcagtttctgagcaactggtcgattgggtatttttcactcgacaccttcatcatgataattgccctgattgccatccacgcactgcacaaagcgacccgactcggtcggtacatcaatgccgttggggataacgaagaggtggctaagaaagtgggtatcaatactcaaaagacaatattaattacttacattttatcaggtttattagcaggcttttcttcactgtgtagtttcattcaggtgggatctatcagtggatttctggggaaaggactggaatttaatgcaatcgccgttgcggttgttggaggattaagtcttgcgggcgggaaagggaaaatatttcccggcatttttatcggcgcaatagcatttcagattatctctaacggcttgaatcagatcagcgccaatccatatatttatcaaattgtcactggaggtgttatttttattgccatgctaattgattcaaacaacagttcaggtctcattactcgatttaccgttaaaaaacgcacttag

SEQ ID NO: 200257 - DNA, 1509 bp, Klebsiella oxytoca
atgagcgaaaaattccagctagaaatgacaaatataaagaaaagttttggtgcggtgaaagctatcgagagtggttctttattcgttcggcggggggaagtgcatgccctgatgggagctaatggtgcaggcaaaagcaccatgatgaatatcattggcggaatttttcctcatgacagtggcgatattattgtgaagggtcgcgaggttatttttcgcaatccgaaagacgcgatcgcgcacggcatcgcctttgtgcatcaggaactgacgatgtttcctacgcttaatgtcgctgaaaacatatttatcgacgattaccccaagaaagggaaattcatcaataaggcaaagatacatgaggaatccagcagactgttaaagcgtgtgggctgtcatatcgacacccatgagctggttgagcagttcagtaccggcacccggcaacttatcgaaattgcccgtgcgctgaaaatggagcctgacattgtcatttttgatgagcccacttcctcgctgtctgcagcagagcggaaacatcttttccgcgttatcaagacgctgaagcaggccggcactgccatcatctacatcagccatttcatggatgaagtgtttgagataagcgacaccgtgactgttatgcgtaatggcgtgacggtcagcagcatgcctgtagggcagacaactattacacatacactggggctgatgctgggcagtgttggtgaaagtgaaagggttcgtccgccttgtcatttctccggtactccggttgttcaggtggagggcctgaaccgctctggcgtgctacgcaacatcaacatgtcacttcgccctggcgagatcgttggcctttgggggcttctcggttcaggacgcactgaactggtccgttcactcatgggtctcgatcccattgatggtggaaagcttctttttagtcagaacggaagcctgcaacgcatcaaaccttcgcagttaagaaagtttaccgggctcgtcacagaggatcgtcgtggtgaggggctgattttgccgttcagcattgaagacaacatgacgcttccatttggcaaacaattctccggcaaattttccttatttgaccggcgcaaaatcagcgaaaccgcagataaatttattgagcgattgaaaatcaaatgccactcagcaagccagcctgtagagaaactttcgggtggtaatcagcaaaaggttgtctttgctcgttggttaattgaaacactgcctttttttatccttgatgagcccacacgcggactggatgtcggtgccaagggtgaaattatgaaactgattgttgaactggccgaatgcggcgtcgcaatactcatcatctcttcagaacctgaagaaattatgcgcgtgtcagatcgctactatgtcatccagcgaggagaaatcaccggcgaactgcctggtgacagcagccgtgacaggctgatggagtctctgtctgttcagcaagttgcagaagaggtctga

SEQ ID NO: 200258 - DNA, 966 bp, Klebsiella oxytoca
atgcaagcaatagatcagaaaagaaacaagaatgtcggaagccttgcgctgttaggggttttattggttttcatagctgtcatattggtattgatggctgttcatagcccaacatttttcaggctgaataacctcattaacgttctggtacagacttcaattatcggaattcttgctattggcatgtgcgtcgtcatgttaggcgggggtatagatttatccatgccttcagtcgttgcctttagtggaatagttggtgcactcgttatgcgtgattcacaaaacatctacttaggagctgtagcaatgctgttctgtggcgcatgttttgggggcttgaatggttttgcggttgcctggcttaagatggcaccgttcgtggtcacgctggcaagcatgaccattctgggtggcgcatccgtctggataacaaaatcagccagtattaccggctatccctatgagttcgaggatctcttcctgacagattttgcagggattcctgtgtccgtctggatttttttcttactcatcatcatcagcgcattgatgtgtagcagcatgccatttggacgcgcggttaaagccataggctttaacccaaaggctgcgttcatctcccgcttaccggtaaataaaatcctttgtttgacctatgtagtttccggtgcgatggcagggatcactgccattctattagttgccaggcttgggtccgcttctgcaaatctggcaagtgacagcctattactggacgtgataagtgcctgcgtcattggccgggtaagtatttatggtggcataggcaaccctcttaatgccgcgattggcgctctgttcgtcacccttatcagcaatgttatgaaccagtttggtgtttcttattacgcaagcctggttatcaaaggtttcatcattatcgccttcgtttatcttgataaagccatcaggaagcagcaatcatga

SEQ ID NO: 200259 - DNA, 540 bp, Klebsiella oxytoca
atggcactgtcacagatcagcgttcgcattgatgaagaactcaaacaacgcacggatgaaacaatgaaactgctgggaacaaaccccacgcaggccattactttgctctatcagtatattgctgaaaacggaaaactcccctttacggtcaggtcccggctttttagctcagaggaatacactcggaggttaatcaccactgcccgatctgtgtttgaatactggcgtgtgcttactgaaacatcgtcaacacccagaacgaaaaatggaatggcgtactcaatgacgatcgcaggacatatttcaacgctgcataacgatctgatatatgactgcggtaccctgagcggtgaagaggtcgcgtcattgatggacgttatggaggccattctctctactcctccgtctttttataacggagaagcgggaggccaggaattgcaggataaagtacacgccgccgaccagacaattctgacgattcagaaaaatcatggtatggaagttcagcgtcgggaagattttgactttctcaaatga

SEQ ID NO: 200260 - DNA, 843 bp, Klebsiella oxytoca
atgaacgggattagttggaaaggctcaaataagcaagttgaaaaacaattggtggcacaatttgaaagtctagggatagattattcaaatcccggtttttatgatgatcctaatttcttgaggcaggaaaaaaaggacccacgctttctcgaaaaatatgctttgtatgtagagtctaaacattatgaggatgagtacttagaaagggcgaagaaatctataataatttgtgctgaatccttacataaggctattaagaaagatggaagacttggagcttgtgttgacgtgtctagtatgctgagtcgaatgctggaagaattgggtatttggagttatgtaaccaattcagcggttaagattgatttccctcagtcatcaaaaattgagcccatctggttttggtcaccctccgatggaagtgggatggcagcagcacatgccattgttgttgcaccaccttttgcaatcgtagatttaaccatcaaaatgcaaccgtaccaaccaggagtcaataggtatcttccagaaatagcattggttacagattatactaacggtcaatgggaacctgaagacgttattgagcatgacaccctaaatatgtacggtttaagcggtgatgctgctcgtaaagctattcagagccaactaaggccaatgtatgaagtgatgaatacattcccgtgccggatagcaacatttggagaaacccatattaagtatacaaccattgctatcggaggttcattagaacctctgagcgggatcttaggctataaacctaatggccaaactgcactagagatttttcaaaatgatattattcctcgattaagttga

SEQ ID NO: 200261 - DNA, 423 bp, Klebsiella oxytoca; identical to SEQ ID NO: 94181

SEQ ID NO: 200262 - DNA, 1014 bp, Klebsiella oxytoca
atgacaactttcattgatatttcacatatgcagcaactggtcagaaaaaccggcgtgcagcaattcattactgaacttacggggtttattgaggatgattatcggtcctggccttattttcagaaatgcccacgtgtcgcaaatcattcagcgctgggcgttattgaactgatgccaactgccagtaaaagcctctatggatttaaatacgttaacgggcatccgtcgaacgcggataaaaataatttgacggttatggcatttggggcactcgcagaaatagacacaggttaccctttgctgttaagtgaacttacgctagctactgcgttacgtactgctgccacatcagtactggccgcaaaatatcttgcgccacatcatgttagaaccatggcagtgattgggaacggtgcacaaagcgaattccagattctggcattccacacgttgctcggcattaatcacttccgtctttacgatatcgatcccagagcttccgaaaaactaaaaaataatcttacagagtatcaggcgattcatctacacatatccgattcggtggcagaagcagttcaaggcgtggatattatcaccacgatcactgcggacaaaaagaatgccaccattatcacgcccggtatgatatccgacaatgtatatataaatgctgtcggtggtgactgccccggtaaaacggaaattcatcccgatgtcattaaccgtgccagagtagtggttgaatatgagcctcaaagcagaattgaaggtgaaattcaaaatatgccagccagtttcgctgttaccgaactctggaaaattattaacggtaatgttaataatagtgatttccagcacgggctgactgttttcgattcagtgggatttgccatcgaagatttttccaccctgcgctatatcaggcatctgtctgaaaaatatcgtattggtgaaaaaatcgagttagtgccacagcctgccgatcctcgtgatttgttcagttgtatcaaataa

SEQ ID NO: 200263 - DNA, 918 bp, Klebsiella oxytoca; identical to SEQ ID NO: 170462

SEQ ID NO: 200264 - DNA, 1239 bp, Klebsiella oxytoca
atgtcccagcatgcgaatgcggtacaccgcgaagattttgacagatatatggttccggtatattcccctgccccgttcattcccgtacgcgggcaaggctcccgtgtatgggaccagaacggaaaagagtatatcgatttcgctggcggtatcgcggtgaatgcactcgggcatgctcatcctcagttgctggcgactctgcaaacccaggcggccagcgtctgtcatctgggcaatggctacaccaacgagccagtgttgcggctggcgaaacagctgattgacgccacctttgccgacaaggcgttcttctgcaactccggtgcggaagccaacgaagctgcgctgaaactggcgcggaaagtggcctgcgatagcggtgtgccgaacaaaacccgcattctggcgttctgcaacgccttccacggccgtacgctgtttaccgtcagcgtgggcggtcagccgaaatacgcgaaagacttctcgccgctgccgggcggcatcgagcatgtaccgttcaacgatctggccgcagctgcagcagcgatcgacgaccagacctgtgccgtgatcgtcgagccgattcagggcgaaggcggcgtgctgcctgcggacacggctttcctgcaagggctgcgtaagttgtgtgaccgccacggtgcgctgctgatttttgatgaggtacagaccggcgtcggccgcaccggcgcgctgtacgcttatatggaatacggcgtcacaccagatattttgaccagcgccaaagcactgggcggcggatttccgatcggtgccatgctcaccaccgatcggtttgcccccgctttcagcgcaggcacacatggtactacctggggtggtaaccccttagccagcgccgttgccggtacggtactggcgttgattaatactcctgaggtgctggacggcgtggccctacgccaccactggtttatcgaaggattacaagagattaacgccagattcccgctgttcagcgagatccgcggccgtggattactgatcggctgcgtgatggatcaggccttcgccggtcaggctaaacggctcaccagctatgccgcagaagagggattgatggcgctaatcgccgggtccgaagtggtgcgttttgccccctcgctgatcatccccgaggccgatgtgcgtgaggggctggcccggtttgcccacgccgcggaacgcctcgccgccgcaaccgggagtgatgcacgatga

SEQ ID NO: 200265 - DNA, 1038 bp, Klebsiella oxytoca
atgatggttattcgtcccgttgagtcccgcgatctgcctgccctgatggcactggccggcaaagccggtgtcggactcacttccctgccgcaaaatgaagatattctggccgggcgcatcactcgttctcaggaaacctggcagggcctgcgcccccgtggtgaacagggttacctgtttgtgctggaagacacagatagcggccgtgtcgtgggcatcagtgccctcgaagttgccgtggggttacacgaaccctggtacaacttccgggttgcgccacttgtgcacgccagcacctcactgaacgtgtacagttcgcatcaaacattatttctcagtaatgaccatacaggttgtacagaattatgcacgctgtatctcgacccggagtggcggcatagccataacggcaaattactctccaaagtacggtttctgtttcttgccgcgttccgcgactgcttcgcccagcgcgtagtggcggaaatgcgcggctacagtgacagcaacggacgctcaccgttctgggaggggctcggcaaccgattttttgccatggacttcgcccacgccgactacctgaccggtatcggccagaaagcatttatcgccgagctgatgccccggtatccgttgtatatcgattttctccccgaagaagccagagccgtgattggggaggttcacccggatactgttccggcccgccgactgctggagaccgaagggctgcgccaccgcggttacgtggacatctttgacggcggcgccacgcttgaggcggaactggacgaactgcgggtagtaaaagaaagccgcaaagtcacggtgtcgaccaacgaagcgccagtatcgacacctgactccacgctgctggtcgccaatgatcgctacctcaactatcgcgcgacgttagcacccggccatttttctcccgaaggcgttctgtacctgacgccgtccacagcggatgcgctggaaatcaagacaggcgatcgcgttcgggtggtttccctcaatccgctggagaacctgtaa

SEQ ID NO: 200266 - DNA, 1500 bp, Klebsiella oxytoca
atgttgcatccttcactctatatcgcaggtcagtggcggcatggccgcagtgctgaatttatcaagaccgatccgctggataaccagccgctgtggcggggccgggcggcggatgcggcagacatcgccgacgcctgtgatgcggcgcgcacggcgttccccgtgtgggcgcggctgacgctggggcagcgcacggctgtggttgagcgtttcgccacgttgctggaacaacacaaggcgcaactggcggaagtcatcagccgcgaaaccagcaagccgcgctgggaaacgctgactgaagtgcagtcgatgatcggcaaggttgacatctcgctacgcgcccttgagcagcgcaccggcgacagccataccccgatgaccgacggcgcggccacgctgcggcatcgtccgcacggagtactggcggtgtttggcccctacaatttccccggacacctgcctaacggccacatcgtccccgcactactggcgggtaactgcgtggtgttcaaaccaagcgagctgacgccgttcaccgctgaagagacagttaagctgtggcaacaagccggactgccgaagggcgtgctgaatctggtgcagggaggacgggacactggcgtggcgctggccgccagcccggcgatcgacggcctgttgttcaccggcagcgccggtaccggctaccagctgcaccgccaactggccggtcagccggaaaaaattctggcgctggagatgggcggcaacaacgcactgattatcgatgaggttaccgacgtgaacgcggcggtcaacctgactatccagtccgcctttatctccgccgggcagcgttgcacctgtgcccgtcgtctgctggtcaagcacggcgcggcgggcgacgcattcctgcaacggctggtcaccgtggcgggtcgcctgcgcgctggtcgctgggacgcggagccgcagccgtttatgggcggggtaatttccgcgcaagcggcggaacgcatgatggcggtacagcaggcactgctggaactgggcgcgacgccgctgctggcgatgacccggccggaggataacaacgcgctgctgatgccgggcatcctcgatatcaccggcgtcgatggcgtgccggacgaagagtatttcggtccgctgacctgcgtgacgcgctatgacgagttcgatgatgcgctgcgtctcgccaaccacactcgcttcgggctggctgtagggctggtgtcgccagaccgggcgctgttcgaccgcctgctgatggaagcgcgcgccggaatcgtcaactggaacaagccgttgaccggcgcatcgagcgccgcgccgttcggcggagtgggggcctcgggcaaccatcgcgccagcgccttctacgccgccgactactgcgcctggccgatggcctcgctggaaagcgcagcgctgacgctgcccgccaccttgccgccagggctcaaccttaatgatgcgcagagcgggaacagagaagcatga

SEQ ID NO: 200267 - DNA, 990 bp, Klebsiella oxytoca
atgatgaataattttttagatctgacgcttcgtggcatggtaccggacgttcgcagtgagggtggaaaagacttatcctggcactggcggggggaaggaatactggagctggttccccataccggttaccagcgcgctatcgtgctgtcggcaggtatccacggcaatgaaaccgccccggtagaactgcttgcagcgatagtagatgacctgctggcgggtagattaccgcttgccgctcgtctgctggtactgtacggcaatccaccggccatccgcgccggacaacgctacctgactcacgatctcaaccgcctgttctccagccgtcatcatcaatatcctggtggggaagagtcggcacgcgcccaggagctggagcagaccgtgaccgacttcttcacccgggacagcgatagcgacaacatcgaacgctggcacttcgatcttcacaccacccgacatgcttcacacctgccgcgcttcggcctgctgccttttcagacccgccacggcagcgcggccttgcttagggcactggatgctgccggtctggatgcgctggtccaacataccgaaccgggtgccaccttcagccatttcaccagtgaacagctacgggcagacagttgcacgcttgagctagggggcgcccggcgctttggcgagaacgatctcagctcgtttggtgcggtggatagcatgttgcgcgccctgatcggagacgcgccgttgccggttcgtgctggcaaccccatgcgttatttcagggtaaaccggtcgctgattaaacacagcgagctcttgtgttttcatctggacgctgacgttccgaacttcaccccactcacggccggcaccctgatcggcgagctgccaggagaatgctggcgggtggaacacggcaccgaatggatactgtttcccaatcccaacgtcaccgtcggactacgcgccggtttactgctggcagaggaaaccgggacataa

SEQ ID NO: 200268 - DNA, 687 bp, Klebsiella oxytoca
atgctgcatggttttggtgtactaattttccagggggcgctaaccagcctggagctcgccctgagttctgctgtactggcggtggcgatcggtatgctgggcgctgccggaaagctgtcgaaaaacgtttcagtggtaaaactgacgtcggcctacactaccctgataaggggcgtgccggatctggtccttatgctgctgatcttttatggacttcagattgcttttaacaaattcaccgaggtcttcgggctgagccagatggacatcgatccaatggtggccggcattttgacactggcctttatctacggggcttacttcattgaaaccttccgcggcgcttttatggccgtaccctgggggcagcttgaggcagcggatgcctttggcttcgccaggaggcagcgttttcaatacattctgtttccggcgatgatgcgctacgcactgcccggcatcggcaataactggcaggtcatgatcaaagccactgccctggtgtcactgctcggtctggaagacctggtgaaagccactcaactggccgggaaaagtacctggcagccgttttacttcgcactggtctgcgccgcggtatacctgttcttcaccacattatccaatgtcgtgttgtggtggctggaacgacgttacaccgtgggcgtgaagagggccgcattatga

SEQ ID NO: 200269 - DNA, 717 bp, Klebsiella oxytoca; identical to SEQ ID NO: 170468

SEQ ID NO: 200270 - DNA, 774 bp, Klebsiella oxytoca; identical to SEQ ID NO: 170469

SEQ ID NO: 200271 - DNA, 786 bp, Klebsiella oxytoca; identical to SEQ ID NO: 94171

SEQ ID NO: 200272 - DNA, 1080 bp, Klebsiella oxytoca
atgaaaacagcaaccgcagtcataagccgttgtgccttacgccacaacctgcagcaggtgcgacgtctggcgccacacagtcgattaatcgccgtaataaaagctaacgcatacggccacggtgccctggcaaccgccctcgccctgaaggatgctgacggttacggtgtcgcccgcctgtcggaagcgcttgtgctgcgccaggaaggcatcaccaaacccattctgctgctggaaggattcttatccaaagacgagcttcctttgctggccgagaatcactttgaaaccgtcgtgcataatattgaacagcttttcgcacttgaacagaccgttctgccccaccccattacggtgtggatgaagctggataccggcatgcatcgattgggcatccgtccagacttggctgaggaattctatcagaggctgtgcaactgccgcaacgtagtgcaaccagtcaacatcatgagtcacctctgccgtgcggacgaacctgaggaagaaaccacacacagtcagctggaatgcttcgacgcattcgtccagtgtaagcccggcgtacaatccatcactgcctctagtggtattcttctgtggccacaggcccatcgcggccaggttcgtcccggtatcatcctgtacggcgtgtcaccgatagtaactcaggatgctgcggacttcggctttgaaccctgcatgacactaacatcctgccttatcgcagtacgcgagcataaggcaggcgaacctgtgggctatggcggtgactggaccagcacgcgcgatacctgcctcggtgtggtagcaatgggctacggcgacggctacccccgcagcgcgccttacggcacacctgtgcttatcaatggccgggaagtaccgttggctggccgggtttccatggacatggtcacggttgatctcggtcccaacgctctggatcaggtgggagataaagtcattttttggggcaaggaactgccggtggaacgcatcgcccgtcataccggtatcggcgctggcgagttgattactcgcctgacacaacgcacagcactcgaatatgttgatgactga

SEQ ID NO: 200273 - DNA, 531 bp, Klebsiella oxytoca
atgtgcaccgattgtcgcggcgatctgcttcggcgtgacgatggtgctctaacgatgatccgactcgcgcagtctctcatcctgcttagcctgctgagtggttgtcacccgttcttcgctgccagcattcaggttgaggcccggcaataccagcgcgagctgacccgcaatgcacgcgctgtctgggggcttaatgccccagtaccatcccttcaacccagcaggcggtctttaattttttgcgaaggccattaccaccgccaggtacggcggaggctgcagatctatcagcgtaatatggagatctacacctgctggctgcaggagtttttcccctgcggcatctgtgttagccgcccgaaaggctgctttatgttatggttcgagctaccggagcaggtggatatggtttgcgtcgcgaagcagttgtgccggctgaagatcttggtcgcgtcaggatcgctgttttcggcatccggggagtatcgagcaactgcgccctgccgccaatcgagaagcataaagagttga

SEQ ID NO: 200274 - DNA, 438 bp, Klebsiella oxytoca
atgatacaaaacccgctgctgccggtgtcggagtggggctggacaattgacccgacgggaatacgcatcctgttaaacatgctgtgggatcgttatcagaagccgctgttcattgtcgaaaacggactgggtgccagagatattcttcaagacgactttacggttgacgacaactaccgtatcgcttatctgaataaccacctgtaccaggtccgggaagctatcgaagatggcgtggatgtgatgggatacacatcatggggccccatcgatctggtcagtaactccaccgcggaattaggtaagcgttacggctttatctacgtcaatcgcgatgatacgggacggggcgatcttaagcgctacagaaaagcgagcttctactggtatgccgatgttataaaaagtaacggtgaaacgctggtgccaaatatctga

SEQ ID NO: 200275 - DNA, 1545 bp, Klebsiella oxytoca
atgaaatttagaaaatcggtgctggctgccggaattctcgtgcccgcactcctgatcacactattgtcatcaggtatggcttatcgacagctggacagggacactgccgtgacggcgggtattctgatgagccaggtcgaccacatcacatccattgccctgcgcgcgaatctggtgactgccaggctttccacgcggccctgtgaaagcgtcctgcagcagatgacggagaacggggccctgacgccctatatccgcagcaccggacttatccgggatggtatattaatctgttcatccgtgaccggtgccaggcagcaaagtgccgatgatattttcggtgttaccgtttcagcccctccgggtcggatgaaagtcatcgctacagaaggaaccagcagcgtgccaggccatgctgcagttatctacgcattcggcgtcggcaaccggaccacggcgttcagtgtggtggatgcacggtatttcgtggacctgatggactccctggatgatgaggatcattcggctcagcagctccgctttaatggcggacccatcatttccggtcaggagaaaaccgccccccgatccaaagtgttcaccgctgagttcagctctgatgtgagtcaggcgcagcttcggatccttaccccgccgctgtcgcttcgccattacatcctgcgcaacctgattttcctcggccccctgtctttgcttctgacgttagccatgctgtacatgtggcgcctctgggataccagaaagatgtctctggcagaagaaatcaggaaagggatggcagatggcgaattcagcgtgcactaccagccgttctgtgacaccgaaactggcatctgctccggcgccgaagccctgatgcgctggcaacgtcccgacggcaggagtatttcaccggaggtatttatccgggccgctgaagaggaaggtctgattatcagtctgacgcagcatttgtttggcctgatagaagaggatgtcagagtctggcaggtgaacgcccctttccatctgggtgtcaatattgcggcccctcacctggcggaccggtcgtttactgctgatgttctgagactgcgggtatctctggacgccgcatttcgcctggtgctggaaattaccgagcgcagcctggttgaggacacagagacggcatcagtgaaacttaatgagctacgtcagaaaggctgtcaggtggccgtggatgattttggtacgggctactgctcactgagcctgcttcagagcctgccggtggattacctgaaaatagacaaaatattcatcgacagcctgacgtcagccgatgtggacacaccggtactggacaccattgtcggcctcagcaggcgactgaaccttaccaccattgcggagggcgtgacgacagcacatcaggttgactggctgattaaaaatcaggtgccgtacgtgcagggatattattatggcaggcccatgcctgccgccgatttttatcgatggtacagtccgctatgcatgcataaggccccgccagggccttag

SEQ ID NO: 200276 - DNA, 642 bp, Klebsiella oxytoca
atgctaaggcgctaccaggcggaagatccgcggtttgagttgcatgacctggacacctacagcgtggctgaccgcctcatcaggcggatgttacaggataatgcagacgataccctggtcttcctgacagaactggcccggaacggccgggcctggtactggatgacagaatatgtgcatcacctgctgtggcaacacgggatggccgggggcatatcgaaagatgaacaggaagagtggatgtcccaggacacattagagacgtttcgggacacgcttggtttcaggctgaacagtacagccatcaccgataaactgccggatttcaccctgctgaacaggtatatccatgcatggtgtgacattagcggagtgcacgccgtacgggaatgggtgacctctcagatccaggaagatgaggcttttctgaagttgcttttacaattgcgggatcatcgcaccaaatcagtaaagagggggtaccgtaccctgaaactggccagcctgaccgaaattctgggggaggaagagctgattaaaatacgtatcaggcatatcaaaaagacaggctattatgcagaactggttgcccaggtcgagcaagccattgcaggattccggtactcacaatccgatcgctaa

SEQ ID NO: 200277 - DNA, 1512 bp, Klebsiella oxytoca
atggctcattcaacagaaccgcagttgtccggaaaacaccccgaccgggccgtcagcacaccggaggaagatcgctacggatttacctacattgccaccgagctagcccgtgccattcaggggatcggacgggagggcagtgccgtagttggtatcgaaggagcctgggggacgggaaaaaccagcctcctgaacctgctgcgcacggcactggatgaacagaaagaagaacggacgtatgtcctgagcatttccccctggcttgacggcagtgatacgtcactggtggcatcacttctgttgccggtcgcaggcatcattgccgaagaagaaaaaaaacggcttacagacgtcgaacgggcagatcttaaagagaaggaaatgctgactgacactacccgcacgctcatggattacacccgagcgaccgcccgaagactggctccgctcgcgcagatcgccgccgtgatacccggggtccccgatgccagcggagccctgaaagccctgtcggattcggactggctgaaaggaaaagaaaaaaccacggcagaaatgcgcgccgaaatcgcaaagaaaatcgcggagctggatctgagtttcatcgtcctgctggacgatcttgaccgtcttgaaccggcgcaggcggtggaggtggtcaggctggtgaaatcggtcgccgattttccccgttttcgctacctgctctgttatgacaaagctgtcctgtcacaggctatcagtcaggggctggggattcctgatggcgacctgtatttacagaaaattgtgcagatctccttcggattgccgcgtccggaaacctttgtgctgcgccggcaattcagggaagaggccatcaggttatacgaaacggtaaacgggcaagccgcagagccagttatgcgggccgctctgacgagcgtcgccgacatttatggtgcagcactaaaaacccccagggaggtccggatagccattaatgcgctggaattccgctatgcgagcatgcgggactatgtttatttcccggatctgtgctttctgcaactgctccgcaccacgaatgtcggcctgtatgactgggtggaagcatacctgtctgaacgggcagtggtggagtccggcgaaggctatgtcagtgaagaagagctgaaagtaatgaccgggagcctgcagactcacctgtcccgatattttcctgactcagcgcataccatcgatgcgctgagtcagtgggttccggggatctctaccggggtgacggacctttccatccacctgttcaggacgggaaacgaacaggaaaaatccttgctgaccgcaggaaggcggctgggtagcctgacgtactggcgatactatttcgccttttcggccccgcaaaacgtcctgcaaccggaggttttcgacaaaatcttcgcggtggcaggtcatccgggaaaacagcaggaactcgccgaattgttgctggggtatatccagaacataaatttatcttccaggacctag

SEQ ID NO: 200278 - DNA, 1095 bp, Klebsiella oxytoca
atgctgagccagctgaccctgcgctttcacaaaaaactcatcgaggcactgaaaattcgtgccggccacgaaaacacctcggtgaatgccctggcggaacgctttctcgacagcgcgctgaaaaccgccgccccggaggacagctatctggcgctgctcgccgatcgcgatgaggccatccgccagatgtaccgcaaaattatgctcggccagaccttcggcctggcgccggtcacccgtgacgaactgcggctgctgctcggcctggcccaggaaggctgtgtccacggccgcaaccggctggtgacccgcccggccctgcagatgctgctggacatcaccggggaactgctggcctggcagacggaacataatatgcctgtcgatctgccgtacctgcagggcatttttcacctgcagggagtagcgccggccgccgaatacacggactttcttgcgacgctgcgtcagcgtccgatcatcgaccagggctacgccgaacggctgctgcgcccgctggcgtcacagtgcttcgatctgcgtaccttcccggaggaggccctggcgcagatcttcatcctgccacgcctgcaggcgcttttcccgctggcgctgcggggcgagtcctggtgcgaggaggatgcgcgccagctggcagaggccactcaccccgtgatcccggcagtcagggagacgatagaagcgggtacactgcggtttgatattcaggtggacggacaggagatcgccccgcggcccggcggctggtatgaagttccgcgcctgcacctgctgatcaccggccaggattttgtcgtcccgttcggctgggcccatttctcggagctgctgggcctgttcaccctgtatgcccgtcatccggacgcactcgcgcatggccaccacggtgagcacgtgatgttctcaccaccgggtaacgcctcaaaggacggcttttttggcctcgacgggctgcggatcttcctgccgccagacgacttcgaaacgctgattcgtgagctggttgcgcgctgcagtgaaggaatcctggctgatgcgctgaatggtctgcgtggcctgtacggagatctgtaa

SEQ ID NO: 200279 - DNA, 330 bp, Klebsiella oxytoca
atgggtaaaccaacatttagatcatttatcgatgtggtcagggagcttgaggatgtatatggccataaagagctatggctgtattcaagaaaggcatatgcaacgccaaaagaaatgattaaagccaaatataactggaaatcgccaaaaatcctgaaacgtaacggaagaatggttgcagaacgaatggataactcggactcatggcaactggttggtgactacaaagatccacagtcacaagattgtgctccgccctggcaatcctgcctgatagataaaccatttatgctcctttacagcatcgtcactagaaagccagaggaataa

SEQ ID NO: 200280 - DNA, 786 bp, Klebsiella oxytoca
atgaccgggcttgttaccttgggaccgcaaccaggaactgcagcgcaactgccggtggctatcgactaccctgccgccctcgccctgcgccaggtggcgctcgtgcaggatgaactcccgaaatacctgctggcgccggaagtcagcgccctgctccattacgtgccggatcttcaccgcaagatgctgctggcaacgctgtggaacaccggcgcgcgcattaatgaagcgctcgcgctgacccggggggatttttcgctggcgccgccgtatccgttcgtgcagctggccacgctcaagcagcgcaccgagaaagcagccagaactgcaggtcgtgcacccgcaggcagtcaggctcatcgcctggttccgctatccgatcaccagtacgtcagccagcttcagatgatggtggccaccctgaaaattccgctggaaagacgaaacaagcgcaccggcagaatggagaaggcgcgcatctgggagattaccgaccgtactgtccgcacctggcttagcgaagcggtggagaccgcagcggccgacggggtgacgttctcagtaccggtgaccccccatacgttccgtcacccctacgcgatgcacatgctgtatgccggcataccactgaaggttttgcagagcctgatgggccacaaatcgattagctcgacggaggtctatacgaaggtgtttgcgctcgatgtcgcggcgcgccatcgtgtgcagttccagatgcctagcgatgaggcggtggcgctgcttaaaggacggtgttgcgattaa

SEQ ID NO: 200281 - DNA, 1203 bp, Klebsiella oxytoca
atgtcccagcccttcgatttcgacaaagcacttaaagccctccagtccggtcaggcattaacgggcagagatggtattttaactccattaatcaagcagttaaccgaggcggccctgtctgctgagcttgactcccatctggctcaggatgtggaagcgaatcgtaaaaatggttccggcaaaaagaccattaaaaccccgacaggcagttttgaactgacaaccccgcgcgatcgtaacggcacttttgagccacagctggtgaagaagcatcagactacgctgtccgacgagatcgaacgcaagatcattcgcctgtttgcgctggggatgagctatcaggatatcagtcgggagattgaagatctttatgccttcagcgtttcaaccgccaccatcagtgcggtaacggacaaagtcatccctgaactaaagcagtggcaacaacgcccgctggagaaggtttaccccttcgtctggctggacgctattcattataaaatccgtgaggatggccgttaccagagcaaggcagtttataccgtgctggcgctgaatctggagggcaaaaaggaagtcctgggcttgtatctgtcggaaagcgaaggggcgaacttttggctgtcggtattaagcgacctacaaaaccgtggcgtggaagatatcctgatcgcctgcgtggatgggttgacaggcttcccggaggcgataaacagcatttatcggcagacagaagttcagttgtgcgtcattcaccagatacgcaattcgattaaatatgtggcgtcaaaacaccacagagcattcatggctgacctgaagccggtgtatggtgcggtgtcaaaagaagcggcagaaacggcgctggatgagctggagacgaaatggggccagcagtatccggtagtcctccagtcatggcgtcgcaaatgggaaaatctgtcagcgtacttccgctatccggcgaacattcgcaaagtgatctacacaaccaatgcgatagaatcagtccatcgccagttcagaaagctgaccaaaaccaaaggtgctttcccgaatgaaaacagcctgttgaagctgctttatctgggtctgatgaatgcccaggagaaatggacaatgccgatccagagctggaatttgacattgtcgcagctggcgatttattttgagggtcgcctcgataaagtaatgacgttgtag

SEQ ID NO: 200282 - DNA, 1875 bp, Klebsiella oxytoca
atgaaatatcagtcacttgctgaatttataattaaccgggtcggcggaccggataatattaaaagtttgacccattgcgcaacaaggcttcgctttcagttaagaaaatatgatgttgttctgaaggatgatttgagcaaccatccagagattattatggtggtagaaagcgggggccaactccaggtggtcgtgggtaatagtgtttctgaagtttataaggctatcgaagctacaggcattacggatgagactgatctagctgcagggagcagcgacgaggaagtcataaaagaaaatatctttaacaggctgattaatgtggtttctgggatttttaccccttttctggggatcctggccgcttccgggattatgaaggggctgctagcccttgctatcgtttgcggaattacgactgagtcgagcggaacctacaaaatactggcggcagctggtgatgccctgttttatttcttccctctcgtgctgggttacactgcaggcaagcgttttggcgggtcgccattcctgtcgatggcgattggcggcgcactgatgcatccggcaatgatagcggcgttcgacgctcagttacagcacggcgcgtcagttgatgccttcctcggaattcccgtcacttatattaattatgccggctcggttattccggtcatatttgctgcctggctcagtagtgtggtggagaaattctgtaataaaattctcccttcagcggtcaaaaacctcttcacccctctgatagcgcttctcatcgtcgttcctgctgcgttcctgcttattggaccgctcgctaccggcctcagccaccttatggcaaatgcttttctggccgcttatgagtttgcgcctgcgttagcgggtacgatcatggggggactgtggcaggtctgcgtcatgtttggtctgcactggggtcttgtccccatcatgatcaacaacatcagcgtgttaggtcatgatattatgcagccattactggtaccggccgtggtaggccagttgggcgcagcgctgggtgtgttcctgagaacccaggatccaaaaatgaaaaccctttcgggttcggcagtcagcgcggccatttttggtattacagaacctgcagtatatggtgttaacctgccaaaccgacggccattcatcttcggctgcacggccggagccataggcgggacaatagtcggggcattccacggtagtatctattctttcggtctgaccagcttcttcactctcgctcagatgatcccacctaccggtatggatatgaccgtgtggggggccataatcggcacggccttatcgctcgtgctttctaccttactgacctatttcttcggtttgccggcatcaaaagaatcgccaagtgctaacccaggtatcgcaccagaaacagcagagatcgttattctctctccgctacaagggaaggttattgatattgccgaaatccgcgatccgacctttgccagtggcctgctgggtaacggagtggggattattccaacctccggtaaagttattgcgccctttgacggagttgtgtcgtcaatatttaattcccgacatgcaatcaacctggtcagtaatgatggtgtggaactgctgatccacgtcgggatcaataccgtaaatctgaaaggtgaaggttttacggcacatgtaaaaacgggtgattcggtaaaagccggtgatctgttgattgaatttgatctcgattttattcaaagcgcaggatgtctgctggacacgccggtattaatcaataacagcgatgaattcagggcagtacatctggcagataaacagactgtttcatatgacacggtgttgatgacaacgattaagtga

SEQ ID NO: 200283 - DNA, 636 bp, Klebsiella oxytoca
atgaaccatctttcacatgacaacattagtctcttacagccgtcagaaggctccgtatggaacattgatgcgctttcccggaagatagtcgttagggcattgccgtacagtgatattttcatcgatccgggaaggggcacaagccaggtaacgtctgcaagccggtgtaatgcagctacacttttacgtccggctcctgacggagactttcaatttcgttcaacggtaaaagtcgaattcggcaacaccttcgatgccggcgtgctgcttctttacgttaacgaaagatcatgggcgaagttgtgctttgaatattcacccgaacgtgaacccatggttgtctctgtggtgaacaacggatatacctccgatgatgccaatgcttttaccgtcagtggacaggaagtacatttacggatctcccgcaaagataatgtatttgccttccatgcttcgctggatggtcaaaaatggatatttgtgcgcgcttttccccttgatgtgctgaacgacgcggaacagattttatacacagggttcgaggcacaagcgcctaacgcctccggatgcgaggtagagttctctgatttctcgctcgtttcagaaaatgttcctgatttccgtagcggaaaatag

SEQ ID NO: 200284 - DNA, 1209 bp, Klebsiella oxytoca
atgaaaagtagtgaagaaatgacatcagggaaaggaaatgagctggcttattcagcagacaatattaagttcacagaactcacggacgcaaagcttgccaccagattggcattctttatcgctggttttgggctcgcctgttgggctcccctggtacccttcgcccaaagccgtatgcaggcggagcccgctcttttgggtgccgtattgttatgtctgggtctgggggcattaatagggatgcctgctgccggtggcatttctgctaaagccggcagccggatggtcatcatcatgggtgctgtgggtattgtggttgctttaccccttcttgccctgctttccacccccctgggaattggtgctgcacttttcttatttggcctttcgattggtgcgactgatgtagcagccaacattcacggttctgaagttcaggatcgggcgggtatgcctttaatgtcaggatttcatggtttttacagcgttggagggcttgccggcgctgtggttatgactttgctgattgccacgggattacacatttttgtggcatcaatgatcgcaatatttacgatactgatatgcctctcggttatcagaaacaggttcctcagaacagttacggttaatgacgcgccattatttgtacttcctaaaggtaaagtgattgtgataggccttctggcgatggtgatgttcctggcggaaggtgcgatgcttgactggggagcattgctcctgattcaggaaaaaagtataccggcaaacatagcaggatcgggatatgttgtctttgcagtggcgatgacattaagccgcttcgtcggtgacaggctcgtctcacttgcaggggagcgctgggtactgactctgggtgtaatatttacggcgattggacttttggttatttcactgtcctcaaccgttgtcatcgtctttggtgcgattgcgataacgggctttgctgccggtaacgtggtgcctattttgttcacgcgtgcaggcaaacaggattcaatggccccctctctggctatctccgctgcaagcatgctgggatatctgggggtgcttatggggcctgctgcggtcgggtttattgcacattatacaggactggccaatgcgttttgtttcctgtccgccctggtcatgctagtttccctgaccatcatctctattttctctgggaaaaaacctctgtaa

SEQ ID NO: 200285 - DNA, 771 bp, Klebsiella oxytoca
atgtctaatatacgccaaaacactatgaatccagatttcgctatctcgcctctggtaggtcagccagaacaatggggggctcatgttcttgaaaagcatactcatgcgcgccaccagttaattttttcctcccggggcgtcattcacatcaaaacacatgtcggcgagtgggttcttccacccagcagggcactctggattgatgccggtactgaacattatgttgaaagcaagaagccagcctcgctctttgttctgtatatttctcccgcttttttttccatggataagcctgaacactgctgcgtggttgaagtgagcaacctggtcagggagctcatcatgacgtgtgcaaaaatggggtggacctatgatgaaaatagtcacagtcaccgactggcagaggtgttggtaggcagtctttcaggtttacagctcgcatcactggaactgatcaagccgaaagatcccagagccatccacttaataaaattactggagcacgacccgggatcacgacggtcgctgcacgacctggccagagaagcaggagctagcggaagaacgatagaacgactttttgctcaagagacaaatcttcccttcggagcctggagacagaggcatcgaatgctgtttgcgctggaacgtctggcttatggccagagtgtcatgaatgtcgcgctggagtcaggctatgagtctgcttcaagctttattgctgctttcaaggcaatgtttggtaccacgccatctaaatatttctcataa

SEQ ID NO: 200286 - DNA, 1341 bp, Klebsiella oxytoca
atgaaaaaatcctcccgaatgtctattgtccatcctcatgctgcgggcgttgatattggcgctgagttccacgttgtcgccgtaccgcctgatgctgacaccgagccagtcaggacttttcaaagttttactggcgatcttcagcggatgtctgactggctcaaaacctgtcacattacgaccattgccatggagtccaccggcgtttactggttgcctgcttttgaaatccttgaagcagctggtttcaaggtgatcctcgttaatgcaagagacgcaaaaaatgttcccggtcgcaagaccgatgtcaacgatgcccagtggttgcagaagctgcattcatttggtcttctccgtgccagtttcagacctgaacacgacatttctgtactcaggtcttatctgaggcaacgggaacgcctgactgaataccgggctgcgcatattcaacatatgcagaaggcgctgatgcagatgaatgtgcaattacatcatgctgtatcggatatcactggcgttaccggtctttcaatcgtcagagctatcgtcagtggtgagcgcgatccttcaatgttgatccagtatcgtgatgtgagatgtaaaaagacgccagaagtacttcggcaggcactgacagggaactggcagcctgaacatctttttgcacttgaacagtcggttgcatttttcgatttttaccaggaaaagatccgcgaatgtgatgatcaaatcgaaacctcattattgcagctcagtaccggaattgaagagccggaaggggtattgccctccgccagacatcgtacaaagcaacccaatcagctttcctttgatgtcagaccattactctggaaaattacaggggcagatctgacacagatacatgggttcggaccttatctggcactaaaattcattgcagaatgcggtactgacatgaaccgctggccggatgcgagccattttacctcgtggctatgtttgtccccaggaaataagatctccggtggaaaagtgctgtcctcgaaaacacggcgttcatccagtcgaattgctgcggcactcagactggcagccacaacaattggccggagcgataccgcgttgggcgcattttatcgtcgattatcatcacgtatcgggaaagcaaaagcagtcactgcaacagcaagaaaactggcaatactgttctacaatgccctgaagtatggtcagaaatatgtcgatcctggcgcagattattatgaagagcgctaccgtagtcgcgtactcgatgggcttaagcgaagagcaaaatcactgggttactctctccagcaggatcctgaattatgtgtttga

SEQ ID NO: 200287 - DNA, 390 bp, Klebsiella oxytoca; identical to SEQ ID NO: 198089

SEQ ID NO: 200288 - DNA, 285 bp, Klebsiella oxytoca
gtggtgttggtcgccacgttctggttggtggcgtacagctggctgccgttcaccgcatcagtactggtgctgctcagcgtcccagccgcgacattagtcaccttcttgctgccggcattcacgccggtggtggtgacgcttggcccgccggtaatggtcagtccggaactgttaatcgtggtggtgccgccgataatcgccgaggtgaagaccgggttctccgccatctgcaccaccaagttaccgttcgcatccaccaccgtgttcaggttcgcgtccgaatag

SEQ ID NO: 200289 - DNA, 390 bp, Klebsiella oxytoca
atgtccacaatgaagcctgatgcagtctggtatcctccgcagtttccgaagcagggacgatggttcacacgccttgtttttatcgctgtggcgatattgttggcaggctgtgacagacccgccagagaagagagtgttagcggcggcggtaccatagaagcgattaaccatacacactgggcgataaatcatttcagcgtagacgggcagtcagggctggatattatcggcccctggcagggcggaggcggtggctgctgttacggcgtgccgacgaaatggaaaccgggaatgacggtgaaagtggaatggcaaaccggagaagcttccacagatgattttccaggatatgaacattgggataaatatctggaatgggaaaaaaaataa

SEQ ID NO: 200290 - DNA, 285 bp, Klebsiella oxytoca
gtggtgttggtcgccacgttctggttggtggcgtacagctggctgccgttgactccgtcggtgctggtgctgctcaacgtccccgccgccacgttggtgactttcttgctgcccgcgttcacgccagtggtggtcacgcttggcccgccggtaatagtcagtccggaactgttaatagtggtggtgccgccgataatcgccgaggtaaaaaccggattctccgccatctgtacgaccagattaccgttcgcgtctactaccgtgttcaggttagcgtccgagtag

SEQ ID NO: 200291 - DNA, 165 bp, Klebsiella oxytoca
atgtcagcatacgatgaaattatgaacgcactcgccttctacttcggcgatggagaaggcctaaacccaagcgaggaaagcatccgtgaaattatcagccaggagcatgacccaattgagacgattgctaaagcgttagacgattaccgcgcatcgaagtcatga

SEQ ID NO: 200292 - DNA, 240 bp, Klebsiella oxytoca
atgttcaggataatccagcctaatacctggtacgccgatccccacggcgcgccctgcaaaatcctccgcgctacccacgaagtaatccactacatccgcaacggccgcacctgcatcgccagcatgggccgctttaatcaggatttcgagccgctgaccaaagcacaggccgagcggatcgccgaagaaatcgaaacagcagaacacctgaagaagctgcgcgcccagcgtgcggcatga

SEQ ID NO: 200293 - DNA, 657 bp, Klebsiella oxytoca
atgatttttaacgccgacatggtgcgcgccattctcgatggccggaaggcgcagacgcggcggatcatgaaggtacagccgtccgatggcttccacccaacacataacggttacggtctggatttaaacgcccactggtacacgcctggcgtggtcgataaaaacggatacctgcagcctgcaaagaaagatgtatttggcgttgctgatgagaatgaaggctacacctgcccgttcggtgccgtcggcgatcggatctgggtgcgggaaacgttctgcgctgtccatgatcatgacgagcccagtggttgttcagctcttctttatgcggcagacggaaacggcccgtatggtaaatggacgccttcgattcacatgccgcgctgcgccagtcgcatcacgctggaaatcaccggcgtgcgcgtggagcgcttgaactctatcagccaggaagatgcgcaggctgaaggcatggaacttaccggatggcggccaacatactctgacccggatagcggaggggaagtctggactccgtatgacaacttcgcgcagctgtgggaatccatctacggcgaaggaagctggcaggctaacccttgggtctgggtaattgaatttaaggtggtgcccaatgttcaggataatccagcctaa

SEQ ID NO: 200294 - DNA, 219 bp, Klebsiella oxytoca
atggacatcatcgacaccgcagcagagattgaagagcttcagcgtaacgctgcactttccgctcaccgcatcgaccacaacgccgtatcagctgaacgttgtgaagaatgcggcgacgatatcccagatccgcggcgcgctgccgttcccggctgccagacatgcgccagttgccaggaggaaatagaattgaggaataagcagagggggatccagtga

SEQ ID NO: 200295 - DNA, 192 bp, Klebsiella oxytoca
atgaacagggcctcacccgttgatttgaggaaaagcatcgacatcgccaaccacctggcgcacatcgggattcgctttgtgccgatcccggtggcgaccgaggaagaattccagatgctggccgccgagttatcgcgacgacttgagcagatggcggtcgaagccgagaagaatgaaggcggtgcagcatga

SEQ ID NO: 200296 - DNA, 867 bp, Klebsiella oxytoca
atgatcgaaaagaaatggggtcataacgaacttgctcatgaccttgcagagcatttgcgccagaacacagcgcgcatttgctgggaggatatgcagctagggcccgccggtacatgccgacctgatgtttactctattgctcacagctacagcaagttctgccctgtcgtctatgaggtcaaagtaagcgtaagtgatttccgggctgacgttacagcaggcaaatacaccaagtacttcaagtacgcaggcggcgttgtttttgctgttcctgaaggcatgctcaagaaaagcgacatcccagatggttgtggcttgatgatccggaaggaaaccggatggcataccctcaaaggcccaacaatgcgccagattgatacccttcctcgcgacgcctggatgaaattgcttatggatggcatgaccaggcaggcagagagaacccaaataaaaagccgcgtaatcaacacctacctcagcgaacaaaaacttatgaagcgacatggcagcgaaatcgccgatcttgtttgtcgagctcatcggtcgaaggagcgccttgagcagcacattcgggataacgatgaaaggctgaagaacctgcggcaggaaactgaagaggagctgcaacgacgacgtaagcgccgggaggagtcggaggaaaggttaactgatgctcagcaagatctggcgaaagcgcttggcctcgacccgaatgtccctatgtatgttctgacaaggacgctatgggaagcaacgcgccgactcaccgaggatgaagagataaagaggttgcgaggaatattgtccaaccttgagcgcactctgaatgacggtctgaaaccattacccggggagaacgccgcatga

SEQ ID NO: 200297 - DNA, 708 bp, Klebsiella oxytoca
atgattcgccgacagatcgatacatcaacccgatttctgcttgataccgcctttcaccgacttgaaataatccgtgatgacggtttgtaccgccacctgcgcatgaagcagcccggcacgtcctgttattacttcgacattatcacctggcctggatatctgactgttaccggcgacatgggcacctggacattctcccgtatcgcggacatgttcgactttttcggtccgtggcaagacggcattaacaccggttactggtcagaaaagctggaggctggcgctggctattcggcgtgtgagctattggcgaaagagtacgatcatgatgctttttgccggagcctgaaggaatcaatgagcgaatatctggaagatgctccagaagaccagcaggaagacgaagactgggatgatgaagacgatactccagacagtgataaagccaaggtccgtgaggcggtccgtgaattatgccgtagcgatttcagtaatgactgggaagcatatcaggcagtttataacgctgactggccagaaagttggagtgcgtgggatgtctgcgacgggttgacgttcaaaacctacaccagccacttccgctggatcctctttgccatcacctgggcgatctccaaataccacaacacaaagctggtcgacaaggcgatgggaacctttcttgctttcaaaggagcaacccaatga

SEQ ID NO: 200298 - DNA, 219 bp, Klebsiella oxytoca
atgacaccagcaaatgaaaacgccatccgcgccgcctgccgccgctgcaccgatgaaatccagcaagccatgcgcaagaagccaaagcctaactggaacgaaacggtgcctcctatcatcaacaagcatcacaagaaaattgaagctctgggagttagcctcctggagttcgtcgtcaaaactggccgccttaacgggcggtttggagccgaacaatga

SEQ ID NO: 200299 - DNA, 735 bp, Klebsiella oxytoca
atgaatgagctggctcttttcgcaggcgctggcggaggaatactcggaggtatcctccttggctggcggacagtatgcgcagttgaacgtgatgcctacgccgcacaagttctcgcgcaacgacaaaatgatggaatcctcaaacctttcccgatttggtctgacgtgtgcagttttgacggaaagccatggcgaggaattgttgacgtcgtttctggcgggtttccctgccaggacattagcgcaaatggtaatggcgccggcatcaacggacgtcgttccggactgtggacagaaatggcgagaatcgtcagtgaagtacgacctgcattcgtctgcgtggaaaattcgccgcgactcaggggaaaaggtcttgccgtggtcatcggtgaccttgccgagatggggtatggctgcgagtggtttcgtctttcagcatcgaactgcggggcgccccatgaaagagacaggatgtggattgtggcccacggcgaagtcaacgatccgaggcgactgtccaagcgagcggctacgcagaactccagacttaccgagtgcgataaagatgcgtccattgccggatgggtcgcagccacaccaggatggacagctgaacccggaatgggtcgagtggttcatgggctggcccatagggtggaccgaattaaagcccttggcaatggacaggttcctcgagtggcagcggcagcattctccatcctcaaaaattcatag

SEQ ID NO: 200300 - DNA, 153 bp, Klebsiella oxytoca
atgactcacgctcatgtcgacatcagggttggcacactgtgccttcccttcattggtaacggctggctaatgcctttgggtgaagtggtcagcaatccattaaaggcgcagcggctcgctgaggaatatcgggaaaggcaggaggtggcatga

SEQ ID NO: 200301 - DNA, 198 bp, Klebsiella oxytoca
atggcaacgtactttgacaggaatgtcatctgcaccaaagacggtggcgatggattccaggtaggcagtgtttacgagctgcttgagataaacggtgtttactgcgtcgagaacgatgagagcaagccggttgaggcttttcgtggaaaggaccattgctgcgccgggaactctcacttcgataactggaatgaatag

SEQ ID NO: 200302 - DNA, 141 bp, Klebsiella oxytoca
atgcgaatctcttcgctcaacctcggatgcaaaattctgtttgttaatgagcaggcgacttgtcgtccgccgctggctaacttcgctcagctgtcgatgtttcgtttcgacgaacaaacaatagctaaagcgattatttga

SEQ ID NO: 200303 - DNA, 477 bp, Klebsiella oxytoca
atgaaaagattagcagctgtcgttattgcttctgcattgctcagcgcgtgcgcacaaccaccttatgcccgcattgcttccgattacgatcagaagatggctgaggctaaaaaacatgatgcagaatttgccgagaaggtaaggaatatcaaccttgaaacagccgatgtcggtgaaaagccaaagaactataaagagctggttcaggcaacaatcaaggatgccttaaaggatcctgattccgcgaaattcagcgacttctctccactccgcaaagaggttatggttgagaacagaaactttgtttatggttactcgacttgtgtttttgtgaacgcaaaaaattcgtatggcggatacactggtaagcaactctactgggctttcatacgtaacggtcaggtgcttaggttccaaaacacaaatgaccagtacggagacattatcttcgtaggcagaaaagttaactgtaactga

SEQ ID NO: 200304 - DNA, 693 bp, Klebsiella oxytoca
atgggattctcggagcgtttggcgcaggcaatgaaacgtgctggttatacgcagggccgattagccaaagatgtcggcatggctcagtccagcgttaataagctactcaaggaagcgaacggttctcgtaaaactgttgagattgcctctgttctgggtgtgcggccggagtggctgtctactggtgaaggggaaatggcttccagtggcgcaagagaaccgactgcgctataccaggttaagccgtcactgaatgggatttaccgcgtggatgtactcgacgttaaagccagcgctggaccgggcgctattgtcaccagcgacttcattgaaactatcagagctattgaatacaccactgagcaggcgcgcgccttgttcggaaatcgtccagctacccacgtcaaagtaatcacagtaaatggcgacagcatggacggcactatttcacctggcgatcagatcttcgttgataccggcgttacccactttgatggtgatggggtgtacgtcttcgtcttcggaaagacactgcacgttaagcgcctccagatgcagcgagaccgcctggcggtaatatccgataacccgatttacgaaaaatggtatgttgagccagaagatgaggacgcgttctacgtcatggccaaagtactgcttagacagtcagtcgattataaaagattcgcataa

SEQ ID NO: 200305 - DNA, 252 bp, Klebsiella oxytoca
atgaagaccccaacagtagagaagaactccgcagtagagaaagcgatcgccatcgctggcagccagaaagaactggcaaaacgttgcggtaaagcccagtcaactatctgcgactggcttaacggaaagaaacgcatctccccgattcacgtacctgaactggtgaaagcggtcggtggtgaaatccaggctcatgaattccgcccggacctgccatccatctttccacaccctgacaaccatgccgcttaa

SEQ ID NO: 200306 - DNA, 576 bp, Klebsiella oxytoca
atgaccagcaaattaaccagagagaaggcgcaatggcttcatgacgcgtgcgaggaagctgctgccgctggcattaaattgaccatgaatccgaacgagttgctgatgtttaccagttacgcgctggccgcaatggacagcgagccggtggaagagaatctccgtatagctgatgctcttgaaggactgttatggcctaacatggcgctgggtaataaagcagtgattcaggctgcaattaaagcgctacgcaccaaacacgcgcagccagcgccggtactgccggagatagaccggagggctattgctgacaaagtttacggtaaatgttgccgcatacctggagcgacgttttacaacgccgcagagttcgcgattgacgaagtggaagcctgccgcgccgccatgctccaggctggcaactctccggtaattccggatggtctaatcggtgccgttaatcgtctgctcgatagcgacggaagccgtggctcttttagtgctatccgttgctatgacgctcatcaagagattgagaaattattagctgtatcactaagctccaaagcgggttga

SEQ ID NO: 200307 - DNA, 276 bp, Klebsiella oxytoca
atgaatactgaaaactacaaaccttgccctttctgcaacaatcaacccaaaagacatccctcaatatctggcataggccatgaccctataatcatggttgcatgtgctactgaaacttgccctataaaaggaatgtatatgggggatgcgacttggaactctcactccgtatctaaagaggccatggctgagtggggggttaaaacgcagcggcctgaagacatcaaaggttttgaggaaaagttaaaaaaatacttttctgaagtccagatgtga

SEQ ID NO: 200308 - DNA, 210 bp, Klebsiella oxytoca; identical to SEQ ID NO: 105850

SEQ ID NO: 200309 - DNA, 735 bp, Klebsiella oxytoca
atgacaccagttaaagagtttggcgaatgcctgattactgccggagacagggattatttcttccgtccgtcactactggccatgtcgcgaattggcgaacctgatcacatcgttagagtgtttcatacactcttcaccgttaacgatgcactggtggcaatggtccgctcagcagcagaaatacacagcgaaataccggagcatcagaggctattttacgcccaatacttcggaagttatgagttgcctgaatgggcgatcaaggcggcgtcttcgccaggattcatacgagcagcattgctctcggctatcaacgtcctgcaatcatgctgtgatgatgacatttctgagttggttggctggttctctccagcaaaggctggtcataggacgtttatctggcgaccaggagcaatgccggtacagaatctgatactgatagcccaaagtctgatgatgcacggcatcataggtaaagcgaaagttagaaagctccagcggcacgaatccagcgataccacatctgtattccgggcatcagattacatcatcgcagcacgtaaccacttcggtatcagcaaggaagaggccggccaactgacgatgactgagtttcaactaatgctcatcgctaaataccctgagcagaaagggtacacccgcgaagagtacgatcacgcagctgatgactactttgcgcgccgtaagcgcagacaggctaaagccaaccaataa

SEQ ID NO: 200310 - DNA, 2652 bp, Klebsiella oxytoca
atggctgaaaaagttggtgagctttactacgacgttgatatggaaacggcgaagttaattactggtagtagaaaggcagcagatgttctcggggaaatgaataaaagcgccagaagcgcaagcgcaggagttgataagttagaaaactccggacaaaaagcattggcttcaatgggtgttctaaaggccgctttatcgggcgtagctagcgctattacagtctcgctaattattgattacggcaaggcgttccttgaggtggctgacaatataacgcaattacagtcaagaattgcaaggttatcttcaggaacggcagaggctaaagtgacattctcagctttagcgcaaattgcatctaacacaggtgcgagcctacagaatactcaaattctttgggagaaattgacatcatcattaaaaggaactggcgctacgaatagccaaatcctatttctgacagatacacttcaaaaaatagggcgtgtcggaggtagttctgcagaggaaatggctacagctctgcgtcaattcggacagtccatcgacggtgggatagttagagcagaagagttcaattctgtagttgaaagcatgccagaactagcacgacagatggcagcgggtcttgggttgtctatgggacaacttcgacaagcaatgcttgatggaaaaattacagccgaggccgcccttaacgcaatagccaaacaagctggagtggttaatcaggagtttaataagctaccaaggacaatggagcaggccagcaacagccttacagtctctctttccttgcttgtagggaaaatgaacgaagctaccggcgcgagtacaacaatggtggccatcatcgactctataagcgcggccattgatagattgagtggacgaaccgagacggcagcgcaaaaaattgctgatttaacatctactgccgaaatgtacagcaaaagggccaggacatggtcatggcttgggcttgatggttggtctcaacagaataaggcgctttcagtgctaagcactaaggccgctacccttgcaggagatcttagtgcggtaggtaaagcttctgaggatgccgcaaattcacaaaaagggtttggaggcgtaaacgcagctaaccccaaacaagacaacctcataaaaatatctgagcgaagactcgccttagcaaaactggaaggagaggcgagggcacgacttcaggcgcaatatgatgcagccgatgcaggagtaaatgacccaaaacgagtaaaggccctgcaggacgaatacgccgaaacctaccgggttacagaggcgcggaaggaaagcgacaaagcaggcaagcagtcaacttcaacagctgaatctatcgcgcagaagcttgagcaacttcgacaggaatcagtgcttgcagccgattcgacagagggactaacaaaagagcagcaattactcagggcagagcaatcccttggcgcgcatgcaacggatgagcaaaagcgtcaagccagagagtataaggccgcagccattgatgcagccgcagcggcaaggggcgtaaccgaagcgctcaaggccatgccggagcaggcggagaataaatcttacgctgaatccatgcagaacctgaaagccgcgctgaacgcggggaagattgatctgcaggagtacaatgcggctactgagcagatggagcagcagcatcaggctaacctcgccaaaatacgctcacagcaggtggtaaaccccacccagcaggcacttgcagaggttgacccagttcagcaacttgccaatcagcacgctcaggaactggccctcatccagcagtttgagcaacagggcgttttggcccatcagaacgcgctggccctcaaaaacgcagcagacacccagtacgagcagcagaggaccgcagctcaatgggaaatactcagccagcagagtctcggctataacatgctgacgagtgcagtggacgcctttagcgggaatgcctcaaacgcaattactggactgcttactggcacaatgtcagcacaggaggcgatgcggtcacttgggaataccattctgaacagtgtgatcaacagcatcgtgcaggttggcgtcgaagcgctgaaaaattacattctcggccagacgctcggggctgcatctgtcgcttcttctgttggaatggcggcaacgacggcttcggcatgggcgcctgctgctgcactggcatcactcgcaacgttgggtacaaacgccgcgccggcatctgcaggcatcacatcaacggtaggacttgcgagcggtcttgccctggctggcgcgcgctataatggcgggccggtatcggctggcagcatgtatcaggtcggcgagagaggtaagccggagatttaccaggccagcactggcaagcagtacatgatacctggcgataatgggaaggtcattagcaataaggatatgcagtcaggaagtggcgtcagcgtacaggtgaacgttatcaaccagtcaaccggcgccaccgttcagagtgctgatggttatatgcaggacggtaatgctgtcgttgagctgctgcttactgatatcgaacgtggcggccctgtatcctcccagatacagcagacctatggactaaatcgcaaagctcaaggtgcctactaa

SEQ ID NO: 200311 - DNA, 2175 bp, Klebsiella oxytoca
atggcagaattaccaacgccaacgcaaaagacggtgccgagtgatgatattcgtgaccacgtttatgcgggcggaatgctggataaagtagtaaccagcactgatttgacgtacacagatcgtctcggaggtgagcactacaccgtcgatggcattaaagctgaaggtgataaagtcgttgaggagactcggcagaacttaattcccctcagtcgtcagtatatgacgttagctgatgctcaggctgatattgctaatattcctgatggctcagcgacatatgtgagaagtactgacgatatcgctctggcagatgaatacatcaataacggggggacgttagaggctaccggtcgtaggatgatttcagctggatatgttgacgcgttgagagatttggttgccactgaactggcgaaaattatggccttcggtgccgctcagacaactgatgcttatccggatattgctgaactgattcttgatagtgtagggaatgcagtttatcgccgcttcgcggacggaacgagccagtttccggcgctgatgattggttcagggattgagcttgtgcaaatggcgggtggaggttttgtctgccagtcccgcgccaccggagaagaaatatttaatatttctgcattgggtaacctgacgcatggaagccagacaacgtggtttgctgatgatgacagtgtcagtgattatgctgaaatacatatggacggacagggaagaatttttcggagagttcgcacggatggtactgtggagcaggtgggtgatgatacacctgatgatgacgcctctgaattcccaatggttgcttcagttgatggaaatatcattgcggtagatggcagcaatgtaactcagatcacgaacgactccggagtttcaaatattgcgccagtggcatatgcggaatttttgcgatatttgtcgaatatcagcggcaactacatcacttatcgatccacgtatgacgggaattaccgggcgcgagagtcattgcgctttcttgtacacctgattataactggccagtctcttgctgcaggcggctcaacgcaagcacaaagccctgtaacgacaacagcgcaggcggattacggcatactctcgtttgagaccggcccgaaagtcgattttaagtatgacacgctgaatgaatcgctccttgaagctgtcatcccatgccgggagaatgctgggacgcggcctggacaggagtcgccatcaagcggtatggcgtttaaaattcatgatctcaccgggcatacggttctggtttccgatgcgtgctcatccggcactgcaatcgaagacatttcatccggttcagcgacttttaccggtgcaacgaaaatgattcattcagctgtagccatggctgaaaagctgggtatgcagtatgttcccgtaatggtgcttatccacggcaaccagaatgcggcagcaggcacatcaatctccagttatcgcacagcaatggagacgctccgcgcgcactatgaatcagtcattaacgccgcaacaggcgaaacgcagtctctgcatatgtttgtcggtcagctatctaataccattccatacggcggaactgccggctcgaccaaaaccaataacatcggcattgcgcagtaccaggaggcgcgtgataacgcgttaattcatctcgccagcgcacaatatgcccgcccgtattcagacggggagcatctgaccagcgcagggtatcggactgaaggcgaagttattggctcggtggtaggtgggtggctgaatgacagtgcaaaatcctcgcttgtgccgatagagtcggatgttgtgcagtcaggaaccacgatcactatcccggtggcgggttgtgttggtgatctcgtgattgacaccgcgagggttaccgaccccggcaactatggctttgccctgaccggggccactattgcttcggtagccgccagcggtagcgggacagcagccaaaatagtaatcacaaaggccgattctaccgctgcgacagcgctatcttatgcaagccatgggattgcgggacaaaaccctggacccgttactggttcgcgggggtgcattcgtgactctcagtctggatcatcactatccggcctgcctctctataacgacctttgcgttttctccatccagctttaa

SEQ ID NO: 200312 - DNA, 195 bp, Klebsiella oxytoca
atggctggctatattgtcgattatcaggcaactaaaaacgggcaggtaatttattctggaacactggcgattgaatcagaaggaagtaattcggcaataaaggaagctgttctggctgagttgaatgcgatcaacataaagtacggcggtggaatacctgattctgtcaccgtgaactcatggtatgctgaataa

SEQ ID NO: 200313 - DNA, 138 bp, Klebsiella oxytoca
atggggtctgtatcccggagcgccattatctttaccacccgcacggagagcggcgcagtggaatgcatccacttcctgtttgttttttgcactgaaggcaagatgcattcggggcgtgaagggagtgcccaatgttaa

SEQ ID NO: 200314 - DNA, 1113 bp, Klebsiella oxytoca
gtgtttaacggttctaatttaagattggctcgtctgtatcacgagctatcactggagcaagtagctgagcgggttgataagacccgccagtatattcagcggctggaatccggcacggctgtcccgacacccgagcttgcgaataaattagctgccgtcttgctagtgatgcctcatttttttgaagaacaatggcagtctcctgtaaatgaagagatcgttcacttccgcaagcgtagttctacgagagttgccacaaaaatggcgactctcgccaaagctgagctgtatcgacgacttattgaaatttttgaagagtaccttgatttaccgcaagttggatttcctgaactgaaggtgaatactcaagaggagatagaaaaagcggcagagaaatgccgggctgattgggggctgggttttgggccgatcgataacatgactcgtcttgctgaaaagctgggagcatttgtcacttcttttgattctgtttctgacgatgttgatgctctttctgttcctttgagccgcccatttatcgtacggaatacagctaaaaagtcaccttgccgtcagcgttttgatatagctcacgaggtggctcatttaattttacatgagggtgtctctaccggagatagggctactgagtcgcaggctaaccgcttcgcatctgcattgcttttgccaagaacagctatggctaaatattttccgcgtccgattggcggtcgcatcaactggcaaggtcttagccagtttaaattgacgtggaaagtgagtaaggctgcgatcatttatagagcgcatcaacttgggcttttgacggacgctcaatataaaaccgcctttttcggtctcaagcgaaagggcgaggctattgatgagaaagaagattatttgatacctggcgagaagccagagcttttcaatagagcaatgaagtgtctgttaaatgatttgtcagttgacattgaaacattagcccagcgtttgagtataactcctacgatgctcgcagaacttgctaatgatgacactttggtttctgcgtcaagtgcggattctgagaatgtgatttcaatgtttgcgtatcgaatgaaaacagcttga

SEQ ID NO: 200315 - DNA, 600 bp, Klebsiella oxytoca
atgtctaagaagcctttaccgtgggactttcacccacaattaacagaagaacgtttaacaattattgctaaagaattgttacaggtcttaaatgacacatatgctcaactatccaccactctggataacaactatacacggtctacttgtacttttggtcgtcaatggcagttacttattgatttgtgtttgagtgggcaatatagctggcttcatctcaccaacgccggtttagacatcacttttactattgatacaattcctgtacgtttcttcactgatgacccggccaatcctaaaaaagatggtttttatcgcaggaatcctgcagatcaactttttgctcctgaggtgaacattcccgttttacatcgctttgttgttgagaaacccgaatttgagggcgagggcgctaaggttcatttcattggttataacgctttggacgaagaagtatctaagtggacgtacaacgatgaaccaacaacggcattgttgcactctacggatgatacaccgccagagtctgttagaattgagctcgatgacattcgcccttctcgtcccgaaaaggaagaaaaagagagcgatagagattaa

SEQ ID NO: 200316 - DNA, 270 bp, Klebsiella oxytoca
atgaatgagcctgtctggttagctgtagatcccgcagatgagtcaggggattacaccatagtgacggcgctggtttaccgcttaaccggtagccagcggtaccacaccttcaccctgattgatttcagggcattcatccttgatgcagatgtgccgctctctaagtcatgcgtatccggcataggcagcgacgaccaaggcattaagaggggtgggcttgtacgccttcagctcgtctccgaagcccccgacgaggagttgccattttga

SEQ ID NO: 200317 - DNA, 651 bp, Klebsiella oxytoca
atggatgttaattctcagggtaatcaaaatcgtgtctcgggtcgtgatttcaatgaaaacaagatccaaatagaaaaatttgacggtcgtcacactgttaatattgccataccttctgaaaggcaggatgaccgaccattagtaaaagcacagcgtaaggagcttaatgctctggttgccaaagtatcagctacctgtagtggggaagcatacgaaatttggcaaaaagttcatgctgaaataggcatttccagcattgaagagatgaccggaaaccagtatcagacagctattagctttttacaggctatgattgaccgcaccaaagacaaggacgccagcaaagcattagttagcctcttattacgcaatagtgaggatggcgaattaaggcaaaaattaattcacttctgccatgtcaacttcgggacaggtagattaaatgatcttacgcgctcccaactccagatcgctctttcgtggctggatcagcagcaagtcagctatgccccccattccgcccaagcctcgatagccaaactcggtttaaaacagttgctgagggtttacaccaaagagtttgcactgaccttttttgtaggtctcgtagctggggctttcttgctcagcatctcttcaatctatttctaa

SEQ ID NO: 200318 - DNA, 1266 bp, Klebsiella oxytoca
atgattaaagttatgtgtgctaaagcagaactgattccagcgcaggttcctgctgatgagcgagtattctcctattttaaaggcgctaagcgtgcaggtgttggtacaattgcgaatcgatggcatggtgtattaaaacggggtgggtttcgaccttcaacagagatttgggattttgtacagttttgcctcgcggtatgtagcgcggatctatcaagccctagaagaacaagtgcagatggctggacccggaatattcagcttacggttgggttgtgcgatccagataaatggctaccgctgaaatctgatcttgaagatatgctaaaagttctgactggtgattattggttattaaaattcaataatgcaggcatggaacctcctcaaggagatggcgcttttctcagcaatgactgcgtgtctttattatcgggtggattagatagtctaataggtgggattgatttggtaactaaaggccaaaaacctctatttgtttctcagctcgcacataaagattcagagcgacagagagcatacgcggctatgctgatgggaagtggctcacattatcaatggagtcatggtatcagcttcaaaggatcgcgcgaaccttctacacgtggtcgttcattagctttttatgcatttgcactacttgcttcaacaaaaatcaacctaccgaggccaacaatatttatccccgaaaatggggtgatctccattaatcctcctttggttccagggcgtgtatctagtttgagtactcgaacaacgcatcctatgtttatcgatatgttgcaaagagttctggatactttgggtattaatgtgcagtttcaattgccttaccgttttaaaactaaaggcgaaatgatgcgggaatgtcttgaccaagacctcttgcaaaaatgggctgctgattctacaagttgtggccgttttcgaacttataatcgtcagcactgtggacgctgtgttccatgcttgatccgtcgggctgcattccttgcatggaaacctgagggggatacaacgtcttaccgctttgggtctgttgttggcagtgacaaatcaagtgcacccgatgatcctatggctgttgcacttgccatccttgatgtaaggaagagagggcttgacagatttcttggtggctcgttggcttttgcaccgattaacgagcgccctatgtaccgtagagttttgcaagaaggtataaaagagctagaaactgtactcactcaggataaattgctttga

SEQ ID NO: 200319 - DNA, 810 bp, Klebsiella oxytoca
atgggaacatcaacttctagtgggggaggccgtgcaggttcaccgtttgatcctgaatggttaaaacctgaaagtgactctacaataggtggaggagattcgcctgattcaccatcggaggagaacggtggaaatgtaattcctgatggtgcaatagcaccagaacgacggtttggacctgctcgttcgctacttgggggatatctgcaaaatggcagccacgataatttacgtggtgcgacaaaaagcatggtctccaaaggaatggggggggcgcgacgagcagccgctactatgcgaggtgttgccagtggtgtcggtagtcttggtgagttcctgacgtctgttagggatggaaacgaccagcgagtgattgattggcttactcacgttcgtcaagagaacctttcggcaacagatcttactcttgaaattttgagagaggttattcctgggacaggaagcgttgatgacgaatcgctccgtaatgcgggcgcggaagctatggcgcaactctatgaactttatccggaggtggacatatttaatctcacggatgctcaaatagctgaagtcatggggttgaccattgcgaatgagatttgtaatcgaatagatctccagcttgggcagacttacgaaaaattaaaatatgatcctttattaattcaggaacggcgttctgatattcgcgagtgggtcggtgctgaggttagagtggtattggaaaaacaaactacaaaaaatacagaaccgaaaagcttggctcagtctattctcttgtctgccttagaggtatttacagaatga

SEQ ID NO: 200320 - DNA, 1878 bp, Klebsiella oxytoca
atgtggcatgataacgagacaactgtcgattatttgaattttggtgttgttgctgatgcatgcgcaagcctgctgaagcaggctaatggggaacctatttctataggggtctcaggtggctggggagctggtaaatcgtctctggtgaaaatgattgcatcccgcctagagagctcttcagttgaaggggcgttggttaaagagagaaatcaagaaaagcattctttcgtcgtactcacttttaatccatggctataccaagattttgagtccgccagaagtgcattgttacaaattgtgggggacgagattgttcggcttacagatgaaaataagactatcactgacaaagtatctgaattatggcgaaggataaatcttctccgagtcgctcaattaagtggcgaagctgcattgactttaactactggcattcctatcggttctcttggaaaaaccgtttgtaaattggctggttggtttgcgtcggatgacaaatcgagcaatggatcatcagatacagataatctcgagctaaataccagtggtcttctaaaaccgagtgaaccattctcgatgccagcccatattcaggcattcagggatactttagagagtattctcgatgagttgaaaattacgctagtaatatttgtggatgatttagacagatgtttgccacaaacagcaatttcaacacttgaatcaattcgtttattactatttattcgccgtagtgctttcgttattgctgcagataatgattttataaaagctgcagtgaaggttcactttgatggcgcgggaataacgggcgatgttgcaactaactatttcgataaattaatacaggttccactccatgttcctcgccttggtttgaatgaggcgaaagcgtatctggtgcttttgctgcttgagcgagagaccaacgcaggccatttcagtaaggaaagattcaatcatgctcttagcgttatccctgagaagctgcgtaatagctggaaaggtgaaacgatcaatcaagagtttttatatgaactggtagagcatgttaatgcgctcaaaagtttaatggatttagcccagggccttgcggctcttcttcatagttctttagcagtaaacgctaatccccggctaatgaaaagatttttaaatactgtttatttgcgtgatgctctttctgcgcctcagggaataacattagatatagctgcactggcaaaatggcatctccttgaaaggtgcgacgaaagccttgctgaggaaattgctagtcgtgttcattcggataatgacggtagggtacaagttttggcggatgctgaagctgctgcagcgggtcagagtagtttacctgagcctttcaagagtacgccatttactcagcaatggctccaactcctgccagctttgggaaccgaggatctacgcccgcttctccacctcagtcgtgactccggaactcgtgacttcggtgatgacaatatgactcctgattctagaaaattgagagacgcactgaaagttgcaactaatggtcatgagtccttagttgaacttatgaggaaaataggaccttcacagacagagttggcgatgacaaaggcctggcagagcaatagtgcctcacgtacctggaagagtagcaaagaaattgtaatgctaattgagtgctgcaaggtttacacggaaattgggaataaagcagtcagcttgttggatcaggctcctctgaaacttattggcccaggtttaatcccaactcttggtgctcagccatgggcacagcaacttttagaacgatggaaagatcttaacgaattaccgaaaacaactaggaatgcaattgtgaaccttgggaggaggcgctaa

SEQ ID NO: 200321 - DNA, 1776 bp, Klebsiella oxytoca
atgactggcatccgcaatctaaccccagagcaagaaacatttgctgcccacattggtggagccttcgttaatgcgtgtcctggagccggaaaaacgcgcactatcattgctcggctagcgaggatcgccgctacgttgccttctcgtcagggaatagcgatactttcattcacaaactccgcggtagacgagtttcgcgaacgatgcttggctgctgggctcgatgcgcttttgaagtatcctagtttcatgggaacacttgatgctttcgtcaggcatttcgttgtactgccaagttgcgcggtatcgagccaaactcggccaattatcctagatagttgggatacgctcggtgtagaaattcgtttagcaggtcaatttgcctttcgaggtgaaccggtaagcctggatttgtttgatccagaaaccaacattattgatcctgataggatcagacatgcgggtttgcaaaatcatgtacgtcaaaatcagattcgatatcaacaagctgcagcaaatcggcgacgatctttgttacaagctggctatatgagtgtaggggacgcacgtgctcaaacattgcggttgattagagataatgtaattggtgagtcacttgctcgcgcattggcgtcacgttttcaagaagttatggttgatgaagggcaagattgcaatccactcgatctgcaaatactgacatggctcagagcacatggggtaaatgttacgttcgtttgtgaccctgaccaagcaatctacgaatttcgtaatggtaatcctcaagggatacagatatttaaggatacataccctattgcatcgcataagaggttgacggggaattttcgtagtagtcccgcaatttgccagttagcagccactctaaggcaagaaggtaaggttgatcggtcgcttggtgaaagtgcgaatgttgactatccaattttactacttacctacggtggccggggcccaacggaaattattggtcaggcattccttggacggattactgaactgggactggattcaactaaagcgattattttggctcactcaggcaaagttgctttgcgggcagctggtgtcacttccagcaattcaaccggaaactcgcgaattgaattgctggctcgtaaagtgtcagagttctggtcgcctgccgcaaccccaagaacgaaggagaatgtagtccagtcagtcgaaatattgctgctggatttaatgggggttcgccaacctaatgagcatctgattaaagccatcgaacgtcttggaatggaccggcgtgcccatcggagatgcgctctaagttttctcattaaccttccaaaaacgtgcagggattccgatgaagagcggcttgcctggatagcctgtgttcatgcggaaatggagaagctgcatctgccactcccagctggtgtaagtgtacgtcgtttcttccgacagcctcctaatgcgcaatggtcaaaacatcttcaagtgcccgctgctctaggttttgcatgtggcaacatacatgaagtgaaaggtcgtgagtacgatgcagtatgcgtcgtagtcccgccgaatcgagcccctgaaaacagaatcgaagcactgttcgagtcatggcaagaacgagtagatgctgaggcaaagcgtgtactctacgttggcctaacccgtgctcgtaattttgttgctcttgcgataccaaacgcctttgcagggcgctgtgttgatctgctgaccacaggccaagtgccctacacaagagtggatttgtga

SEQ ID NO: 200322 - DNA, 1752 bp, Klebsiella oxytoca
atgtatttaggcagactaaaaatttctcgatttcggtcttgtgatgatgtgactgttagtctccgcccagatttgactgtattggttggtgaaaacaatggtggaaaatccaatgttgtagacgcaatccgattacttactctgccattgagcggacgccgcgaacgatacccagaagatgaggacgtacgtcgctattcgaccatcccaagttttcaaatcgaaggggctttccagggtctaagcgatactcttaaaggtctattgatatctgcagttcccgatcctaccaagagtgaggctacctttggttatcgatatgaatcgcgttccgaacatgctccccgtggtaagactaccgtgtgggctggacgtttcgacaccaatggaccagagcttggttcttcggagttgatcagacacgtttatctccctcctttaagggacgcacaccaggcgcttggtaccagcagtggaactcgagtgatggcattgctgcgtaatttcttgccaaaagagcaggaacaggatttcctcgctggtgtcaggcgtgcggataatcggcctgagatattaactacaatgaatactgatatcagtaccgctctcggactactcactaatggagttcgtccgcagacagcggcattggattttggtagtgaaaccttattcgatgtagctcgtgatttgagatttcgtatggccgatacaggtttgatacccgaagatattcgatcttctggtctggggtactcaaatctactctacatggccactgttgttgtagagctgactaaagccaaagaggcagatctcacgattttccttgttgaagaaccagaagcgcatttgcacccgcaattacaggtacttgtgcttgagttcctcttagagcaagcgcgtcagtcagcatcacgcatcgtagagccaggaaaacctgaaggtcgcatccaaattgtagtgacaacccattctcccaacctgacggcatgggtttctccacgccacctagtggtcatgcgttcgcgacagcgtgagcaagatggagtagccatctcagaatcagttagtgtgcctattgccgaaatagggctaaagccaaagacattagataaaattagccgatatcttgacgtgactcgttccgctttgctgtttggtaacagagctatcttggtggaagggattgcggaagcactattgttgcccgtactagcacaaaagcttgtgctaaccgatgacttagatggatggcttaggttcaagggggctgtaattgtgccgattgaaggagtggacttccgtccatatgtagaggtgctgctacggccatatggtgatgcacgtatagctgataggttgatagtgatcactgatgcggacccaaccgtgttgggaaataggaaagttgatctggataatctggcggcaacgcatggagctccagatgctctgatcgtgctaaccaatcagcacacattggagcacgaaatttttagcgctggaaatgaaagtttcctgaaaagcgtgtttcttcgtttgcatcgtaattcacgtagagactgggaagcccagatagagggcattccagaacaagatcgtcccaatgcatttcttaaattaattgaggcgaaaaaaactcgtaaaggcgatttggcgcaagctatagcttcgcgcattgaggcgggtgaaccatttgttgtaccgctttatctcattgatgcaattcgtggagctacacgtatatga

SEQ ID NO: 200323 - DNA, 876 bp, Klebsiella oxytoca
atgaataaacctcatggccttcaggaatttgaacaaccgctggcatctcttccgcacacgcttcgccagcttatccttgaacgtattcaaaatctgacccactacgagccggtgattggcatcatgggtaaaagcggtgccggtaagtcctcactctgtaatgaactcttccaaggtaaggtttctcccgtcagcgatgtgaacgcctgtacccgtgacgcactgcgctttcgcctacgcagcggtgaccgtagtctcgttatcgtggacttgcctggtgtgggggaaaaccagcaacgggatcatgaatacaccgcactgtaccgccgtattctgcccaagatggatctgatcctctgggttatcaaagccgatgatcgcgcattgtccgtggacgaacagttctggcatagcgtgatggtagcgcaccagaagcaggtgctgtttgtcatcaaccaagccgacaaaatcgaacccagccatgaatgggataccaccaccagcacaccttcactccagcagcaggcaaacctcagtgccaaacagagcgccatcacggcaatgtttaaaccacattatcccgtctgtgtgctctccgctcttagtgggtggggaatggaggcgatggtggcaaacatgatgcgctgcctacctgaccgcgtcaccagcccggttgcgacacaactgcatgggaggctatgcacagagccggtaaagtcgcaagcccgtaacgatttcggtgaagcggtggggagagtgtttgatacgacagaatcatcgtcgctcctgcccgctcccctgaaaactgtgattcgtaccgtacgtgatgctgtggtatcggttgctaggatcatctgggactggattttcttctga

SEQ ID NO: 200324 - DNA, 708 bp, Klebsiella oxytoca
atgactcaggctgaacgtcgccatgaccggcttgcggtcagactgtcgatgattattggtcgtctggtggcgggtgaaacgctggatatgtgcaaactggccgccgagtttggtgtgtcggtccgcaccctgcgccgggatttccgcgaacggctgatgtatctggacctcgagtatcgtcagggccggtgccgtctgctgtccggcagtcgccagcgggaactggtagtgatgacttttgcccgccagtcaggcgtcgaatcgctgtttccggaacttgatggtcatcttgtcagttcacttctgagtggctcgggcgaatctccctgtctcatctggcaggggagcccttctccggcagtcaccgatagtggagtctttacccggctggtgaatgccgtccaggaatgcaggaaagtgaccctgcgatgtaacgggtgttgctatacagatgtcgctccctaccgactggttctgtatgacggtggctggtatctggcaggaacgcaccagactcgcatcattgcgctgccactggcggatattcgggctgtcacttcccatcccgacagttttactcctgaagccaatgtgcgggacatcctgtctcgttccgaatttttacaggcgttgcctcattttcatgtttttcattcattactcgctgacggcagttacgggcagcttacccataaggatcaggtatga

SEQ ID NO: 200325 - DNA, 621 bp, Klebsiella oxytoca
atgaaattactcatcacagcggcgctggcctccagcctctgcattatctctgtgagccctgttctcgcagaaaatatcgttggctcagtcagggcctggcagtacatgcaggctgatggctggaaatcggccgacggtacggataacaacacgctgcataacgcactttatcaggctgatgtaataggcaattatccctggacgaaacagtttctgctgcgtgctcgtggtggcggtgactattaccttgccgacaagaaaacgcacacggtacgtaggctggatgttaaaccggccagcggttactacgctgacctgacctcggtgtaccaggggaaagaccgggggaaaggctgttcttttgccattattgatagtcaataccgactgagggatgaagctgagcgagatgctgtagtggcggaggatccaggaaaagccatagagcttgcatggcggcaatttagcccaaaggtggtcatgacaattccggataactgtgcgaataaacatcagcaggcagctcttgcagccaagagctcggaagacgacaggaaattacaacagtgggtggcgcaacaaagcctggcggaattatgtcgtcgtaccgggaactgctga

SEQ ID NO: 200326 - DNA, 303 bp, Klebsiella oxytoca
atgaagctgcttaacatttatgaagataaagatgaagccgaggtggctttgtcaaaaatttctggagagaaaaggctcgctagtgagagggatggcacggtcacaatttataaccttttcggccaacctacttggggaaatttttacaagcttgatttgttcaacctaactgaattgcaagagatacttgagttgcgaaagtcaggacaaccaatcgataaacagagatatgaagagattattgttactcttcgctacgtatctaggtcatttgaattatctattcctgaacattggttataa

SEQ ID NO: 200327 - DNA, 1689 bp, Klebsiella oxytoca
atggcaacctcgctgacaacgcaagacatacttgggctatttaaggcgttgaaagacgatattcaggcaacagtattgaagccgagaggactgtcgataaaaagctcgggtacaaagagccttgcgctcaacgaaccattgaatcctgagactggcttttggcaaaatccacaggcgatgtcaaataagcccctacgctggatccctcaagttgaagttagcgctgaaaatgttgttgcaagattcgctcaaaatgctgagggacagagcataggtatggctaaaagcgtcggttacattaacaaccgcgatggttcttgctctgtatgcgtttttcgcgttctccctgcgattaaacctctaggccctgatttaaattgggaatttcctgcgggatgggagttcctgcttattcttggctttgcgcagcctctgcctgcaggtacgtcgggtgatccattgagtaatttcgaaccaggtgaaggaactattgatttcggtggcggtgcattaaagagaacatttccgataagcttccgtgctctggtgaaagcccccgtcccagaagagaatgtagcaggtacatcatattcagttgttggcaatgcaatcgcgcggttagttggagctacagtatacgatgggactcaagcatccgagcgcgatgccttggtttctgatctctcaaatatctttgctcctcagacagttgaagggccgttttcgctcgatgaaaatacttctcttgttgggatcgaaccgtgtgtatatcaacagatagaagcagcaatcaattcaggtaagcgtcatataattttatatggccctccgggtacaggtaaaacgacgttagcggaatatcttgctacggaagtttcagagcgagatgatggtgatggctcttatctaatgctcactgcctcgtctgcttggagttctcaagatcttgtcggcgggtatcagcctctaggtaatggggctattggctttgttcctggcgcattactccgcaattttgataaacctgtaatcattgacgaattaaatcgttgtccgattgataaagttttgggcccgttgttttcgatactctcaggacagtcttcggctctgccttgtcgggtcgatgtggcagaccctgcgagtccatttcatgtgatttatcctaaaccgcatccaggaatggaacctcacgagcatgcacccgagcctgcatggcgtataatctgtactttaaatacctatgataaaacccagcttggtcagatttcctatgcactgagccgtcgttttgcatggattaaaataggagcgccagcagatcctgatggatttgtaagggaaatggcaacgcgtcttggcgctacagttacagagcctatagcctcaaatccgattggtgctttgtggaaggccgttaattcattacgcgaaataggcggtgcccctatcgtcgatttcatcaaaacaatgattgcgttcaaatctgatgtaaatttatttgtgcagccagatggtaatgttgcagacttgtatttatcagcatttcgcatgtgtgttctcccattgatggatggtttgtcgccaagagaagcaagggatctagcagaatcaatttcagttgcttggggcttagatgctgagaaagccgcttcattaactggtgattgtgtggagttttctgcttga

SEQ ID NO: 200328 - DNA, 1224 bp, Klebsiella oxytoca
atgaactccatgagccttgatgaaatatgtcttcgaggtcttcttcgctgggttgggacggggtccccttcaccttattcgggaagcgtggagactttaagatatgaagatttagatgctttaagaatgtggtgggctctttctgagcctgtgggcaggctagccttaagattagtggaaaaacagagagaagtttctcccaccttagacgacttcagaagggaagtatctggtgaacttcctggccctcctgatgctgcagcttctatgttgcttcaaaccgtcactcttgaccctgctgcttttgtggtcatggaggcatcttcttcttggctttcagggccaaatagggttcttgcgaaaacgctgaaaacagcacaattagctttgaaagcaggagctttacatgccagaggagggcttttcgatctgcatgcgaatagaagattagctcttctcgattgcgccctaaaagtcgcacctatacgagaagtacttagtacacccgcgggcagatctcgtattgttgcttatgaaaaaaggcaggcttctaaggcaaggagtccgttgtacaaacagtcttggatttgcgcatcaatcctatcagatattgaagctttcgaggctgatacgattcaggccctacttgcctcagatttacttcctgggatggaagtctggcgaaaatttgaactcgcaacgattctggaagttgctgaagccctttctggggcgactggggctcccgttgttcttgacgcttcgtttgcggcgggcaggcccgcggcaactattggtgatttggaattacgttggcaaagagccatgcccaagagaccaagtgcgtttctcgatccgggtgaggtgctagcaggtgaactagccttctctcttggggtttccaaaggtacttctcgagcagatataactattgaaagagctggacgcattctttcgattattgaatgtaaatggttttcttctcccgattcagcaccagcagcaatacttgaggcaactagtcagcttgtaggttatgcaagagacattgcacatgcgcaggaagaatatgatacggatatcctagctcgtagcattgtggctcttgctcacaggggccctgctgaaatgcgttttgggtcccctgtttgctgtatcggtttctctgatttcggtgctgctaatttggctccttgggcagctatggtatcaggaatacactaa

SEQ ID NO: 200329 - DNA, 1185 bp, Klebsiella oxytoca
atggtgcgcccaatgtcagcagaacctaaggagactactgcctctgtgcgaatgagcgttgcggaaaaaagatcggcagaaatcagagctaaatccctaggctacaaatcgctgagtgactatcttcgagcattagcgtcctcagacatgaagtcggcagccccagatccgaaaaaatgcagagaaacacgccctgtatctctttttcacaaaacaaacttcggcgcaatgtggaatggtgactctctggattggatggattcacgtgaagcagaaagcgtaaacctcattatgacctccccccctttcggtctcgtccggaaaaaatcctatggtaatgaggacgcacacgcttattgtgattggtttcgtccatttgctgagggtttcaaaaaaatactcaaagatgatgggagtctagtaattgatatcggaggtgcatggaaggcaggaacccccacacgatctctttaccattatgagctgctgttaatgctttgcaatgagtacggttttcatttggcgttggaacatttttggtggaatccagctaagttgccgacacctgcagaatgggtaaatgtaaggcgggtacgacctaaagatgccgtgaattgcgtatggtggctttcaaaaacaccattccctaaagcaagtaacaggcgtgtgcttgcaccatattccgactcaatgaagtctttactaaaaaacggttatcaagcaaagacacgaccctcaggccatgttatttctgaaaagttcggcaaagataatggtggttccgttcccccaaatcttcttgctattgcgaatacagaatcaaatggcacttatcaggattattgccgcaaaaaaggattagacatccacccagcacgctttccatcagcgcttccggagtattttattcgtatgactacggatcctggcgattttgttttcgatccattcggcggctcttgcgtgacaggagcagtgtctgaagctcttggccgccactgggcttgcgtagaaatgaattcagcataccttgagggcgcaatgtcccgatttgagggtgaccctattgttttagctacagacaaaccatcctcttacacaattttcacaccatgtgctgcacaggtagtggaagaagcagtacctctggtagctgatggaggggccgctcgtccgaaaaaataa

SEQ ID NO: 200330 - DNA, 2139 bp, Klebsiella oxytoca
atgcacatttccaaactgaccttggtcaactacaggaacttcaagaacacgtctctgcggtttcacaagggagtgaataccattatcggggaaaacggctccggtaaatctaacatcttgcgagctatccgcctcctacttgacgatactatggtgcgcgcagcctatcgcctggatgagtctgatttcagtcgctcactcggtcaatggcagggccactggattgtaattagcatggagttcgatgaaatcaccactgatgaatccgttcaagcactcttcctccatggaactgctcccttggatgacgagccgattcataaggccacctataacctgattttccggcctaaaaaagaaaccaggttgaagctggcagccttgggaatatttgagtatgagcaactgtcggagatccgtgacgcaatcacgatcgatgattacgaaacgattttcacaggacggagttgggccgacttcggcaatcctgcagtatacaaaggtatcgttggcgatttcgatttttgtgacttctcatcagagacggagtttccagaaattggggcaaaggtgcccggtttcctttccgttacgaaagaggtatcgctgactttcatccaggccttgcgcgatgttgtttctgagttccacaacaaccgcaccaaccctttactcaccctactcaagagcaagagtggagagatcaatccagcgacgatggggccaatcaccgagatggtccgcgaactcaacacttcgatcgaaggcctaaaggacgttcagtccgttcgcaatcacattcgagagaccatcaaggacgccgcaggtgaaacctactcgccagcgtcactctcgatcaaatccgatcttcccgaagatgctgataagcttttccagtctctccgactttttgtgggtgaatctgaggaagggtacgaaggtgcaattcatgaattgagcctgggcggagcaaacctcatctatctgacgctcaaattactggagttcaagtaccagcgcgaaaagctgactatggccaatttcctccttatcgaggaaccagaagcgcatatccatacacacattcaaaaaaccctattcgatcgcattgcatacagcgatgcacagatcatctacaccactcactccactcacatttctgaagtcagcaatgtaaacaatatcaatatcttgggccgacacggatcgttctgcgaggcctatcagcctgccagaggccttgctcccttccagatcaatagcatccagcgttacttggatgctgtgcgtagcaatctgcttttcgccaaaagcgtgatactcgtcgaaggtgatgtggaggaaattctgataccaatcctaattaagctagtactgggagtaagcgttgacgagttaggcatcagtgtcatcaacattcgcagcacaggcttcaagaatgttgcgattctattccataacctccgcattaagaaacgatgtgccatcatcactgatttggaccaggccttctttgacatcaccgtacatacaactgatacagaaagtgtggctaagataaaggccaaagccgctggatcccagaaagctggtttagaacggcaggccgatctgaccgagttcacggcagaaaatccatggctcgcaaccttctatgcgaaacacacctttgaggtcgactttgtcgcagctggcaactatgaagccgttgtccaaaccattcccaaagtttacaaagacgagggaaccagagataaggctaagcaggaactccaatccggagtcctgtggcaaatgggcagtcgtacgctgactatggccaagcaagagggcaagggatggttcgctctcttgcttgcagagtaccttactcctcaagtccagatcccagcctacatcgtgcaggccattcatttcgcatacggtacatttactccccatcttcttgccagaattctccaacatcgtgctgaataccgatatggttccgatgtgttgaattcgccagcgaagcaagcatttcttctggaagttgagcggtttttgcaaggagatattggcttggctgaacttaagagagtaatcagactcatgctaccgggagactccattgatgcattcatagcggggatgcagtga

SEQ ID NO: 200331 - DNA, 1782 bp, Klebsiella oxytoca
atgttcgcctgggacccaagagacctcagtcctgagcaggtcgcggcagtgatcgagccatcaagcgtttttctgattgcttgccctggcagcggtaaaacccgtactctgacctacaaaattgcctacgaactctctcgtcgtgctgacaaacgaattgttgtagccattacctacactcaccgcgccgcggatgagattcaagagcgtattgaagacttgggagttgacacttcgggtctatggattggtaccatccatgcgttctgtctagagtggatactgaaaccatacggaatctattcccctaaacttgctcatggttatcgtgtgatcgacccgcatgatcgtgaacttctactagagaggctatgcgctccgtataagggtgtcactcattgggattgcgattactacattactgagacagggtatcagcttggctgtgtagatgtgagaaaacaccagattattcatgaaattttgaaggcgtacttcgtcgagctttcagcaaaccgacagatcgacttcgagcttattctttggcatacctacagcttgatgcgggacaggccccaaatcgcagtgctgctctcgcgcgtattctcccacatccttgtggatgagtatcaggacaccaaacagatccaatacaccattgtgacgtccatacttcgcgcaggtagtggacagactaaaatactcatcgttggcgatccgaatcaagctatctatggctcattgggtggctacgctatgccggtggcagaattccgtgcccgtgccgggatctcgattaaagagtttactctcagcctaaactaccgctccagtgagcgaataataagctacttttcgaactacagcgtacatgcaacaaaaatcagcggcgcaggtaaagatgccaagttccccagcagggtgacctacaatcaaaacgtaacacgcagcgatgtgtatgatgagattgtaaggttgattcggacgagtctcgccaacggccactctcctgaaaacatctgcgttctcgctccgcagtgggttttgcttgcctccacgactcgaaaactagtggcgatgttgcctgaccagcaatttgatggcccgggtctcgtccctttcagtaacaacttcgataatttctggttcaaggtttccaaggttttactaacggactcctcccccacactactcgtcaggcgaatgcgttgggcaattgacgtgattaaagacctcgaaaatttcggcgttgacaccaaaacactgactccgcgcatcttgttacgggagagtaacgcactcacagtcgatgaaacagacgggctccgctacttggacctggccttcaacgctctgctcaagaggctcaatatatcccaggaaatccatcctccacttttagcccatcgagaggcatttttcagcagctcggcagcgagaatagagcggctacagaaagaaggggcgacgtacattaatcaagtatccttcttcaaaaaagttttccgcgagcgaaccggtatcactgtatccacaatccatggtgtcaagggggccgagttcgacgttgtcatcgcctttggcttactggagggcatggttccgcacttcaatgaagtgaatggacatgtcgccgcaagcagactcctctatgtgttaagttcccgtgctcgtaaaaatctacacttgatctcggagttaggacgacaaagaggaagatacggtgtctatacctcaaccgagttactcgcggcttgccacttcagttacgacccggactaa

SEQ ID NO: 200332 - DNA, 564 bp, Klebsiella oxytoca
atgcagaatcgtttattgctcttgacagtaactgtcgcctcaccggtgcctataccgcatagactatcccttacgaccgctacacatgccacatctgcggcagttcgctgcaatatcctgagcgtcaaatcatttacgtcattcccgtttgacatggaaaccctcacatcaggaacagacaatggacatacatcacaaaacaccggaaggcgtgggctggtcatacggttgcttcaggccgctatgggtcactacccgcggctggccgcttttcggttttctctgcaaaatacctcttcagattattttctggcggaaagcgtcgtccctgccttgcgtgcagaagtagatataccggaccaggttgcgttattccagactgaagtcagacatcgttttggtgtttacgcactgacgcgttttaccgcaggagcttccacacctctgacactcctgaaatgggtatggagacggacgttttatcctgtcagatggtgctgctgtttaatctctccacgtgtcattccccatggtgtggcgcaggttacggagaagaagaactga

SEQ ID NO: 200333 - DNA, 570 bp, Klebsiella oxytoca
atgcaaaataaaccaaaatgggagccagactggtatctggaatctcttctgaacaaccatatcaatgaaatggttgaccgctattcctgcctgcgggcaatacgggttgatctgttctatcagcaccatactgcgaaatatcatctgcaaaaccaccgccaacttgaaatggatctccgtgtgctgatgacgggaatgatgcaggttgacgttgtcgtgggtttcttctgggtaatcgaatggacggaagatcaccactaccacgctcacgttgccttctggcttgatggcaaatatacacagaaaccattcatctgggctgagaaggctcgtgaactctgggcgttaatcacggaggaggatggctggttacaccgctgtgagtttaagccacattacagggccaatatcaatatcccggtgcattacgacgatccagacagtattgccaatatccgacaggtgctgacgtatatgaccaaaattcaacaaaaagacgagatgccgttgtttggctgtaatgaagttccaacgcgtccactgacagggcggccacgacgcaggatctga

SEQ ID NO: 200334 - DNA, 1113 bp, Klebsiella oxytoca
atgaaaaaaaactcagaagtcagtgataagaatgagcaaaaaaactcatatcaaagaaaattaatggtggtaaagggactggaaaaagaaatgttatggctaaaaaaagaccaaagagcatgtcatttttttttgttccacttgattacggaattttcagaatgggcaaaacttagcgtagttacaaagtgtaagaatggtccatttttaagtgagtcatcaagatgtactgaatcacttgcattacattctgatgaccctatgcatcaggttgacaccactggttttcccccatgtccagagctaccagttgaattagagcgccagattgatgaaggatcgggtattggggtagtaagtggaaatataacgtgctctgataatattaaggaggttaatgataattcgtttgatgctaaaaaagtggctgatggtaaaagtgatggaaaatttacaccggtaggtttaatgtctgcaaatggcattgttaactcacgtgttaataattcttccaatatccgaaattgcttcttcagcgttattgaccaattgcagcttagataccactcaaataaacagatactggatctaatatctaaagtcacttttttgtggggaacacactttaaaagattcccgtcacctttttcttggcttaatagtaacaataaagagcattgccagtggctttgggatgaaatgcataagcgctgtgttggtatcccattccagcccagggatcatatacaacaatggcattttgttatcgcgacgttcgataactggcaaggctggacactagagcagcaagagtacctgacggcgaagaatccaaagcgcaatccaggaaaattgttttctggcggcttggagcagagtagaaaagaaattgaacataaaatgatcctccttgatgaactcaagaaagcatgggatcaaagggaaagaagagctagaagagcaaaggaacccgtcgcagtcaaattaactaagtcggctcaaaaaaaacttgagtttattgctcacatagagaaaaccacatctaaggacattcttaatgacctgattgacagagcttttaacgatacgaagcgtaaatctcatcaatcataa

SEQ ID NO: 200335 - DNA, 876 bp, Klebsiella oxytoca
atgaataaacctcacggccttcaggcctttgaacaaccgctggcgtcgcttccgcttacgcttcgccagcttattcttgaacgtatccagaatctgacccattacgagccagtgattggcatcatgggcaaaagcggggctggtaaatcctcgctctgtaacgaactcttccggggagacgtttcccccgtcagtgacgtgaacgcctgtacccgtgacgtgctgcgcttccgactgcgcagcggtcgtcacagcctggtaattgtcgatttaccgggtgtaggagaaaacgggcaacgagattatgaataccgcgccctgtaccggcgtatgctgccggaactggacctgttgctgtgggtcattaaggctgatgaccgggcgctgtcggtggacgagcagttctggctcggggtaatgcagccttatcagcaacaggtgctgtttgtactgaaccaggccgataaaatcgaacctagccatgaatgggatacccgtaccagcacaccttcagaaaagcagcgggctaatcttcaggaaaagcaggccgccattacggcgatgtttagtccccatcatccggtctgcatggtgtcagcgttggccggatggggcattgaggagatggtagcaaccatgatgcgcggtttgccggaccgcgccgccagcccggtggccacacaattgcacgggaggctctgcacggagccggtaaagtcgcaagcccgtgacggcttcggtgaggcggtaggccatgtgttcgatatggctgaatcatcgtcgttcctgcctgcgccgctaaaaacggtgattcgaaccgtgcgggaagccgtggtgtcagtcgcccgcaccgtctgggactggattttcttctga

SEQ ID NO: 200336 - DNA, 714 bp, Klebsiella oxytoca
atgtctcaggctgggcgtcgttatgaccggctgtctgtccggctgtcgctaattatcagccgtctgctcgcaggtgaaacgctgaatgtgcgcaagctggcggcggagtttggtgtctcagagcgcaccctgcaccgtgattttcgggagcggctgatttacctcgatctcgaataccggggcggctactgtcgcctgctgaccgggggtcgtcatgaactcagggaagaggcggcaatgcagtttgcctgtcagtccgggattggggcactgtttcctgatatggatatccatctggtcagttcacttctgagcagtcagggggcatcgccgtgctttatctggcaccaggatatgccagtgccaccttcccgtccggggatcttcacacggctggtcagggcagtatcagaacagcggagggtaactctgctggccgacgggtgccgctgtggcagccttgccccctaccggttgattttcagctccggtgagtggtttctgacgggtgaacatatcgggcagataactgtttttgcgctgagcaccgttcactccgttacgtttcacccggaaacgttcaaaccagacgggtatttcaccagcatgatgtcccgcccgaattttcttcaggcgttgcctcatttccggttcatcggagaagtgatatccacttttcggactgaaccacatcaaccagcaacaggaggataa

SEQ ID NO: 200337 - DNA, 216 bp, Klebsiella oxytoca
atgggattctggaatgcagccgggaaactggctaaagaggttgcaaaagacgctctcgacagtgcgcgggaggtgaaagcggctcatgaccgactggagacaaagagcagcgcggagttgaaaagaattgtcactgaaaacggcattttcagcagcgcaaccgagacggaaaggcgtatggcgcgaaaactcctgcgtgaccggggcgagctttaa

SEQ ID NO: 200338 - DNA, 411 bp, Klebsiella oxytoca
atgaaagcattcatattgcctttcattatttcaggtcttttgttgagcttctccgtcaatgccgcagcggttaaattaccccaaaaagtgattgatgttaaagatggaagtgagcaaatttgcggaagcgatgatgttaaaaacgggacgtgtagcctcataggcgtgtctgatgatggtcactatgcattgttaagcagcccgggtggcatggcctgttatgacccctatctgatcgtagttaatcttaccaccagcaagggaaagatgatggactataaccgccatgcgacgtgtagcggtgaggccacagctaagtttgcccgctcaccagcaaatggtcatcttaccgttgttatctacgatcccaccatcaaaaagaatgtcggtcttaatactattgatttttaa

SEQ ID NO: 200339 - DNA, 942 bp, Klebsiella oxytoca
atgtctcttactttacgtaaattaaaacaagcaatattgataacctcgatttgttttattaccactaatgtttacgccgctggtattgcaaaaactgcaacggacgcaatgagttgtaatcctgatgcaggtaataatgacaacgggtatggttcctgcccctttctgagcgacatttatgatgctgacccggtatttaagaaagacctcgatgaagcgttgaagtcagcaggacttaccggattaacgggaaaagaggggtcaatgaatggcccggacagtggattaattccggtagatgttggtggcgagaaatggctgcagggctctgtctgtgaacgaggcaattgtggtgaccattatctgaagattctgtatatcccctcagagcatgttattgctggcttttattacaacgggggagaagaaaaaatgtttggcgacgtcgggggcgcagaagcaagagtcttacgcagtaacatacaggaagaaactcctcagcaacaggctccggcgatcgcagtaacaactcctgtggacggcgcaccagcaaacactatctggaccttcaagggagatggaggtaaatcgttatggcagatctgtggcggccagaacagcagttgtacagttatcgccaataccaaatattacgttgccattctgaaccgaaaatctgctcacagttgcgcctttggcgatttctacgtggcagcgagagattcgtcatcatggcgacagtatgacaccggtacctgcagcccggatgcatggatacgaaaaggctccatcaataacggacaatatatgtcggtagatatcggcatgaacaaccagattgtacagcagtaccctattggttactggtcaatgaagaaggaattctcgggcaatcgccgtccgttatgggaaagggttaaagagaaaaatcagcaacattaa

SEQ ID NO: 200340 - DNA, 480 bp, Klebsiella oxytoca
atggaacaacagttaccgctgtttgctacctcattaccagcgtcagcacagcaaaccatcagtaaagccttaaccttgatggagtgccagttacgcgaatccggcgcatcgttcacctccagccataccgtccggaactggctgcgcctgcaactcgccacgctggaacgggaagccttcatcgtgtttttcctcgacaaccagcattgcctgatcgcccacgatacgctgtttctgggaaccataaacagtatcaccgtgtatccgcgtgaggtcgttaaggccggtctgaaatacaatgccgctgcggtggttctggctcataaccacccgtcaacccatgccgaacccagcaaagccgacagactgattacagaacgcctgaaacaggcactggagctggttgatatccgcctgctggatcacctggtgataggcggcatggatattgtctcgtttgctgaacgtggctggttatag

SEQ ID NO: 200341 - DNA, 222 bp, Klebsiella oxytoca
atgaaaataatcagtaaacgccaggcgatggcgagataccgcaggcatccggggtcatgtctgcttcgcttttgtaccgggaaatacaggtggtccggcagcatctgctactacgctggtcgggaggtaaacaacatcaacggtgttctggcagtcttcgctgaacgccgtcaggaccgcaacggcccatatgccgtattgcgcagcgtcacgctcaactaa

SEQ ID NO: 200342 - DNA, 342 bp, Klebsiella oxytoca
ttgaataaaacaccgtctgaccatgatgtttctgagccctggtggggtcttgaacgcgatattactccgtgctttggcgcaagactggttcaggaaggcaaccggctgcattacctggctgacagggccgggttggcggggagctttagcccggagcaattgcagaaactggataaggctttcccgctattcatagatcagctggaagcaatgctgtgctccggcgagctaaatccacgtcagcgacatcaggtgtccattcatcttacgggtttaacctgcatagctgatacccgtggtagctgcggctacgtttatctcactatttattcaggccagtaa

SEQ ID NO: 200343 - DNA, 321 bp, Klebsiella oxytoca
atgcacatttcatctgtaccgtacgcggtgccggtttcgtcacgcctgtcacccgtgcaggtatggcagcaattgttaacgtatctgctggagcatcattacggcctgacgcttaacgacacgccatttcatgacgacgcggtcatacaggaacatatcgaagcgggaataacacttgccgatgcggtgaatttcctggtggaacgctatgagctggtacgtactgaccgaaagggattcacctggcaggagcagacgccattcctgactgcgactgatattctccgagccaagcgagctaccggattgttcaatacataa

SEQ ID NO: 200344 - DNA, 132 bp, Klebsiella oxytoca
atgttatttggacactggcttgatagtaaagaaatcccagacccgtaccgcatgagtgatgaagcatttgactcggtataccaattgcttgagcaagcaagcaagcgttgggctgacaaattaggtgaataa

SEQ ID NO: 200345 - DNA, 192 bp, Klebsiella oxytoca
atgaaacttgcaccggaaacccgcgagatcctgcgacagtacaaagccctgattaatgcccgccgccgtgatgccggtcagcgggaactgaccaccgcgcaggtgatggatgaaatctgcgaatacatgacctgtcagtgtgccgtgtacatcggcggtcatttcatcttacagggtggaaaaggccagtaa

SEQ ID NO: 200346 - DNA, 201 bp, Klebsiella oxytoca
atggctgaaagaatatctcaaagagaacaggagttgttggaggaattcctttgtactgttctggatgacttcagtaaaggcagtataacccgccatcaggctgtcagcggtatcgcgacattatatacaactgccgcagaaggacggagagaagaggctttagaatatctgagagagggaagaaagttgctaaggcagtaa

SEQ ID NO: 200347 - DNA, 396 bp, Klebsiella oxytoca
atggaaaatatgatgaaaactatgcgtgagcatttccccgcgcgaacagtggtgatcgaacagtctctggatatgtttggtatcaaacgaaatgaggacgggacgttactcttcccccgtcactccgataaacgttttcccgttgcacgtatccgtaagcgactggcggcttatggctggcgaggagaacgcctgaataaggaggtggcgcgcatcgtctcgggccctgatatcctccctgagaggagggactacagcattattttcccttacggatgggagaagaagcagctgacgcgtgagatgcggcgaatgtttccccgtaagactggccgacgtgtgctgattatgctcgatgaattacatcagtttgttgaatcacgggagaagccgtga

SEQ ID NO: 200348 - DNA, 864 bp, Klebsiella oxytoca
atgcgtgatgatgacaattcagacgcctgtgatgaagcgccccgggcggaggaaaaatgctacaccaaagggcgacttcgggatgagttcaggatgaagccagcccccggtgcggaaccggtcagaatgtacaaaagtccttacggcgggaaatacggcgtatggcggctggctgactgcgtcccgatgcgggcgaaacgccctcagacagaaaaacaacggcaggccagcgcacgtctgggcctgcaggcccggatgaagagtgagcgtggcaggttcgccatgcaggcacatacctggttagcgctggaccccgtcttcctcgataccgaaacgaccggacttgatgccggcgcgcaggcgctggaaatcggtctggtgaatgcccgcggtgagaggatatttgagacccgccttaaacccactgtcggcatcgatccggcagcagctgaagtacacggtatcagtgacgaggatctggtcagagcgccatcgtggcctgatattgcgcagcagctgcagcaccatatcggccggcgcccgctggttattttctatgctgagtttgatacgcggattctgaagcaaacagcggcagcgcataacgaccctgccagctggctggactctctgacggtgtactgcgccatgcggctcgcagcggggtattacggacccaccaatcgttacggtaccatatcgctttcctgtgctgtcagtcaggctggcctgagctggatcggggaggctcattccgccgtcactgacgccgttatgacagcacaggtggtaaacaatattgccggatactggcatgaactccagtgtgaaatgaatgatgacgcagggagtgagccagcataa

SEQ ID NO: 200349 - DNA, 1116 bp, Klebsiella oxytoca
atgcgtccggctacatacgaaccagaacagattattgaagcagggctggccctgcaggctgaaggacggaatatcaccgggttcgcactgcgtaaccaggtgggtggcggcaatccgacacgtctccgccagatatgggacgaataccaggcatcacagagcacggtcgtcactgaacccgttgccgagctccccgtggaagtggctgaagaagtgaaggccgtctcagccgcgctgtccgaacgcatcacccagctggcgaccgaactgaatgacaaggctgtccgggctgcagaacgccgcgttgcggaagtcacgcgcgctgccggtgaacagaccgcacaggctgagcgggagctggccgacgctgcacagacggtcgacgacctggaagaaaaactggatgaactgcaggacggatatgaccggctgacactggcgctggagtcagaacgttcactgcgtcagcagcaggatgtggagatggcccagctgaaagagcgtcttgcggccgctgaagagaatgcccgtcagcgagaggaacggtatcaggagcagaagacagtgctgcaggatgcgcttaatgcggagcaggcccagcacaaaaatacgcgggaagacctgcagaaacgactggagcaaatttctgccgaagctaatgcgcgtacagaagaactgaagtctgaacgcgataaagttaatactctccttacccgcctggaatcacaggaaaatgcgctgacctcagaacgtcagcagcatcaggacacccgcgatacgttgcagcagcgcctcgagcaggccgtcgctgatgcacaggcgcgcgccggtgagcttgcgcttgaacgtgacagagtcagcagcctcaccgcaaggctggaatcacaggaaaaggtctcctcggagcaattggtgcgtatgggcagtgaaatagccagtctgactgatcgctgcacgcagctggaaaaccagcgtgatgatgcccgtctggagacaatgggggagaaagaaacggtcgcggcactgcgtggtgaggctgaatccctgaagcgtcagaaccagtcactgatggcggcgctttcagtcaataaacagaccggtggccagaatgcgtga

SEQ ID NO: 200350 - DNA, 489 bp, Klebsiella oxytoca
atgccgcaggatgaatcagtcgtcgaacgggccagggaatactttttccggcaccaccggtatacagaggaagacctggaatccgactaccaggcagaactgcgcaactacagggatgacacctgggaagcaccacaacgggcagccagactcagtgcggccgtcaagcgctacaaaacgtatgagatgctgtacttcttcttccggatcgctgatgaggccgggctggactatactccgctggttgtaaagcgcctgtgcgctcatcttttcgacaggcagggcagccagaatattattgttgatatctttggccagaagggacgcatgcaccgcagccatgacagtgatcctgacattattgctgccgttgccgaacgataccgccagcaggcagacgaccactggcagacagtcctgaagaatatcgggagagtgaagcaggactaccggaaaaatcagaacagacagaaaggcgcaggggattaa

SEQ ID NO: 200351 - DNA, 978 bp, Klebsiella oxytoca
atgagcgatgaaccgggaagaggtaaatttgtcgatcaggcggcagaagccaggccttctgtctggcgcagaacagctggctggatacgtgaggagattctgcattctctgggacggcccgcccgcctggagagagcgattgcttccgggcagctaattccctgtccgatcatcgcccctgtcgacacgttctggacacggtcggtggtctactggcaggactggatgtctttttctctgtcatcatttcattcccgtccctggacgatcgactaccgcaaaccgggctaccagcgccggctcgaaagccatgctcttgctgttcctgaggttcagcagctgattagcaaagaaaatatccctcatttttcatgcgatatcacagatattcgggggatttcggcctcgaaatctatggatcatgatatccgggacatcgatgagtttcctgtactgagatgccgtgagctggttgaacctgtgactgaagagcatctgcgaaaaaatatgcgtcactgggaattacggctcgaccggatgctgtttgctgaatatccgtgggcagcgcggagactctactggctgaacgacggtggctcacaccattttggcgctgcccgctatcaggcatgccgcctgggcattgcggttccgcttaccgggagactctgtcgctacggtgtaaatgtgccgataatctccgctatacgtcagcaatggcatctgtttgctattccggcagatgaactcttcggcagctttttcgatgccatgaatgcctttgaatgcccgtttggtaattccggtttgccgcgtcacatgcatgatacggataagtcaggagttgatctcaaactggtctggcttgaccgtggccatcccagagccagtgctgttgctgatgtactttcagccgcaggctttcctgatttcgggaagctgctccagcaactggccaaagaaccttcgccacgttga

SEQ ID NO: 200352 - DNA, 1188 bp, Klebsiella oxytoca
atgattaagttacagtctaaccctttctataaaggtttaactagccagctttttacagacggaatagccgctgaagttctggcttttcatgagaaaattaatggatatgatgcaacaccactggtttccctgaaaaaactggcatcgcatattggtgtaaagaatatctttgttaaagacgaatctaaacgtttcggccttaacgcttttaaggtactcggtggatcctacgcgctgggtaaactcctggctgaaaaattagatgtttccattaccgaactcgattttaaaactgtcggaacacttttgccggaaccgctgacattcacaacagcgacagctggcaaccatggtacgggtgtggcatgggcagcccgggaattgggccaaaaggcagttgtatttatgcctaaaggttcagctcaggcgagtgtggacaggatcaaaagtttgggcgctgcctgtattgtcacagatgtgaattacgatgacaccgtacgcctggccagtatggaagcggatagcaaaggctggacgcttgttcaggatactgcctggaaaggttatataaaaatcccttcatggatttcccagggctatatgaccatggcaaaagaggcctttgatcaattagctacccgtggcgaagggaaaccaactcacgttttcttacaggcgggtgttggtgcgatggcaggaggcatactgggatactgtgccgacgtgctgggcccccgcaattttaccagtatcattgccgaaccagccgctgcagattgtcttttccgttcagtttccactgacgacgggcatagggtggcagttacaggttcattaaactctattatggccgggttagcctgtggtgaggttaatcctgtcacctgggacatcctccgcgatacaggcaatttttatataagtgctgatgatagtattgcagctgcaggtatgcgtgttcttgggaatccgttgtcaggagatacggggattatcagtggggaatccggagccctgaatatgggggtgctttattatctcatgacatccgcagagcctaagattcagcaatacagagcacagatcggactgactgaggaatccgagatcctaatattcagtactgaaggagacactaaccctgcccggtaccgctcgattgtatgggatggaatgcttccactatga

SEQ ID NO: 200353 - DNA, 393 bp, Klebsiella oxytoca
atgaaaaaacaaatttctacggaacaggcaccagcagcaattggcccttattctcaggccattcaactgggtgatatgatctttacatccgggcaattacctctggacccggtgacgatggcattccctaagggcggaattaaagaacagacaattcaatctctgaagaatatccagtccatactggaaaaaagtggttcatcaatgagtaatgtcgtgaaaacgacttgtttcttggctgacatggcccacttcgccgaatttaatcaggtatatgaggagttttttggcactgaatgcgcacctgcccgctcctgcgtacaggcagctaaactgccaaaagatgcactggttgaagtggaagtcattgcattcactacaaaagcatcctga

SEQ ID NO: 200354 - DNA, 696 bp, Klebsiella oxytoca
atggtgatgcaggacgaagttgaaagatacaaagtcagcttcacgacaaaagaccgcgaaatcctgacattgtatttcaggcttgcagaaatggttgcggatttagttggccctcattgtgaagtcgtgatccattcactggaaagtctggataagtcagttgttaaaatagtgaatggtcatcatacaggcagaaaagaaggctcccctatcactgatatggggctgaaaatgcttcggctttttctccagaccggggaagtcaattccaggagttactttacacgtaataacaaaggcgagatgttaaagtccactacatgtgttctagccggtgataataataagcctgtaggtttattctgtgtaaatatgaatctttcagctccattccctgacataatcagaacgctaatgcccgatatggcagtagcattacctatgaatgaaaactttggctcaaatgtccatgatgttgtggaaaaatcgacagataccattataaatcaggtatataaagacagttctgtcaatcctaaagcccgcaataaagctgtagtttatcagctttatgaaaatggtatttttgaatttaaagaagcgacatcaatagtttcggaaaaattgggtatttcgaaacatgctatttataaatacctcagagaattcaagtctgaaataaatgaaaaggagtga

SEQ ID NO: 200355 - DNA, 1167 bp, Klebsiella oxytoca
atgagtaatcaggaattcgtgggcaaactagtagagtggagacatcatcttcattcgattccaggaaccggatttgatattgacgaaaccgaggaatttgttgcctccacgttgtcaaatcttggaattgaagtacatcgtaatatcggcagaaacggactggttggcgtgatccgcaaaggagaaggtaaaaagtccattggtcttcgtgctgacatggatgccctgagtattagagaaactacgggcttaccgtattcctcgacatttgagggaaagatgcatgcctgcggtcacgatggccataccagcatgttgcttggtgcagcgaagctgttaaagacagattatgattttaacggaacagtgtatctcatttttcagccggatgaagagaacggacatggcgcgaaagagatgattgcggctggcttgtttgaccgtttcccgatggacgaaatctacggggtacacaacatgcctgggatgcctgctggttcatttgccacacgaacgggcgggatcatggccagtgaagataatttcatcattcgtatccattctaaaggtgcccatgccgcaagaccccatatgggtcgtgatccactggtaatcgctgctgaaatcattcttgcccttcagactatagtctcaaggaatctcgacccggcattatcagcagttatctcatgtactgaaattcagacagatggcgtacgaaacactctacctggttttgtggaaataaagggagatacccgctcttatgatccgcttgtgcaggagttgattgaaacaagaatgaggaaaatctgcaattcaatttgcatgatgaacgatgctgaatgcgaatttatttatacgcatgaattctctcctaccgttaataccgaagagcaaaaaaaatatgcgctcgcagcggcatcaaaaatttttgctgctgatgctataaacggtgatgttatgccaatgatgacctctgaagatttcggcgcatttctggaaaaggtgcctggttgctttgtatttataggaaatggaactgagttggatggtaaaggttatttaccacttcataactcaggatatgattttaatgatgacattcttgaacaaggagcccttttcttcgcgaaaattgccagtacaagactgaactctgattaa

SEQ ID NO: 200356 - DNA, 1167 bp, Klebsiella oxytoca
atgctgaaagattctttaattcgtggatttacacacgcagaatttgaaaacagaacgacccgggctcaaaagttaatgcgtgaacgtcagttggatgctatttttctgacaaccgaacctaatgttcgttatttcaccgggttcctgacacagttctggcatagcccgactcgcccatggtttttaatcattccagccagtggtaaaccaattgccattattccagaaatcggcgcaagtggaatggcagaaacttggattgacaacatcattacctggccttctcctcgcccggaagatgacggtatttcactggtagccagtacattaaactctttatcatgcaaatacggacgagtgggggcaacattaggtattgagtctcacttacgtatgccttataacaattttaatcaactggtaaatacggttaagaaagagtttgttgatatttccctggatatacatgagcttcgacaaattaaatcctctgctgagatagaaaaagtacgcgaaatatgccgtattaccaatcacggtttcagcaaagtgccggaatatgccagggcagggatgaccgagcgtgagatttgtaaacagttccgtatcgatatgctgctcgagggagctgatgaatgcccctatattattgccggttcaggcccggatggatatgacagtattatcatggggccaacaaaccgtgttattcaggaaggtgatgtcctgattattgataccggtgctaaacgtgatggatatttctctgactttgacaggaactgggcttttgggcatgccagtgaactgactaaagcggcatatcgtgcttgttacgaagcaacaacgaaaggctttgaggcagcccgaccgggtaataccacctcggatatttatcaggctatgtggggagtattagaagcaaacggcgcgctgggtaacgacgttggtagaatcggacatggcctaggtatggaactgacggaacgtccttcaaatactgcaacagataatactctgctaaaacctggcatgattatgactctggaacccggcatggtttatgccccaggtaaatcaatggttcatgaagaaaatattgtcattactgaaaatggagctgaatggttatctgtaagagccgcgcctgagcttattatcatctaa

SEQ ID NO: 200357 - DNA, 996 bp, Klebsiella oxytoca
atgacaggtaaaaagaatattattgctggctggattgccgcactggcagtcgctgttatctggggggtaacgggggttgtatctaaaccgctatctatggctgtagattccatgacactggtgttttttcgttatctgacagctgtcattggattaatcattattttcacatgtacacataaaagcaaatctcttaacactgaactgggctcatcattaaaaattgacaagtcagatattgttaaaattgcattttgtgggattgtagggcagggttgtttctcgcttttcaactttctttctctgacacatatcggcgctaccgaaaacggtgttgtgcaggggatgcaaccttttgcaaccgtcttctttggcatgttgtttatgaatttccgcatgaacaaatggcaatggggtgcttttatcgtctctgctatatgtatctatgctatgagcgtggggccgactaatctagtacatggaggaacggcctggcttggatatctttatgtcgccatctcaatgctatcccttgcctggacagcataccttcgggaaagcctggcgattaaatatggttcagtggtttcaatgctgtaccaatatattgctgtggctattgccggaattgggatggtctttgcactcggtcttgatttatcccagtttaatatcatccttagcagtccattgctccttggcttgttgattttcctgggtatgggtatttcaggaggaagctatctgattcagctttactcttttaagcacattggcgtggaaaactcgacaatgaccctgaaccttatgcctctggttagctatgttgtcgccatattcaccctcggtgaggaaatggttctgagcaagaccatcattgttcttctcattgtcgtggcattgtatgtattcaccaaatacgcagatgcaccagaaaccccggcaaaagataataatggggtaaaggacaaagattcaccaacttctaatgtgtaa

SEQ ID NO: 200358 - DNA, 681 bp, Klebsiella oxytoca
atgcgcacaaatgctggccgtgagcgcgatttccgacaggaacgccagcatctcctcgatgcactggccgttctgctggtcagcggttgcgacattgccacgtttaacgtcgccctcaacagttcacagatatgcaaggcattaagtccaaaagattcccggggtgatgtaatacctggtgaagaggtcacgccttcccgcatttgccgcgcactcgatctgttagaaaattacggccttatcgagccgtacatgcgtcgtctggacccgtacacaaaaacatacctcccgcgtcatgtcactttaacagagcagttcttcaggctcctccaggtcaatctcgatctgctgtacaaagagcgtgaagaacgtctgcgcgcgctggctgaggggattcttgcccctggcgaagtgatgtccgtaaaagcggcccgacagcgcttctttgacgagaaagtggcgcaggccctgaaggttcgccgcgagcgagcgatagaacagaagcgcctttccagaattgcgcgttctacccggctcgatgaccggcagttccagattgcagcctggctgatcaacacgcggccggaagtctcaggcatgactccggatgatttcgagttgctggtctatcattacctgcgtcagatcaagctcaattttgacgctgagccaccaggctaa

SEQ ID NO: 200359 - DNA, 237 bp, Klebsiella oxytoca
atgtcgcagcctggaaatgcagtttcctcatcgaaagaaaaacgtgcgtaccgcaaaggccatccgctgagtgcttctgagcgacaacaaagttttgttgcgcggaaacgtgaaacgcacaaagaaattaagatccttgtgcctaaagagctcaagagcaaatttcaggaaatgtgtgcagaaagcggtctgagtcaggcagaactgtttagccgtttaatcgacaaagccagttaa

SEQ ID NO: 200360 - DNA, 564 bp, Klebsiella oxytoca
atgcaaacaatgcctaaaaaacatttgtgccgatggcttctgaccggtctgctcggtctgtttctgtgcgcgccagtaccgaatacttacgctgccaccgttgaggcaggattttctccggaaggtacagctctccagcttgttattaagacaattgagaccgcgcaacaggaaatccgtctgatgggctattccttcacctctccggaggtggccagggcacttgtcagggcaaaacgtcggggtgtcgacgtgggtgtggttctggactggaaagctaataccggaaagaacaacaactccagtaaagcagccatgaacattctggttggtgctggtattccggttcgtacagtcagtgcctacaaaattctccacgacaaagtgatcgtcgctgatggccgcaacacccaggtcggctcatttaacttcagccgggcagcagaccgttcgaattcggagaacgtacttgtcgtctgggatgacccagtcttagcccgcagctacctgaatcactggacatcccgctgggcgcagggaacggactggaaacagacgtactga

SEQ ID NO: 200361 - DNA, 2181 bp, Klebsiella oxytoca
atgagcctgaatcctcgcgacttaacgcagggcggtcaggtcgcattcatgcgcctgaaaatgttcctgcaaataaataacctgatttcttattacgttattatggggacggttttatttggcatcgccgtcctgtttatgcgaatgagtattcagaatctgaccaacggcattatttactggtttgttcgggtaatgtcgccctttactgaaaaaatggtcagtcagcctgtctataccatccgttattacgaacataacctgcagtacagcgccaggcaggtactgagcgacagttacaccctttactgtggtcaactgctgaaacaggaactggttattgccggatgtgccgcgctgctggtcgcctttctggccacattcgctgtgtactggtatctcggccgtaccggtcgtaagcagagcgaggatgaaatcattggtggccgtgtccttagcgaatcaccaaaagacgtcgcccggatgatgaaaaaacgcggagaagcttccgatattcgtatcgatgacctgccgctgaagctggattcagaaatccagaacttcgctatgcacgggacagtgggatcgggtaagtcccagctaatgcgtaagattttgaagcagctgcgcgagcgtggcgacctggtgattatttacgataagggctgcacctttgttgaagatttttatgatgaatcccgggatgaagtactcaatgcgatggatgcccgctgccctaactgggatctgtgggaagaatgccgcacgatatctgagcttgaaaacgccagtagtacacttatcccggcgagcagtggtgaagatcctttctggcagggcagtgcgcggaccatattcgcagaaggtgcagagcgcatgcgaagagatgaagaccgcagttacaacaaatttctgcgtacgctgctggccattcaacttgatcagttgagaacctttcttgctggtacgccagcatcgactctggtcgacggtaagattgaaaaaaccgccatctctatccgtagcgtactgaccaactacgtcaaggcgatgcgttatctccagggtatcgaccgcccgggccgggagaaatttaccatccgggagtggatgaagggccaggccgataaatccaggaatggctggttgtttatcacctctgatgagcagtatcacgagtccctcaagcctcttataactatgtggctcagtattgccgctaccagtttgcttgcgatgggcgagaaccggcagcgtcgtgtctggtttgtatacgatgaaattccgtcactcaataagctggccactctaccccgcatcattgctgaaggtcgtaaattcggcggttgttttattctgggctttcagaacgaggctcagatggaagaaatctatggccccaaagcggctgcggggctttttgatctgctgaacactaagttcttcttccgttctccaagtgcccagattgcgaagtttgtggaggaggatatcggggaaacccgccgtctcaagttcagcgaacagaccagctttggtcatgaacaggtacgtgacgggatttcttttggcaaggaagaagaacgcgtcagcatcgtcagctattcggatgttcagtcccttaacgacctgcagtgttttgtcaccctgccgggaagctacccggtagtgaaactgacaatgaagtatgaggcgatgcctaaagtggctgactccctgctgttgcgggacgtgcagaccagtctcgatcagaccattgaggatgagctggtgcgccgtacagaggaggagcgccgcaacctggatgagttgtttaaccccgtgacgccggcacctgaaactccactcccggagacaacaccaccgaccggcacccaaccgaagacatcgccatccatagtctctcctgcaacggccacggtgaataccacttcttcgaccggtgcaactactggtagcgctgttgctaccggagggacggaacgagatatcgaacaggatttacctcaggatattcccccgggactgaacagcgacggtgaagttgtggatttcgccgcgtatgaggcctgggctcagacttcacatcagacccgcgatatgacccgcagggaagaggtcaacattaaccatgcgacagataaagcgcatgactttgatgacgacagggaggtgttctga

SEQ ID NO: 200362 - DNA, 396 bp, Klebsiella oxytoca
gtgaaaacgaaagtctggagtctgattatattatctgcagtattcattggcggcttctctaaatttgctgaagcaaaggaacagtccgatgggataaccattcaaaactataatttaatcaaaaaagaagcgctagatggagggaaggaacagaacctcattcttaactcttcgatgcaggcaatgtgggaaggaattgtatacacgaatgcattagctaaaatgaaatcgggtgacactcttatatgcactggggaagaagttaataatggtaaagatttatcaacgcttgttgataaatatattaagcagaatcctggtaaagttaactcaaatgatagatttgctcttgttgcgattttagcattaaatgagttctatccttgtagtaaataa

SEQ ID NO: 200363 - DNA, 732 bp, Klebsiella oxytoca
atggtaagaagtaaatataacttaagtctactgattttacctgtgagctttgctatagtctggtggcgagcaacatacagctatatttcatacgactggatgtatttcattccttccttagttctattttgccttatagggtatttcctgttgtgggcagtaagattaagagggtatctattaaggtacgagtctttggaggagtacataaaatattttgtaggttgcaaaataaagttgtcgtttataattttgttgttttttactctgctggcagagttatcccccttgatttactatcctatttattgtgtctttggtatgtttttttctatcttagtatttatgaagtataaaggtagagatgcgattgcaataaaagaactgttgttaaatagtgaaagtagtaaaaatgatgaaatatgttttcagctgcttagtggaaattacataaagaaatgtgcacttactgattcagttgttgttaacggcaatgtattgtataaagcgcaaccatttaagtcctcagaagtaaaagatgtgtattcaattggctgtagcttaagtacggcaaaaaatagtggtattcctgatatggcaggggccaataatatcgttgatgatagttctttctctttgacgagggtaaacccgtctactgggctttacatgactggaggcagcctagactctggaggtaaccattttggtaatccagaaaaaatagattga

SEQ ID NO: 200364 - DNA, 2850 bp, Klebsiella oxytoca
atggccgttgatacgatttacaccgttgccggcggggcatggtttcaggatacgctcaatggcgtggcggcattttttaacagcagggccggagactcactgattgctatggccaccgccgtatcggtgattgtcggggcggcaacctatatccggacacgcaatattatggacctggtcaaatgggccgggttttatgtcctggtgattgccgttctggtcggggacaagcggaacgtgcagattattgatctgtctgaaccagcggccatctatcaggtggataatgtcccgaccggccttgcagccccggccagcctgatcacccgtattggtgcaggtatggcacaggtttacgattttgtgtttgcccggccggacgcgctgacttacagcaaaaccggaatgctgttcggcgcgcaactggcggcggggagcagtgatttccggttctctgagccggaaattcagcgcatgttctctgattacgttcataactgcgtggtgggtgacattatgctgaacaataagtacagcattggcgacctgatgaattctacagacccctacgcgctgatattcagtaaacccagcccgctgcgtggtctgtatgacaaaaaccgcaattttctgacctgcgagcaggccacaaccaaaataaacacggattcgagtgatatcagtggacggaatatgttcccgtttctccagcaggtgcttaaccggatgcacggtttcacgaaccaggtctttggtccgacaaacggtgccagtacggcactgttcaccgaaatgctgggcgacagctataactattttcacggcaattccatgacctccaccgaaatcatccgtaagaacgtggtgatgaatggcctgcgcagtggtctggagagcttttcagcgcagaatggcgatactgccgggctggtgaacaccgccacgcagacctcgatggcaaaaatgcgcctgtctcaggcaaccagtgcgtccattgctgccaacacgctgccggtgatgcacagcgttctgctgggcatgacaatggcgctgttcccggtgctgattgttctggccgtggttagttccctctcctggaccattatcaaaggctatatctacaccattgcctatttgcagatgtggcccattctgttctccatactgaaccatgcaatgaacttctatctgcagggcaaactcaacgggacggcggtgacgctggccacctttgaccaggtgcagaatacctattcagatatcggcaccacagccggctggctggcgctgtccatcccgtttatcgcctgggggatggtgaaaggcctgggacaggtggtgtcgcaggcggggaactatctgggacagaccctgcagtctgcctccacacaatcgtcgtcacaggctgtcgacggtaactggtcctataacaatatgacgaccggaaatgtgcagggcaataagtgggacactaactacagccatcgtgaagggcatatgaccagtcagttggaaagtggtgctaccagaacgctaacctcgtctgggcagaatgtttttgataccactggagcaatgtcgaagttgcctgtcagtctcaatggtgccgaagtcacaagcagcagcttgactcaacaggccagagaatctgaacagcgggcacaaactgcactcagcggatatcagagtggccgttccagtagctggagtcagttgcaacagtttgccagccagcgtgggaacagcgattcgttagtacagggttcagatcacagtagtggcagcaactctagctcaggtattaataaaatgctcacagctacagaggggtatgcaaaagctaataacgttagcacccaagaagcgtataaccaacttatggataaagcttcaagaggaactataacagctggaagtaaagctagtgtgggcggtaaattatttggaaccggaattgaagcccatacaggagcagaatttagtggtagtagcggatcgtcgcatggtaccaatgaaactaattcacaaacaaatgatttcagaaatgatagagcctcacagtttgctaatgatttcagagagggcttagatatggtaaccagcagtcgtgtaactgcagggggaacccatactgatgctgcatcagcaaataaagtagaacagttggcggcaacgctatcagagacccaaaacagctaccaacagtactctgacagtatgactcgtagtcatgaatacagcgaaatggcggcatatgttcagagtaatagtgctcagatcaacagcaattttgaccaacaatttgcaaactatgtgatgcaaaaatctggtaatgctgaagcagttttgagtgacacatcatctgcggaagttgcagcagaacgacagaaactggctcactcatttgttcaggataagatgctacctcaaattcaggctgaatatcatgggcataaagctaatcttggtggtggaatgagtcaggcagcatcagtaccaggagaggaaagtgtgaataatcactggaatgaaaactcagatgttattcgtgatcacgaaaatgcagccggcataaaaaataatgtacaacaaacagttgaacagagatattctgatgctagaactcagttaaatgatgacagtcaagaaatagcggggcagaaagaaaagattcaggacatgaggaagaatctacagtcagagcagtcaacagctgctgaagagcataggaagggatttgaaaatgaaaaagcttcgcagaaatcactggccggactaaataatgatgacttaacgaagatggctcaggatgcacaagataaaggaacaacctattatggtaagaagtaa

SEQ ID NO: 200365 - DNA, 612 bp, Klebsiella oxytoca
atgcttattactgtattgcggaccgccatcctgatggcggcgatactgtccggctgcctgcacgccgggacactggatgatatccgtgctcttgaggccggaaaaacaggactcagcgcacccgcgatggattcgctcagcctgccagaaagcgaggcggcaacaactccagaccgtgctgctcagaatgcctcacccgtctggtattcgttgagtgatggcaggaaagttaacctgcaggactggaaggtggtgctgttcatgcagtcaacctgccagtactgccgccagtttgctccggtccttaaagacttttctcagcaaaccggtcttgatgttttccccatcagccttgacgggaagggggatgccgaattccccgacgtcctgcctgcaacgccggatgtgatggtggaatatttccagagtggcctgccggtggccacacctaccacctttctgaccaacgtcaatacgatggaaacctggccgcttctgcagggggccgcagaggccggtgaatttcgcagccggctcaatgaggtgctgcgtatggcactggatcggcagtcagggaaaagcactccactcaacacgcagggacaacaataa

SEQ ID NO: 200366 - DNA, 369 bp, Klebsiella oxytoca
atgtttgtgaacaaaaaaaagtatgagcttgtcctcgcccgctatgagctggccgcttcccgcgccgacctggctgagcagacactcgcacagctttacggtatggcgctgaaatatggcgggctttacaagtgcattctcgaatgccgcgaagcggcaatggctgtgactcaaccggggcgagaaagcacaaagctgaccacgcagcgactggcctttatcgacaggagattaagcgatttgctgcctttcctgacgcaacagatgccggatggagaaaggctgatgtggaacgatatgctggccagccgatccactgaaatagcttatggcccggcatcccggctgccggaggaggaaaacctgtga

SEQ ID NO: 200367 - DNA, 447 bp, Klebsiella oxytoca
atgatggatatttcttcattacttctacgagattttagcgatctgaccaggccggagttaattacacggttgaggcgcctgaagatccttcaggcacaagtggagtacacccgtgacaacttttctccccggcagctaaaggcattcgccctggccatcctccttctggtcatggcttatgcattagccgattccttaatcttcagcggcataacctgcctggtcacactcattggggtactgcgttattcccggttacccatgacatggcacacacagctaaaagacggtatctcccggttcgagagtcttcgaagttctccgcttcgtcagatggatgaagcggatgcccattatgactggcattacgcctcttattgtctggctgctgaaatccagcttatttactccgcgctttcgcagccagccagacccttcagcgcataa

SEQ ID NO: 200368 - DNA, 645 bp, Klebsiella oxytoca
atgataaataaaactctgaccctcattttatattgccttcgctggctggcatgggctgttcattatctggttatctggcctgccggaacgctggtactgattgtagctctggtgttctgtcttgataaaactacgccgggaatggttgtggtggattatctgcaggaggccgggaatatcaccgatggccagcgctggacgtggcgagagtgtacgaaacagatacctgctggactccctgcctcatctgaacttccaaaaagtaccgacagttttcagccggacgcgtgcccggaggtggtctccgatgccagaggttatgcagcatatgttgaccgtactttgatgagaacgctgaactggctgtgggttctgatggggttgacttatgccggactggcctggcttctgggcatcagaccgtactttccccgctatgtatttgtcaaagtcgcaaatgacaaggggtatatccgctgtgcttcatcccgatcttgtccggagcgggggatgggagttccggcaattttcccggtgaaaaagaaatccgaaaaacaccaggggtgcgatgtgtatgcatcttctctgtcctccctgactctcaacaaaaacgctaaatggcccgaaaacgaaagcgagaaatga

SEQ ID NO: 200369 - DNA, 222 bp, Klebsiella oxytoca
atgggaagcagaaaagtcaatgtgatggtcgtgggggaaaccgggactggcaaaactacgacactcagtcaggtcactcgaattttcctggcaaagtctgacgtaagccagctcagggaactgtattccggtgatgacggggagaggctggcggaggctatccgtcagaactgcaacatctggtatccactgaagccaggggacgggcatcatgataaataa

SEQ ID NO: 200370 - DNA, 1416 bp, Klebsiella oxytoca
atgttacttcctgtgattatggcgggtggcacaggtagccgcctgtggccgatgtcccgtgaactctatccaaaacagtttctccgactgtacgggcagaactccatgttgcaggaaaccatctcgcgcctctccggtctggatacccatgagcctatggttatctgcaatgaagagcaccgcttcctggtggctgaacagctgagacagctcggtaaactgtcaaaaaatatcatccttgagccggtgggccgcaacacggctccggccatcgccctcgcggcgctgcaggccacgcagaatggcgatgacccgctgatgcttgtcctggcagcggaccacatcatcaataatcagcaggtcttccacgacgccattcgcgtcgcggagcagtatgcgcaggctgaccatctggtcaccttcggtatcgttccgaacacccccgaaaccggctacggctatatccagcgcggcaatgcgctgggggaaggggagcacacgccttatcaggtcgcccgctttgtcgagaagccggacctggagcgtgcgcaggcctatctggcctccggagaatattactggaacagcggcatgttcatgttccgggcgaaaaagtatctctccgaactggcaaaattccgcccggatattctcgaagtctgcacggctgcggtccgcgccgccgacagcggcagcgactttatcagcatcccccatgaggtgttcagcacctgtcccgacgaatccgttgactatgcggtgatggaaaagaccgccgatgcggtggtggtggggctggatgccgactggagcgacgtcggctcctggtcagccctgtgggacgtcagcccgaaagatgagctgggcaacgtgctgaccggcgatgcctgggtgcacaacagccagaactgctacatcaacagcgacgaaaagctggtggcggctatcggcgttgaggacctggtgatcgtcagcaccaaggatgcggtgctggtgatgaataaaaaccgcgcccaggacgtgaaaaaggtcgtggagtacctgaaggccaaccagcgcagcgaatacaaacgacaccgcgaaatctaccgtccgtggggccgcagcgatgtggtggtccagacgccgcgcttcaacgttaaccgtatcaccgtcaagccgggcggggcgttctccatgcagatgcaccaccaccgcgccgagcactgggtgatcctcgccgggacggggcagataacggtcaacggcaagcagttcctgctgactgaaaatcagtcgacctttattcccattggtgccgagcactgcctcgagaacccgggacgtatcccgctggaagtgctggagatccagtccggctcctatctgggcgaagacgacattatccgtattaaagaccagtatggtcgttgctaa

SEQ ID NO: 200371 - DNA, 1035 bp, Klebsiella oxytoca
atgcgtggtgtttatcaggccacgtacttacagactttttctcaaaggctaaatcagacaggttttaaacagtctgaccctggttctgccttcgatctactggtaggtaccagtacaggaggaatcgttgcttgcgcattagccgctggtattcagcttgagaaggttctcgagctttaccagacttatggtaaagatatttttccacggcagcgactccgtgcccttccttttgtaggtaaatacgttcgcgggttatgctcgggactagcttcaggtgattttgccttacgcaaagtgcttaaagatacctttggtgaagaaactatcggcaaagtttatgaacgccgaggaatcggtttagccatcactactttagatttaaatcgtcactcctcaactgtatttaaaacaccgcatatggctcgcctaaatggacgagacaatgatcgactactggttgatgtatgtatggcaactagtgctgcacctatccttcgatcaattgcacgccttgaggagccaggctctggcggagcaatcgtcgattacgttgacggtgggctctgggctaataatccaggtgctgtaggcatgatcgaagcccatgaaattctccagctcaggggcgagactgaacgccctgtgcatttattcatgctgggcactcttcctgttcagggaggtgaggaacttgccagtagcagtatgttgcaccgtggagctttgggatggtctggcggcctcaaagcaatcactgcgagcatgaatgcccaggcggttgcttgcgattatatggctcggaaaattgccgagttgagaggcaatggcagttttgcataccgaatgccagctcagtgcccctctggggagctgcacaaatacctcgaaaatatggatgacgcacgcccaagagtactaaatgcattagcccggcaggcagtgtccgacgttgattacgcatgggctctgaccgaatcaaataatcacatgaaagaatttcgaaccgccctgtcgattaaatctaatacctaa

SEQ ID NO: 200372 - DNA, 1065 bp, Klebsiella oxytoca
atgacgttaattgactgcaataaagaaatgaaagggtatcattcagaaaaagtaactctgtcaaataccgaccagtctgaaatgcgtgaccgtcgtgataatggaagaaaacggctcgaaaatggcctgactcgctcatcccatccattgccaaaagaatttagctctcaaggttcttatgcgatgcgcaccatggtccaggacgatttatgtgattacgacatcgatgacggaatttatttcaacaaagaagacctgaaagatgaaaacgataattatcttggtgcgcaggatgcgcgaaagcgagttcgaaaagcgttgaaagacgacaggctggcctatgatgctgttgttaagacaaattgcgtccgccaactctaccctgatggttatcacatcgatatcccagtataccgttcatttatcacaaaggacttttggggtaacgaaacaactgaatatgagctcgccagtggcgatgagtggactaaatccgatgcccgtaaggttacacaatggtacaacaatgctgttgcttcagagcttaaaactggtcaggctgataccagccaacttcgccgtgttacaaagctgaccaagaaaatggctcgttcccgtacctcatggaaaaagaaaaccacaagcggtatttgtatttcgaaattagttatagatcattttgtttgtcaggcgggccgagatgatgatgctttacgtgaaacgtggaaggtcatcaaatctcagctgacatatagcaagcgcatcgggcatccagtgtttgcagataagaatcttgcagaagaaaacgatgaggccgtagctttctttcaagaatgcctaactgaggcgctaaatgcacttgaagtgcttgaagagtataactgcactcgtgaaaaagccgcgcttgcctgggataaggttttcaacactgattatttcagtacagaaatcgctcaggacaccaatatgtccaaatctctcatgcgcccagctgtcagcgcatcggcatctctatccttccccgctcaccccgtcacacctaataaatcagcggggtttgcatga

SEQ ID NO: 200373 - DNA, 1767 bp, Klebsiella oxytoca
atgagttggttactggagaatcctgcgcgctttttgcgtgagcagaaggagctcaaacgccttgagagtgagcaagaatggctaaacatggctttgcgctttcagaacgatggtacgttgtcagtagaaataaacatgactattcatggtcgcgtttatgaagggaagatgacttatccggactcatttccagattctccaccctatatccgtcccagagatcgttccgagaggtggtcaaatcaccaatatggtgaaggggggtcactgtgtctgcaatggcgagctgataactggcagcctgacataaccggggcggatatggtgctcagtgcatttgagttactgaatacagagcatcatcccgaactaccaatttcagtcccttcagcacatcgtttaacagaaggccagattttgcggggttcgatccgccgcttaatactaaccaccgatatcatggaaacgtggagtaatctcccccccctatccagcgccagtttaaaaacagctaccctgttcagttctgacaaggctgtaacattcatcactcagatttccgatgcagagaataatttaaaaaacgtcgaagacgttccacaaagtcttggatcattcactaacttactttcactatccggagaagggtgggtgttcaaaagtgaaggatttgacttgaaattgaaaattaaatcagcagaagatttacttcaggcgatatcagatgagggctttgatacagtagacattctggttaaggaagataataagtacaaggccagaacgatagtgttactaggcagggatggatcgtcattgagaattttttaccttgcccctggtgatgaacccactatacacgaattcagtattatttggccttcatccactgagcttaggttatcagaggaatcacaacggctgacgaagatcagaataggaataattggcctaggctcaatgggtagtaaaatcgcaacctcgcttgcccggtcaggaataaagcgatttttgttagttgatgatgattacctagctaccagcaatttagtgcgtcacgagctgtactggaatcatgttggcgaacataaggtagagggtgtaaaaagtgcactttcactgatttctgcgggcattgaagtcgatgcaagtattgttcgtctggcgggacaagaatcctcagtatttatggcttccatccttaatgacctttcaaaatgcgatctgcttattgacgcaacagcaaaccctgaggtttttcttcagttatccgctcttgcgaaacgctataagataccgctgtgttggggggaagtctttgctggagggtacgggggaatgattgctcgttcccgcccgagttatgacccaaaccctttggccgttcgcgacgcattttatagtcatctatcaactcttcctaaagcaccttttgatagcgcccaaaattacgatggcagtgaagaacagcctctgaccgcatatgacagtgatgttggatttatcgctacagcgctaaccaggcttgctattgatacagcattatcaagagatcccagcgtattcccttactctctatatttgctaggcatgcgttgtgagtggatttttgagcaaccttttgacacgcatccagtccatgtgtctggagctggatgggatatcgatgacacaagcgtcagtgaagaggatctcttagctgccctacaagcgatacggcaaatttatgaaggagaggaacgtgctgaacctgatacttccggctga

SEQ ID NO: 200374 - DNA, 462 bp, Klebsiella oxytoca
gtgctgaacctgatacttccggctgaacaacaggcagttataatggacgctctatctaaagccgggcgccgcgaaattggtggggttttaatgggggaacatattggacccaatgaatttatagtacgcgaaatgacagtgcatcgttgtggtacatttgcctactttgtcagacggcttgaagaagcaatcagtgggttcagtaaattttttaacgaaacaggccataattatcagatatttaactatatcggtgaatggcactcccacccatcttttgaaccgtaccccagcagtaaggatgacaggtctatgcttcaaattgttcaggataaaaatgttggggcaaacttcgcggtccttgtcattgtcaaatctggttcaaaaggtgagctaatcataactgctcacacctatctcccaaatggaacgaaaagcgaatcagaaataactttgttatga

SEQ ID NO: 200375 - DNA, 648 bp, Klebsiella oxytoca
atgtccacaatgaagcctgatgcagtctggtatcctccgcagtttccgaagcagggacaatggttcacacgccttgtttttattgctgtggcgatattgctggcaggttgtgacagacccgccagagaagagagtgttagcggcggcggtaccatagaagcggttaaccatacccactgggcgataaaccatttcaacgtagacgggcagtcagggctggatattatcggcccctggcaggggggaggcggtggctgctgttacggcgtgccgacaaaatggaaaccgggaatgacggtgaaagttgagtgggaaacgggtgtggcttttgccgatgatgtacctgaaattcctgagccgaaacgacctgatacctccgggatgaacgagaaaaattattatcaagtatggcaagtgtattttgatgaaaaacaagaatggtataggaaaattaaggcactgaataaagcgcatacaaaaatagtccctgttcccgattataccgggcaaaaaacctgcggaataaaggttcactttttaccctgcgatcaaataaaagtcaccaccagctgctacgactacggcaatccaaattatccgattaaagatccgatcaaaatggaggaacccaaagtatgtccacaatga

SEQ ID NO: 200376 - DNA, 576 bp, Klebsiella oxytoca
atgtctataataaagtctgatttaggctggtatccaccgcagggacgatggctgacacgctttgtttttatcgctgcggcgatattgctggttggttgtgacaggcctgccagagaaaagaatgttagcggcggcagcggtaccatagaagcggttaaccatacccactgggcgataaaccatttcagcgtagatgggcagtcagggctggatattatcggcccctggcaggggggcggcggtggctgctgttacggtgtgccaacgaaatggaaaccggggatgagggtgaaagttgagtgggaaaccggtgtgggagggtctaaaggttttcctggatttgctaatacagataagtacttagaatgggaaaaaaaaatcaaagctcaaaaccggaaacatagccagacagtatcggttcctgactataccgggcaaaaaacctgcggaataaaggttcactttttaccctgcgatcaaataaaagtcaccaccagttgctacgactacggcaacccaaattatccgattaaagatccgatcaaaatggaggaacccaaagtatgtccacaatga

SEQ ID NO: 200377 - DNA, 861 bp, Klebsiella oxytoca
atgccgattcggacagcgactcggatagcgacagcgacagcgactccgattccgacagtgactccgattccgacagtgactccgattccgacagcgattctgactccgacagtgactcggattcggacagcgattcggactctgacagcgactcggattcggacagcgactccgattccgacagcgattccgactctgacagtgactcggactccgacagcgactcggatagcgacagcgattccgattctgacagtgactccgactccgacagcgattcggatagcgacagcgatgccgactccgacagtgactcggattccgacagcgattctgactctgacagtgactcggactccgacagcgattccgactccgacagcgattcggattcggacagcgactcggattccgacagtgactcggattccgacagcgattcggattcggacagtgactcggattcagacagcgactcggattcagacagcgactctgactcggacagcgattcggattccgacagcgattccgactctgacagcgattccgattctgacagcgactccgattccgacagcgatgccgactctgacagtgactccgattccgacagcgattccgactctgacagcgactcggatgctgacagcgattctgattcggacagcgactccgattccgacagcgattcggactccgacagcgactcggattcagacagtgactcggattccgacagcgattcggattctgacagcgactcggattccgacagcgattctgactccgacagcgattcggattcggatagcgactcggatatcccgcaagccaacgcggataccaataccgctctga

SEQ ID NO: 200378 - DNA, 207 bp, Klebsiella oxytoca
atgaacacccctaacgttaaaattcttcgcctttctgctgttacggagaagactggcattgcgcgttcgactgtctacgattggattaatccaaaatccccacgttatgacccaaccttcccgaagcaacgacgtctgggtcaacaatcagtcggctggcttgaatcagagattaacgaatggcttttactccgccatccggtctag

SEQ ID NO: 200379 - DNA, 759 bp, Klebsiella oxytoca
atgtcacgcatacctgttactcttaaccaaccagccattaggcaaacaatcaaaaatacagccaaacgaaacaactgcactgaatcatcggtgctttcatcttgcgtaattgcatgcgccccatttttagaaaaaatgaatgcggatcatcaatctatacttaacctgcaaggaacgcttcagaaagccatcttgaaggagactatttctcaatatagaagtgagcgacaaatttatcctgatctatattttagccttgcttttgaaacctgtataaaggatcaaaccctgatcaccccagcaggcagccatcagcaaaaagccataaatgatgggatgagtaaaacagaaaaagaaacaataaaagcacagatggaagttctcttagagtcgagcaatgcaaaaaaaataatatacatttaccatgctcgttatgttgatcctaaaactttatttacatatgggcaggcaaacatcatcccaattaaagaagtagtatatgaaggcaatgctttcgattttgacaacattcaagtaatgccaacttcatatttaatcgctgtcggaataaatgaattacttaagatgaaaggaatatttcttccccacccatgcatttgttgggtaagcatctgtcatatcaataatttttcagtaatgcttcctgtcgttcgcgaagtagatatatcggttaacagcaaagcatctggtgatgtcattattatcaatccattctcaagaaaattatcacaaatataa

SEQ ID NO: 200380 - DNA, 564 bp, Klebsiella oxytoca
atgcgttcatttttataccttgtcagcacagaaaatgacgactctaggttacaccctgcttgtcagtctatatgtacagaattctcgatattgcctgataatgtggtcattgagatcattgataatttgcagcctttatcagaccaacgcttactggatgcattacttgctgacaaaatgaataaaggcgatctgctcatcgtcacaaacttgagtagcctcggaagaaatgttgaggatattgaacaggctttatttttttgctttcgcaaagagataaacgtttattgctatcactcttacacaaggattgagccaactgccgagagctgtatttcttttctcatcgcagctcaaacaaaagtcgatattcaaaatataaaatcaaccagaagcaaacatagaacaatcaagaagccattaggaaggagagaaggtagtaaatacaaaactgatattctcaagctcaaggctgcgggatataaacaatcacaggtggcaagaatattgaacataagcacatccaccgtcaaacgccactggagcaccaaaattatcggttaa

SEQ ID NO: 200381 - DNA, 522 bp, Klebsiella oxytoca
atggccgtacgtgtcgatctccattatcctccaatactggaagataccgccagttgcttccatgtcccgacgcctaaagccatctctaaattccgagattcagctaaagctaagcttgtagctgaccgtatacgtaagcaacgtgaaggcaagcgtatctatcgctgcccaatgtttatcatatgggtaagggagttttctacatcaggtaaatgccattatcacatttgcctgttgttcaacaaagacgcttactaccacctcggggactacgaacgcgaagataacctaagagggatgattacaggggcgtggtacagcgccttaaagttgcaccgggaagatcatccgagtctggtacatttccccgccaactgtcgctacgtgctggatagcaatagccctaattttcaggatcattaccaagaactgttaacgcgtctggattatctcaccaaacttggttcgaaagtgtttggcgagggagggcgtaacttcggctgtagccaaatcgaattgtga

SEQ ID NO: 200382 - DNA, 909 bp, Klebsiella oxytoca
atggaatctgctcgcgataaacgcactggagagattgttgaggctgaggatctctggttgctggatagcgttgatactgaaggctacgtgtgctggggatgtggtataaccatgtatcctgctgcatgggaaaaagataaaaaagtcagagcttattttaaaaagaaacgccatatccaacatcatcatgactgtgacgctgatgctgaaagcatagtaattcgaaagggtcagaaggagagtgtccgcaacatactggacagtgctccaggtttaatgccttcaggattaaagttgattgaacaacgcccggttgtggaacccgatattgcaggtggtgaaaacaagtccagttcgacgcgttcagcatcctcaggaactggggaaggtcattcacccgaacgacaatcccggcgtcaagtaaataccatccgcaatatttgccgggccttcctccgcttcccatatgatcgagaaatgtcgctaaacgttcctggaatcaaggggctaacttactcagaggtgtttaaaaaactccaaagtaaaattcagctctaccccgagccaaagatcttttatgcagaactactctggaataaatttgttgaagatgatgacaagctcatcatcccgttgtctggcgagtgggcagaagatgaatccggaaagcgtaaaccgtcccgaagttatcagatccacataacttggactgggtggtcaaaagctaagcgtactgtggtacgtaaagagttggaagctgctcggacagaggcgcaggaggctagagcaaaaagattgaaagataaggccagggtcttctttatcggtgagcaaagtgctgataacccggagatcttctacgtcactgattaccggttaatttgtgcgctcgtgggacatatgacttaa

SEQ ID NO: 200383 - DNA, 486 bp, Klebsiella oxytoca
atgtttgaagtaactatggtatcaagttgtcttgtttatcactggggattatccgttctgtcagaaaacaaggtaattgcttcggcagcattatatgaagcatcaggcctattcgatgtttgtcttggaatgttatacgcaaagttattggatgaaaaacaaaagaaaatctccaaaaagagaatgaatgcagggaaaaagggaggtgaaactaaagctgaagcttataaaaaaattcagcaggagttgattaagttgttagatgcaaattgtcctgagggtaagtggaaaacaaaagtagctgctgttgagcatgtctttagcgctttatggacatttgtggaaaaagttcagtcaggagacataagcagtcccctatcaactatgaatgaggaaaaaatgagggatcgcatagcggtatggtctacaaaaggagagctcaaagaggcatttaaaagaaatgtctcaaggaaaaataataagtaa

SEQ ID NO: 200384 - DNA, 2313 bp, Klebsiella oxytoca
atgtcagcagcagacgccactacatcattatctgggcagatatcccttcggtttgttgagctttgccagttccgccgacttggtaaggtccagcttgagattgatcctaagactactattctcgtcggtgctaataatagcggcaaaacatcaattctggcagcactgcgccacttccttgcagatggctcgtcatttggtgctttcgacatcagtgtttctcaatggccaaaattgcgggaacttggaagagcttgggacgcatcagaagaagatccatctacgtctggcgcatccgaagatgaatgggtagagcaacttggaaccttactttcggcgatgccaacgctagatctatggttcgatgctaaggccggtatgttccactatgtctctccgttcttgtcaaaattcagttggaaggggggcggggtaggtgtccgattgcgtctggaacctgctacgaacattgaggatctaaagcagttggcttggaagtatcacctgacgagaatacctgtgaaggatatgggaaaggattcgcttgcgtggccgattgatcttcttgatttttggctgcgagaaccttctctactcggccaggttcgggcctataagttggatgcagataacaaccctttggacggaataaagacctatgttagccagatattggatgctaactctagtccaattgatcgtaaacatttgcagaaaatcataaaggtagactttgtggctgcacagcgtggccttggtagtgaggaagcagattcccggtctgcttctggcccccatcgcataggtttattctctaatcagcttctcaaatttgctcgacagcatctaaatgtggctgcaacaggtcatgggcatcgagctgacctcataaaagctgttgctgatgcccagcaggaactagataaaaagattcatgaggctattggaccatccgtagaagaggttaaagagctcgggtaccccggcttgcacgacccccaagagattcgtttccgcacgcgcatacagacagccgaattactcgaccatgggacagctgttcagtacagcatgcagaaggattcattagaggagcttctcccggaatattccattggactcggttatcagaatttacagtcacttagttaccaactagtttccttcaaagctgctcgcctaaatcctgaaaagggcgcaccagtacctgttcacctggttatgattgaggagcccgaggctcatttgcacgtacaggtacaacgtattttcccaggtaaggcacataagctaatcagccctaacggtagcgctgagtcaggccttaaaagccaattgattatcagtactcattctagccatctagcacatgctgagaattttgaccggctaagatatgttcgccgcgttgccaagagtaaagaacaaaacatgcctaccaccgaggtggtcaatcttgggcaagtttttggtgatgataaaacgacccgtcaattcgctgagcgttattttcgcgttcaacacacagaccttttatttgccaatgctgcaatctttgtcgagggggttgctgagcggatgctgttacctcttttcattgaaagagattttgcaatactcaacagccgctatctgtccttccttgatattggtggtagccatgctcatcggctaaagtctctcgttgaaagactccgtattccgacagtaattattactgatatcgatcctgttgaagaaaaagttggtaaccctaaaaaaaatgatgagcctactacaaccttggttgctgtagctaatacaggacagcctgggctgcaatgcggaaacccgactcttcgtggatggcatcctaaattacaacagcttgaagatttcaaggacccgaaagacgagcaccttgtctggaacgaaattgccgaatgtttcgtgcgtttcgcatggcaattgcccgtagccgaagctgatggtcagtggccgagtacctttgaagactctcttattcttagaaatatcccttggtttaagcaactgattgatgaaaaagttgatggtgatggaaagaaaatcaaaccgccgaagggggcgctgggctcagtcgctagaaaggttgccgagaatgataatattccagatctgctctcagctttgcataagctaatgcatgggtcttttaataaaggagattttgccgcaagcatctttgaaatggttgctgcggatgagccgatagtctgtcctaaatatatcgaggatgcattggaatggctccagacacagctggagccaagcagggaggtgatgcatgactaa

SEQ ID NO: 200385 - DNA, 1950 bp, Klebsiella oxytoca
atgactaactcaccaatccttgacggcaatgatcgcgatgcaggggtagtagaagagatttgcggctaccttacagacacaccacctcgtaactacttcctttttgcaggggctggttctggtaaaacacgaacattggtggaagttttacgtcgccttactggtgtgaccgagcatgagaaggggggacaattagcacggtccctgaagatgtatgagcgttcgattagagtggtaacgtacacaaagaatgctgtctctgtaatcaacggacgtcttggggacaatagcttagtcagtgtgtctaccatccattcattttgttgggagttaattaatgggttcaacgatgatattcgcgaatccctaatagcagtaaaagaagctcaactcgctaaagagactgcagaggcacaagcgaaacctaagggtattactgcagcaaaacagcgtgatcttgacgaaatcacgaatgaaatcgaggatcttcggacaactgaagtattcaaataccatcctaatcgcaatacatatgggcctggggcattaccgcacaattccgtactcgatgcgacagcttggttgcttcaaaataagccaacactccaatccattctcaaagatcgacatccaatcatactgattgatgagtcgcaggacacaatgaaaggtgtactggactccttgatgttcctagtcaaaaagcgggagggcgatttgactcttggtctgctgggagatcatcgacaacgaatttatatggatggtcatgccgatcttccaagcattgttcctgaaaattgggcaacgcctgagttacaaatgaatcatcgtagccaacgacgtattgtcactctgatcaataaaatctgggaaactgaactggaagggaggacgcaaccagcaaagggttcagcacaacatccccgaacagaaaaggctggcggaacggttcggctcttcttgggggatacattgcaaagtccagacgataaggtgctcagcgaacgctggtgtgctgaacagatgttcgaagttagtggctcagtagcctggaatcaagaacaatataagctgcttgcgttggagcataagctcgttgccactcgtggttcgtttcttgatgtgtatgaggcaatgtttctgttagaaccccacaccgcagcgccatctggcagtggggacaacaaggggccttcaacagtacaaattttgcttaatgagcttgcgcatttagaagcctgcgtcagtaatgaaggaattgtgaatgagttcaaggcaaccgaggttttacgacgttatggtgctttagacaatatacctgaggactcagaagcaagagctgaacgtactgatgaaatgctcgaggcgatagctatatttgcaatggcttgcgccaaccctgagtcaacggtcgcggaagtattagcaccagttttaagtgcagaactctttgaagtagatcatcgccttcaggaggcttatgccgacaagtcaccagccccgcaagttcctggacgaggtgaggatgagtcaaagcaaacaagaatgcgccgtggatggtgtgcactgtttgctgctccatggaaacagcttaagtgctatcgaaattaccttgctgggatttcagagctcgcaacacatcaagtagttaaaggctctgagttcaagcacgtcatggttgtaatggatgatgctcttgctggtgggactcgctttaagtacgacacgatttttggtggtacgcagttaagtccaaatgacaaaaagaatgcaaagtctggtaaggagacaaccatcgaccggactttacgtttgctgtacgtgacttgtagcagggcacaagaatcgctcgctttagtgctttggtcgtccgatcctgctgcagcaatggctcgaatcaaggagagtcaatggtttgctgaagatgaaatacaaataatcacataa

SEQ ID NO: 200386 - DNA, 798 bp, Klebsiella oxytoca
atggtaggaattgaagatgtgcctcagctcgaaggaatgtgggcaccactcgatgtccgtcgtgggctcaggcaaatgtttagacgttggctacccactactagtcatctgcgctctggtttcgggcaagtagaaatgttcgatgaaatagagctcctcgatttttgccagcactaccgactagagtattttggtgcagcaaaggatattgccaaaatctgggacgagtcaaaggaacgtattgccgatggaggtcctactttcagtgagctaactcgtctaggttggatagttttcgacggtggtcgctggattatgcagtgctcacctccgggcacgctttcgcacatcacttacccaagcccaagcacgcaaaaatttctacatgaactttctaaaatcaaacttattgagaaaacctctaattttacacaaagtgtccaaaagcaagcagccatgatattggatgaacagttattggagcgatacatcccggctagcagacctgactggcttgcaggacggacagacgcgtgtccactatgggcgggtaagatcagatatactctcctggctttgaagcagataaatatatgtaacggaccatgccggggattagggatggaggcggaaaaatgtgcgtctgctaatgataaatatgaatcctcacgacgtggagactggaaaaataaagcggctgccattaatttcctggagaaggaaataattgattttttgatacagggccgcctaagaacgcctactactcatcgtgggaatcactgcatcgaacaataa

SEQ ID NO: 200387 - DNA, 4971 bp, Klebsiella oxytoca
atgtcagatttaaattattcatcaggtaataatgggggggaaggtgtgtccgtatctccagaatattctcttgtaaatattcctgcgtggcttgactctcctccagatgaagaatttcccgctttacctattaatactcgtctgcagaccctgccttttggtgagcttacttgggaaaattttgaacgtttaatcaaacgtattgtctttcgagaggaaacaatagctgattgttggatatatggagttccgggtcagaagcaattcggtttagacattcttgctacagcgaatgatgattctgattattttgtttgttatcaatgcaagcgtgttaggaattatacatcggatgatataaagaaagctgttgataaatttctggaaggtaagtggtttaataaaacaaaaaaactcgtattgtgtgtttcttcaattttgagtagaactgaatgtatcgatgaagtcaataatcaaattaaacggctttctttatttaacattatttttgaggtctgggatggtgctgaaggaggcgttctcgctgaaaaactaaaagtatatccggatttagtggacgattttttttctagagaatgggttagacattttaacggagaggatgctgcaagtttactaggggaaaggctgcaaggattggagctaaatcaactgcgtcttcaacttaatgatatctacaagaccttattcctcaggcatgacccaggacttcgtttgggttcgcaaagaccctcttctcttatatcccgttatataccaccgactgtaattgaatctagaaacgttatgtcttcagacatggtttcggaagaaaaagcatatcggcaatatgatgatggtactgtaaatagtgattctaaaccaaagcaatattctaggaataaacctgcaggaacacaagaaattaatgtttcattagatgagtggtttacaagacagcatcggagtgtgattctcggtgagcctggctttggtaaaagtactttactgcgtgttatggcattgcaactactttcaacatttgatgaaccaataaaaacctcgtggaacaacttattgcctgtatggatttcatttgggggttttagttctgctttgcaggcaaacccgctcctgagttttgaagactattttgataattggttacatcaaaatgcggcagatgatgttcgtcctctatttcgtcgagctataaaacaaggtggtatgcttcttcttgttgatggattggatgagggacaagatattgatgttgcaaagcaagctatggataggattagttctttcttagcaattaggtctatacccgcagtgttcactagtaggccacggggctatgaaagagtacgcccggatgggaattggccagttgctaaattaagtgcctttgataaaagtcaaatagagcaatttgcaaatatgtggtttgagtatcttgagttaccggatgcagggccagttgaacggatttcagaacgcgtacagcagcgcacgaatgatttccttaaagctacccaagtgaactcgagaataattgaattagctcagactccgcttttttgtcaacttcttatagacatatttagattttctcatcatttacctgagcaacgcgtaaaagtttatgaaaaaataatagagttattgatttctgaccatccctcagcccgttctcaggctgcaggtatttctgggaatatgctcccccgttctgaagatatgcgtgaaatgctaatgaggttagctcttgatattcaagagcgcggtggtgcaggtgttgtttcagtagaagcctgtcaggattcattctgcaattttttaactgatgatattaatgggcctggtcttaagaagtatgatgcaaagtatcaggctcagattataacagatcatgctttatctggtttaggattaatgattgaacggtctccaaatgaattgggattttttcatctcacaattcaggaatatctcgctgcccaagctatgctccgtaaagaagaagaacaacaactcaattggcttattagggtttggaatcttcctcaatggcatgaggttatccttgcatggtttagcatacgtggaatggatcaaggaaagggagcaaatcaacgcgcgattgattttttaaaagaatcggtaattactccatgggaaaatattcaattgctggttcttagaacagaactggctgcaaatgattttggactatctccaagggaagctcgtgctactattgagcaagcagcaaaagaaatagaaataaccccttttagaaaaattaggttagtactttcaggatatatcgcgcaagggcttcgctcgtcttctgtgaatagtatctgtgaggcttatataacaaaatggacacagaccagagacgaatggtgtaaagccaggatttttcgtacattatgtggttggaagccctcaggcgatttattacaagccttaaaattgggtttgcatgatgaagatctcaaatgccgctgggcttctgcagaaagccttgcaaaactgtactctggtaacgatgaggtaaagaatgagctatcacaaaaagttaggatgtggcctgacttagaggtacgagcagcagcgttatactgcttgtggaagggatggccaaactatgaagctcttaatgaatatgctgaagttgcaagtaagtcaatttgccaaagttttgctatagctggtgtattaattaaaatttcaaagaatcaacatagtgatattgatcttgaaaagatctgtcaaatgtattttacaagaactgttgactatgacttagaagggatatgctgcgagttattagttaaaggttggggaggtgacgagaaactaaaagagaaagtattaattgaattggatttaaaatttaaccagggtgtatttgaagttgaacgctttatttcttttttggtacgcgcgtggcctggagataatgatgttgccaatcatgtagttcgctatgtcaaaaaatatagtatcgccatgatgcatggaagtggattgtggcaggctattatatccgggtttggtggaaataaagaattaattaatgctataagagatgtattaatagagcgaaaagagaaatataaagctatttattgggggccggatacgaaaaatgcttatcttgcaatcggtgatgatgtagcgaaaaaagagatgcttgaagcatattctcaagttgatagtatcatggataaacattggatatgttcgacacttatgactgggtggaaaaatgatccggaggttcaacgatttttttctctagaatttttaaaaccaccggttgagaatgccattcttgccaattgggtgcatgtttttataaatgacaaagatgctagacgttcgtggttgcttggcgcaattactacaggtaatgataggggcgccttatcagctgttggtcggttacttgatgagtttaatgatgaagagtgcatagataccgttaaggatattttaaccaaaaaaaaatacaactattattcagaaattgatataaagaatagacttattgaaattgtacctaaagatccagttgtcaaacaatgggtgatgaattcttttgaagaaattgatagtttgtctttatcttcaatagcgataggttatgaagataataccactgtaagagaaaaaatattaaatgcgttatgtccaattcattcttatgctagaacggaaatatttcgaattattcgagagcacttgatgccttcagaatctatcatgcgagtgacctcaagtatttttgtagaaactaagcccttgattcgtacttcaggtctcattgcgaggtgtattgcaattcagcattatccagatgattttttattgtttaaacagatgttgtgcaaggaattagcctcagtaggcatggtttatgaaatgcggaggcgtagcgcatttgctgctttattatttctaaaagagtacgattactgtgcggagtatctaagccgagaacaggggtcttccatgcattggttatttgatcataagcatgaagatattttatcagctcggatcttatttgaatcttgggatgcgttaaaaaacaacaaatatctttctaataaagatgttaaaatatcatggtctaattttattcatgatgggactgcaagaggaagtttaaatgatagttcttctagaggtcaacttgttgcctgtttgaaaaacatgtcaattaaagaacataattctcaaagcctttttttaatggccgatcttcttcctgcatcaaacgaattacgagattgtttggtcgagataatgagtcagcaaggaaatatttcttattatgttgaagaagaaaaaatagctattgctcaaagtatttatgcagaacaatttcatggtgatactgaagcatataatgctttggaagagatctggaaatctctgaaattagatgaggatattcattcggaatatttatttaatgtgctttatgccttggctgttggatggccaaattcaaaattaattcaagcttacgttcaaataactgagcagccgaaagtatttttacatattgctttaatactttgtggtgtgacgggagatttagaaagagcacaggaatgtattgatgcgataataaaggaggctttacatgtaaatcatcctttcctctctttatacatagaggcacttaacaagtggtcatatacagagtcagctgatattcttttgcaaaaattccttaaaggggagatgtcttcacatttcattactgccttgaaattacttacatctactgggcgtgcaagcgaagagtttcgcctaaatatggttggttattttaacaatcaatttaattccgatgcgataattaatgaaggtgtcgatatttttaatggggaagttgtttcagttatccagataattgtggatgaatgtatgctaatgaccctttaa

SEQ ID NO: 200388 - DNA, 240 bp, Klebsiella oxytoca
atgttcttcggcccattgtgccagcgccagcgagaccagttctggcccgttgtccatccgcatcttcagcgggtatccgcggtttaccacgattctgcccagcacccggacgactcgctgagccgggatattcagatcgatttctatcgccagtggtgctggattacgcactggcagccgctgttttcccttttgacggtacgtccggcttcgacgaacttcagaacggcaatgatctag

SEQ ID NO: 200389 - DNA, 645 bp, Klebsiella oxytoca
atggctctaattaaaggagcgttaggttcgataccgtttgtaggtttagtagcaactgaacttacaggattaattgaccctttagaagctcgtaaagataaatgggcaagaactatagcaaaagttgttgaggagataagagagagtcaaaaaatacttccggaaacgttagcagctaacgagagctttatctcattcctttatcagtcaacacacattgctatcttaaatcatcaacaggaaaaaactgaagctctacgaaatgctctcatctcgacagtgtcgttacgctcaccttcagaagaaattatttttcagtacctccgatatatagacgagttgactgtttcagatattaataccctatcatttataaatgagcatgctgaaacatatgctaagcatcatagtcttgaggaggtactaataactaccgagcaacatttttctacaacatttgagcgaagccatttcagagcaattatgtatgatctggcaaatcgctcgatagttcaatttactgacttggatgattttgatgaattttcatcgggggttgcatcgataattactgagcaatccagcaaaaagccgatgaatattactccgttaggtaagggattcctagattttattcgccgttga

SEQ ID NO: 200390 - DNA, 1170 bp, Klebsiella oxytoca
atgaatatacttattattgaagacaaccaccaaaagttacaatctataacggaaactatcacagaagaactgagtgagcgttcaattacgccttctatatcaatagcatcagacttagctcaggcaaagagatacatttgcaccacactttatgatctagttatatttgatatgtttcttccagaaaacagtacttcgactaacgaacgagattgctcatcagagttaattcaagagttttcaataagcaagaactaccaaactgaagcaatcgcattaactcaatttgtcataagtgaaattgaagacattcaattatttaatctatcaggtataactgtcgttcattatgcagaagaccgtaattggaaactagcactaaaacaaaaaataaacagagcatctcaaaaggttcgctgtgactttctaatattttgtgcattaagtagtgaacgaggtgcataccaagaaacgaattgcacgttaggaaataaaaaaaatatttatgggatgaactgccaagaagtagaaattgatggttcaaaggggttcatcattactccccgagggatggggcttgtgaatatggccatcatttcctccaaagccattgaactttttcagccaaagatagttgcaatgagcggtatatgtgcaggcgtccaaggagaatcgaactttcttgatatcatagttgggaaaacttgttgggagtatcaaaccggaaaatggaaagatggaaactttgagcaagagccttattatgcagaattatcccgaagccttcaagtagaccttgaacaatctagcgaggatctagaaacaataaatcaccttagaaacaacttatacaactcagcattaaaaagcatgaaaataaggatcgcgccactctcttctggttcggcagttatagccgatagtgagatgatgaaaaaaattggtatgcagcatagaaaaatggcaggattggaaatggagatgtattcactttatgaatctgcggctcaatcgttgagcaaccctttagtttttggtgctaaggcagttgttgacttgggtggcattgataagaatgacgattatcaggaagatgggtgtattatttctgcaagatacattaccttaatgcttaaggagcaacttaaaaaactgaaaaatcatagctaa

SEQ ID NO: 200391 - DNA, 450 bp, Klebsiella oxytoca
atgatattgatagttgaagatgatgcacacaaatcatcacaaataagcgatatatgtgctgcgttagcatatgatattgatggacgtaccattgttgataatgtaaaagatgttgttcggtatctagtgcataatactcctctaaaaattgtactagatatgtcattacctagccataaggcactacccgggcagggaactccagtgccaatgccgacaggtggcattgaagtcttgtttgaattgaagatgaaaaaaataatgcatattcccattctaattttaactcaatatccagaaattgaaattgaaggtgagccttatcctattgatgaatctgcggaaactttaaaagatatgtacggtttcaaaaatatacaagcctgttattacgaaagcaaaaagaatgcaaaatggattaatgtaacaactgaattcctgaggaattga

SEQ ID NO: 200392 - DNA, 2973 bp, Klebsiella oxytoca
atgtcaaacgcatttgatttaaaccctataagattctttacttcacaaaaaacgtttccaaacagcatacaaattcataatataaaaacaaaaaaagctaagaacttacttagaggaattgattcagatagttataaaagtacaaaaatcgcacttgaaaaaataaaattaaattgcacacgcacagattataaaaactcacttttatatgtacgcacacacactttttttgaaaaaactgatgttgggcaactatttaatgatttttgtccaaaaggcataaagcaaccacatgaatacacgctctccgaaatcattaaagaaataggcaattatacaaatgaactttgccttttaacagaatgtgcatatagtatatcgagtcatctaagtaaaaacgaattcctcaaagcattagaggcatgcgatgacctcgttaaaaacaaaggtgtttctatatatttattaagggtaatatcatttataaccaatagatatcagttattctccttagaagacaaagagttactcaataaaattgacaaattgaagcagtccataaaaatttcgaacaataactttctttctgaggcagtctctcaattaagcaacttacgtacatcacatttagctatttgcaaacgtataaatgagttgtcaactgattttgaaaaaggcctgattgcaaaatcattcatcaacccaataccaaacaattatgatactttcctaaaaacattaaatgcctattactcattttcattatttgatgcattcctatattatcaaaatatatcaaaacttaaattacctttcatccctacccatctaataaattcagatttaacactaatccatcaagaattttgctcaatagaattcgatcctaatcttatctacgataaagttgatgaagacacaagccactattatctaagagagtgttttcttttcattgaacaagaaaaagcattaaattacctactaatacatggaagctactacactccctatagttcaaacaaaagaataaatcaattttcaaggccattaataaaccgctattttgaggatttaaaaaatctaaaccaattacgctgtgagaaaatggtcgatgttgaaataaactggcataaatacaataataacacatgcagcatgttagagaactcatcggcattaatataccttctaactaaaaaagaaggatatctagaccagcatgaacagtatttatttgtaaaacttatgtcctacactcgtgatatcggagaaacttgcccccctgattttttagaaaggattgctgatgatgctaaggattatcttttaaagattgtagctcaatgcttaataactataaataggaaaagtcaatatacagaacatcagttaagggctacgattcaagatttttgcattagtgaattcaatagtaaccttctagaattgttaaaatatcttcaccaagtttcacctgcagttactgaacatataataaccatctcaaacgaaacattccttagtacattattccatttaacagacaaaccaattgacgcactcaatttgcgtgccgacatgctattttggtatggtgagattacaaaagatgaacgatttaaagatagagctaagacgctgaggatagatatacagattaataaagaaaaaggtactatcgatgactctagaatttatgttgacccattgaattttcagcaatggttcgaagataacatggtcagtaagttaaccatgattttagataatcttatgattagcaatgactcatcattcaaacttgattggaccagtaaaggcagttcagtcagtaacggagaagaactaattgaatccttgttggcatgttataaagaattctgcgaaaacaaggtattcggcatagcatcatatcttgggcgtagaataaggcatggaacatttaaaggaacagctattacagaaattcaaaagcttcctaacgagcaagaatatcatagtattttcgaagacaaggatttcaaacggaggcttgatgaatggcttctccaatacgaatatatgattgaagatttagtaaaaaattaccttcagataaaaagcaagagaaaaccaacaggcttgatcaccaccgaaatagacacccctgctaaaacagtaattgcaaatcaacttgtttttgatattttatctctttatcctaaacgaactggcgtgatcagactacctaatctaattattgattattgttggcgtttagttgagcaagatcttgccaagactaaaagactattaagtcaaaaaaaatcttcacatggtgttttttcttatacatctaaaaatcaaagcacttatttaaaaagaacattttccaaattcacacaagaagtgaactcattaacaggtcaaaaatttggactaatggcttcttggttcaacaaacctagctatgcttccccaagtgccgatatctatttactattcaatgctgtaatttcagaagttaaagaaaggatgattggttttgaacctacaatagatataggtgaaaaaacatttactattgatggtggcacttattacatcttatatgatgcactttatgtactaattcataacgctgctaagcatggaaaactggatggcaccattcactttaatgttttaccttcttcggcacgtaatataataagactatctctttctacagagttaggatgtcttcaagacgtcctgagagccgaatcacaaataagactatttatagaatcagcagataaggattctaatttcatagatgacgctcatattattgaaggaaatagtggaatgaaaaaacttaaaaggcttgagaaggaaggaagcataagtaatttcaattttcactctaatgaaagagagcttttgttatgtttcgaatttgactttcatcttgaccatagaggtatatacgatgatattgatagttga

SEQ ID NO: 200393 - DNA, 609 bp, Klebsiella oxytoca
atggaccgacacgacaaacttggataccgacttggattaatactgactcgcctcaacaatggagagtcactgaccgtcagaggcctggctgacgaatttaacgtttgcgaaaaaacaatacgacgcgatctgactgagcgtcttgcttacctgaacctgctccgacaaggaaagcagtaccgcctgcctaaagggattctggggcaacgcagcaacacggatttgcgccgttttactcgcatactcggtatcgaagggctgttcccacgctgggaagatcgcctgctgaacgtgctactgggggataccgaaaacaatcccttcctgatcaagcaacgcccctatgagaattgtggtgctttcatgtccaccctgaatgccatttccggggcgattcaggcatcccagaagattgcgtttacctataaagacaagatgttttcggccactgaaccttatcgtgtcgtgaatgacagagggctctggtatctggccgcccggcacgaaggaacgttgaagagtttagcagtttccacgatgaagcatgtgcaggtcagcaatatgcgattcagtcctgatcccttagtcagtcagcaggtggaactgtaa

SEQ ID NO: 200394 - DNA, 1998 bp, Klebsiella oxytoca
atgaaacagttcagtccgtccgatatccagcgcctgagacaggccagcctcgacgatccgcgcatccttaacaaaatacgcaaggacaatgaggtcgtgcttaaccatcccgttctggtccccgaaacaggatgtgccagctgggagctcttctactactgcccgaaacatggcgtcccgcttatctgggaccggctctcgccggaggcctaccactgcccggtcgataacgaagttctgacgggggaaccgtaccggggcgcctggtggcgaaaactcaacgatctgaacgcccgggcctgttatgaactgggtatcgcctggatgctgaccggggagaagctctatttcacgatagtacgggatattctcatggcgtacgcgcgctactaccccggctatgccgagcacggcgggatcccctataacggccccggaaaaatgaatgcacagacgctctgtgaagccctctgtctgtccgggtttgtgaagggctatgatctcatctatgacgcactggccccggcagagcggaccaccatcgagcgtgatttactccgggcctgcgccgaatttctcatcagtaagcgctggaatcagctgcataaccatgaagtgcggatcaacagtgcgctggccatgaccggcgcggtgctggatgacccccgctacctgcagaccggcgtcaatgccgtctggggtctgcacgaccagctcaggtgcggggtcctcaaaggcggcctgtggtttgaagggtccctgcactatcaccattatgccctgcagggcttcttcgaatttgagcgcatggtccgctatgcccaccaggactacagcctgatgagccagccgtactacaggaaaatgctcgacctgcccattaagctgctgatgccggacgacaccgagcccacattcaatgactgcatcccgatgaaagatacggtgacctatcctgacctttacgagtttgcctacgcctgctacggggaagacaactatgcgcgcatgctctccatcatctatgacaaggagccccggaccagcctgggtgccttcctgtacggcgatccgcggttgcgcatcacggagccggtccgggagacgggcaattatcacgacccggataatggcatcaccattttccgcaatcccgatcagggccgggctgtggtcgtcaagcacaccccctacgggggcgagcacgatcactacgataagcccgggctcattatttacgaccagaacgtggccattcttcctgacatggggaccaccggttacggggcaccgatgcactacagttactacaagaacacgctcacccataacgtcctgtgcgcagaagagtccaaccagccgcccgccagtccacagacactgagctttacagagacggaaaagtacgccgaggtgacggtcgaggtagactggcgtgagcccccggccgaggtaccctgcctgacccgcgtggagtggaacacgcacgcctaccgggacattgtttatcgccgcaaggtgattgtgtatgaacatattgtggtggatatcacccgcgtgaccaacccccaccgccgtcagctggataacattctgcacattgacggcgaacggctgataaccaccgggagctacctgcccctgcgcgattatgacgaaagtgacccgatgttttacttcagcgaatgcttcgtcagcccgatgggccggacagtcacaatgccgttccgcaccctgatggggaaaaaaatccagatccattgcgcctgcagtgacccgggggcagagctccaccagttgcagggcccggccaacccgcccctgacgtcactgagctacctgaaaacccgctcacgggcaccggcattcatcagcgtgcacgtgatcgacctgcacgcggaagaggacctgatgcataacgtggtcatctcgctgcggcaaaacaccgtgactatcacctcggatttacagcgggagagcatcacccaccctatctga

SEQ ID NO: 200395 - DNA, 1275 bp, Klebsiella oxytoca
atgaaaattaataatctacgatggtacattattgtcctggttatgatgggtaccatcactaactacctgtcccgtaataccctcggtatcgctgctccgaccatgctgaaggacatcggcttcaccgaacagcagtacgcctggatcaccgccgcctttaatcttgcctacccggtgggcggggtctgtgccggctatatcatggaccggttcggcgtacgctgggtcttcgccatgatggccatcctctggtccgtctttaacgcgctgaccggtttcttcagctcctggctccccatgatgatactccggatgggcattggcctcaccgaatccaccttcaatcctgccggaatgaaagtctccgcccagtggttcccgccccgggagcgtggcctggcctgtgggatctacagcatcggcacttcagccggggccatgctcgccccgcccgtagtcgcctggtccatcatccattacaactggcgcatcgccttcgtcgtggcgagcgtcttcgggattgtctggtccgtgctctggctgattgcctaccgcgccccggaaaaacacggcctcatcacagaagaggagctcggcctgattggccgggaagcaaagcgcacgaaagtcacgcgccgcgtctcgctgaaatcgctgttgccccggcggaacctctgggccatctcgctgccccgcctgtttgcggaccccacctgggccgcgctgggcttctggatgcccctctatctggtgaccgtccgccatctggatctgaaacaaattgccctcttcgcctggctgccgttcctcaccgccgacgcaggttgcctctttgcgggcctgtttgcccagtggcttaaccggcgcgggatcaccctcatcaacgccaaacgcatcaccttcaccctggccgcctgcctgatgatgcttatcccgctgctcaactttgtcaccaccaccgggatggctatcaccctcttctgcgtcgccgggttcgcccaccagtgtgcctccatcacggtgatcagcatgtcggctgaattcttcagcgaggacgaggtcggcaccgtcaccggctttgccgggctggtcggcggcgtgggaggatttatcgggacgctgctgatcggggtcgccgtggccagtatcggctacagcctggtcttcgatgtgctgggcttccttgaccttatcggggccgtcctgctctggaccctgctcagcattccccgctccgatcccctccgtgacactgtccttaacccgggtctctga

SEQ ID NO: 200396 - DNA, 984 bp, Klebsiella oxytoca
atggagttgatccacatcacccccggccccgggggcagcggcacaggcttctggcttccgctgcgcagcggccggatcatcctgtgtctcacaggcgcggattttcatcccgtcgccatcgagctggcggccctgaccgggtccgagctggtcaacggctattccaccctgccccccgacgaacggttgctctgcgtggtactcgacgacccgggctccctgctctgcggcctttatcctcagaagcgcattccggtaatcaacgtccggccgggccgctacaacggccatctcgccagcttcatcaccgatgccacctatgtctccggagtgaccctctccgaaatcgcccgggcggacatacacaccgtgcccgatccggtctcatcgcccatacgggagtccaggccagtgatccgccattcgccacccgcgccacgcgggattaagtgccttgccgccggggaggttcgtctggccctgtgggtgggggaagtgctccccctgttacgcgatgcagcccgggaggccattcaggtatcactgcgcgacatcctgccctttatggccctgatcgctctgctgatggccctcgccgaaaactcaaccctgggagccgccatggaacacctgctgaccccgctcgtgggctcggtctgggggctcctgctgctctcggtcatctgcagcttcccgttcctgtccccgctgctcgggccgggggcggccttctcgcagatggctggagtgattatcgggacgcagatcggggccgggaccctgcctcccgccctggctctacccgccctgttcgccatcaacgtgcaggtcggatgcgatttcattcccgtggggctggctattcagggagccagccgggccactatcgccgccggagtaccggcttttttactctcccgccagttgacgggaccgctggccgtcatcatcggctggctctgcgccaccggactgtttacctga

SEQ ID NO: 200397 - DNA, 222 bp, Klebsiella oxytoca
atgcaacgctaccacaccctcatctgcaagccgggaacccatgtgaaagactgccgctcactggcgcgggggtctctatccgggaaaggcatcctggtcatgttcttcgaccatgcacatgtgtctctccacgacggggtcgagcatccgggcgatccgatgtcagaacttgccgatcggtgtagcgcgttcattatcgaggagggttatccatggagttga

SEQ ID NO: 200398 - DNA, 519 bp, Klebsiella oxytoca
atggaactgcttagcctgaacgacggcatccttacctttatccagagcgccagcagccattttctcacgctggccgtcaccatactgcccgtatttctgttcatgcggatcctgctcaccgtgaccctgcgcctcgtaggtaccgcgcaaacggaggccttcgcccggctttgtggccgttccagggtgctcacctacgggctcctgccagtcattggctggttgctgctccgggctccaggggcactggcgctcggggtcgtgttgccggagaaaagtaagcctggcttcgaggatgcgctcaccaccctcgcccatcccctgtccaccgccttcccgggggtagtgacccctgaactggtcgcctggttaagcattacggccggacttaggatccatggcctgcccgtgacccagctggccctgcgctatctcctgactgccgtgctgatcagccttatccggggcatggtcacagagtggatctttctgcggatcacctcacgagggaaacgctga

SEQ ID NO: 200399 - DNA, 237 bp, Klebsiella oxytoca
atggctgatacaacagtcaggggccccggacacagtggcggtacagactcaagcacctgcttagtttttttcagggcgagagcaggcgtggcatttcagccctgtttatgcgattctcagaagttaagtttgcagaaatgcaatgtctgcaatgagatgaatgactataagataacaaagttaactttaaatgtgaatcttaacttttgtctcgtgaaaatgttattaattgattaa

SEQ ID NO: 200400 - DNA, 393 bp, Klebsiella oxytoca
atggatattaagaacgaagaaaatcgagaagaagatcacaaattccagtttggaagaagattggctcaagctatgttgcttacaaagcattctaatgcggccttagccaaggctattggtgttagtgagccaatgattaaaaaatacgtggatgggaaaaatttacctaaggccgacgtgctccaaaagatttcactagtattaggtattgatgtttctctattgcttgatgctcaggattcagatggtaatagagaggataaagaccttgagttccttaaccaaacattcaaatatcttactgtcttgcaaagaaaaataatccttagacaactttctgaaaccgtaaccaatctccttaagctagaagaaaactaccttaccaagaaatga

SEQ ID NO: 200401 - DNA, 435 bp, Klebsiella oxytoca
atgaaattgggcttcctccaaaccgtagaaaaatacagtcctcactacgaggtctgttcaaagctagaactattatccggcaacggggatttactctttcccagtgatcgcggtgcccataagccaatgagtgagaacaccatcaacaaggcgctgcgcgcaatgggttatgacacacaggcggacatctgcggacatggcttccgtacgataacatgtagcgcgttgattgaatcagatcgctggtcaaaagatgccgtggaacggcagacgagccatcaggagcgcaatcacgttctcgccgcgtatattcacaaagcggaacacctcaacgaacggacccagatgatgcaatggtggtcggattatcttaatacctgccagcatcaattcattccggcttatcgctttaagaagtcaattaaggctgcctga

SEQ ID NO: 200402 - DNA, 624 bp, Klebsiella oxytoca
atgaccattcaagaaatagttcaacaacgtaacattactaagctatttcattttacacacagtgataatctatcttcaattatagagagtggacttttatcgcgctcagatcttgatgatgaaggggataactacgacttcaatgattcagaaagaattgatggacatcttgatgcgatatgtttgtcggtaagttttcctaatgcaagaatgttttataaatatagaaatttaaagcctggttcctgggttatattagaaattgacccttcggttctttggactaagaattgtgcattttatcctacgaatgctgcttcaaataatgttcgtttcaatgaccttgaattaatgaaaggagctaaagcatttagcgctttatttgcaaatgaagtatatgggactacgagagatgattatcttactgctcaatatacaacagatgttcaggctgaagtgttggtgtttgaaaaaattgaaccatcgtatattgtggcgtatttacatcctaacaaagattcatatcaaccatttaaagaccaatatccaaagacaaatcaacgctactatgctaaccttaatggtaagacgctcttctctcagagacattattgtttaggataa

SEQ ID NO: 200403 - DNA, 690 bp, Klebsiella oxytoca
atggccgttagacctattttcgttcctacaaactctggacacgtcctgtcaattacgaaggacgtagattttccttggtccccggggatgtctaagtcgcaaaagcaaaaatcgatcagggcattacattcagctgctaatggtctgggtctgaactctctattagaaatttctagtaaatctgaagatgcactaggagtggagcttagtgcgtttaatcttataattaagaccaaaaaattaggtaaagaattctcagttgaatcagcatttcaggcaagtaaagtctttgaagctggtggaccttttgttgatatattagataaaacttctatcgaagcaaaaaaagacattagactaaaagagtccggaggattagttagttttaatttttataatacaacatggccgcttgtccctagaacagctttttatgattggctgtatttgagtgcgctcaatcaaaataaaaaactagctatgcatcttttaaattttgatgggtttactgatattgaatttaatccggctaaatctattaattgccaagcaaggactgcagctctttttgtttctttggttaagagaaatatgttggaaaaagttttgtcttcgcaaagtgaattcctatcggtattggcatctcattatggtgtcgagagttactcagtgcaaaatgtattgatatga

SEQ ID NO: 200404 - DNA, 1170 bp, Klebsiella oxytoca
atgggctcgacaaaatcgcctaaactcccgcgcggcgtaaccatcaggaaacatagcaatggggaaaccatcaatattaccttcacttataaaggggttaaatgccgtgagcccctttctaatttggaagttacccctaaaaatatcaaatacgccgagcgcacactcggtgaaatccataacaagatagaaagaggaacgtttgtttatgcagaatacttcccccgttctacccggttaaaaatctttgggaatgctgcctccgccaaaacggtgaaaatatacctggatgagtatcttgtgatctgtgaaacgaggaatctttcaccctccaccattggtgggtataaaaaatgccgcagcgcactgtctgatcttcacattttcccggccagtgagttaacaccggcagcattaaaaacatggatccagaatcagaaaacgacattgaagacgatacgtaaccagttatcgtttctacgctcatcgcttgatgaagctattacagatggcgtgctacaaataaaccctgtgtctctggtcacagcttcacgataccgaagcaaagtgactgagacagaagatgattacgttgtcgaccctctttcacctgctgaagtagatgcccttttggcatccgctggtaataagcagtgggaaaacctcttcagatttgcgatccatacaggaatgcgcagctcagaactatgcgcacttcgatggaaggatatcgattttatccagaagactgctcatgttcaaagcgccagcgttgctggtataaccaaaggtacgaaaaccaaggctggtacgagaaaggtcgagttaacgaacgaagcgatgcttgccttgtctagccaaaagccattctcgttcatgaaggaggcgactgtgtttgaggatcccaaaacgggaaaagcctgggcaagtgcagatgctataaggaagaaagcatgggttcctactctacgtaaagcaggaattagatatcgtaacccataccagacgcgacacaccttcgcaacacggcacatcagtcaaggcgcaaacctattctggctagcaacccagatgggacacaaaggtccggaaatgttattccggcattatggttcatatctaaaagaatatgatggaaatacttcagccagattaaaagtaggactatga

SEQ ID NO: 200405 - DNA, 210 bp, Klebsiella oxytoca
atgacgaccgatgaagtagagaagtacttcggcagcgctgaaaaagttgctgtttttttcggtatcaccagcgaagcagtttaccagtggcgaaaccgccccggccggttgattcctaaaggtagggccacagaggccgcattgcggacaagtgggaaattagcctttcatccagagctttatgaaaagtctaattcattaaccgcttaa

SEQ ID NO: 200406 - DNA, 882 bp, Klebsiella oxytoca
gtgagcgttaaattatccgcatatgtctgggatggttgcgccgcggcaggcatcaaaggcaataaattactgatcatgcttcgcctggctgattacgccagtgatgaggggatcgcatacccaagcgttgcgacgattgcgcgccagctcggcgccgggcgcagtaccgttatcacgttgatcggcgagctggttaaagatggctggctgaccaaaaaagaacgccgtctcggtcagcgcagcaccagcaatctctacaccctgaatgtggctaagctgcggcaggctgcaaatgaacattatgagggttcaaaatctggacgttcagaatctgaaccatcggaatctggacgtccagaaactgaacgtccgaaagagccaaaaaaacagggttctcagggtccagaaactggacacgatccgtcagtaaatttaaaaccagatccatcagtaggatctaaacccccttgtcgggttcctgcggaacccgacccggaagtggttattaccgatcttgctaagcaggccctttcacacttgaacctcacaaccggttcacgttttcaggtatgcaaaacctctctggaacatatccggggcaggctgcgtgaaggatttacacctgacgaactgacgctggtggtcgattacagcactgagaagtggggaaaagatcttaaaatggctgaatatctgcgaccaaccacgctatttctgccgtcaaaattccccggatatctccagtctgcaaccaagtgggccgctgccggccgcccgaaatgcgttgatggaaaatggaccaagaccggaggtgaagaccaggcattcaagtccagctattcggatgtcaaatataccgttccaaaaggattccgctcatga

SEQ ID NO: 200407 - DNA, 1062 bp, Klebsiella oxytoca
gtgagagcgctactcactccggaagtcgtgccgcgcttaggcgtggtgctgcttaagccaggcaaagagctgatgcgtcttttccgcagtggcagggtgctggtggaatctgagcccaaaagcatggcagggctggctacgggccgaatccctgatgcgcgccaaccgctggctgaagataaggtgctggaagcctttttcactagcgagcgggtcatcaatgctgccggcggtctcccgggtcttgagtactggctccagcacaatatccgggaatgccagtatccgcattctgagtaccatcaccatgagcatgtggtaatgcgctatcaacctggcgccatgatgctttgctggcactgcgaaaacagtcttcgtgatcataccaccgacacactcaccgggctggcgcgtagaaacgttatcgactgggttattgatactgcgctgctgaacctgcaactgggtcgtgatcgggaactatctatggcggagctgtgctggtgggctgtatatgctggagctgcagacgctatcactgagacgatggcgcagcgtggtttgaggctgcctgaagagccgttcctgtcggtatataaagaaagcgatatccggcctactgtaccggccagcagtattctgcaggagaaactaccagctgcagccgcagtgcagcagtgcagacatagcgaaattatgcctgtgctgcaggaacagccgaaggtgctggcgctgactgccgatcctgaatcacctgaatccttcatgctcaggccaaagcgccgtcgttgggtaagcaagacttataccgactgggttaagcatcaaccatgcgaatgctgccacagaccagctgacgatccgcatcatgtcatcgggcatggcatgggcggcactgctaccaaagcccacgatctcttcgtgtttcctctgtgcagagagtgtcacgacgagttgcatgccgacgtaaacgcttttgaagagaagaacggcacgcagctgcagttgttgtttcgttttctggatcgagtgatggcaatcggggtgattgtaaaatcttag

SEQ ID NO: 200408 - DNA, 363 bp, Klebsiella oxytoca
atgcgcgatattcagaaagttttggacttatggggggcatgggctaacagtgaattttgctctgttgactactcacctattgccgctggctttaaaggacttttaccgcaggctagtaaaacgcggataatgtgcactgacgatgatgggttaatcattgaaggttgtatggctcgtttgagaaaaagcagaccatatgattaccaacttttagtagctcattatctttatcagatatcgaagcgaaaaatggcaaagcataggaaaaagagtgagaagcagattcgcattgaaatgcagcttgctgagggctttattgaaggttgtctctcgatgcttgatatacgtttagatatggattaa

SEQ ID NO: 200409 - DNA, 513 bp, Klebsiella oxytoca
atgaatttatttaaatttttattaaaattcgtttccgcatttgcttttggttttactatcttttactttgcagtaaaaaagattgacctgggtagtacctctgccccttgggccttgataaccctaatgatattccctttcagctactgcgctgcagttttattcaaagtatcagaagccgacgaaaatacgtctctttctgaaagcgaaattagacgattgcgcccacttattgattataaaaaaaagcaactaagctttctcattattttctatctcttagctgcctttttaggtgctatgggcatgttaataattgcaaagggaacaagcactcatctttattttatatcatcttgcggaggagtaattgcagcctctctttactctttctttttcgtcaaatcaattaatgacgaattacaaagattcaaaagcatacttcttcatagaaatgataccgaccaaaaaaccaaagcttttttagattcactcaataaaaaggcggattaa

SEQ ID NO: 200410 - DNA, 1089 bp, Klebsiella oxytoca
atgaaagaaagtcgcagcaaagtaattcattataaacgagcagtcattccaaactgcgcggcgacactccaagaaatcattgaatcgatcatttccgaaaatggttccgctcataaagtaagtatgcgtagagaacaaataaatccagctgatagcgatagtggttatcggatggttaaccgaagcaatacctttaaaacagtcctttttggtcaactgattctatttgaacaaggtaaaagtcaaacacttatgaccatcgctgatgatgttaattactatgacattaacgccataacgtcaaagcaaataaaattagaaggagatgaggggataagcgaggaagaaaaacaaaagattaaacgcgaatttgtagattcaattctatatttcggaattcgtggcaaccacgtcatgattgtacaatcaagctcattacgcataaaagatatcgagactcatttaaattggttgatacactctttcggctctatttttgacactgatagttttcttgttcttcaggataaaccaaccgaagaaacaattaaaaaaatgcatgaaagcccagtaaaaaaaatcaatctaggcagcgttccaattaaaaacaaagaaccatctgaaactgttaatattacccatacagccaatacgcaagatatcagcgaagcagcaaggtcaccactagagaaagttaagaaaataaaattcatgcctactggcaaaggcggagacataataaaagcagcttttggcgaaggttggtttaacgatcttaaacttgaagactctttagatgaatcaaatctgcaagtcaatttagaaattacatatttcagaaagaccaataaagatggacaaagggttcttgataccttagctacttcattaagaaatatagatgacgatgaaattagcataaaccttcaaggtggtggaactataaaaggtagtgatctaaaactttctggcaaagtcaacgtccaatttaataatggactaattgatgaaaatgatttatatttacagatgcataaatggttggcctcaaaagttcaggccggagaaataagcgttaaaaaacaataa

SEQ ID NO: 200411 - DNA, 252 bp, Klebsiella oxytoca
atgtttatatccaggcttgattttataaacaaaaatgtttataattatctcaagttaaacagacaggaggaggaagtgaagcaaagcgagttgaggcgttggcttgcagctcaaggggcagagtttaaagatggtaccaaccacctgaaaatctacctcaatggcaagcaaacggtaatgccgagacatccgggtaaggaaataccggaaccgctgaggaaggcaattcttaagcaactcggcatcaaataa

SEQ ID NO: 200412 - DNA, 408 bp, Klebsiella oxytoca
atgcgatacccggtaatttttgagcatgacgaaaccggctgggcggtattctttccggatatcccagaggcaatgacgggaggagagaccagggaggaagcgttagagatggcgcaagatgccttggtcacggcgtttgatttctacttcgacgatcgccgggagattcccgcaccgtcggctgatggtgaggcatttgttgaggttccgtccagcgtagcggcgaaagtattgctgctaaatcgtctggtaagcactaacaccagcaatgctgaacttgcccgcatgattaatacgcgcccgcaggaaatacagcgcatcgtatcgcttggtcacagcaccaaaattgatacgattcaaaaagcgctgtcagcgctgggacagcatatggaaattgtcgttcgttaa

SEQ ID NO: 200413 - DNA, 249 bp, Klebsiella oxytoca
atgaacagaaccatgcctgacaaaattgcctctgcagtagggtattgcacttcgggcggcctcatctgctggggtggcattgccagatgggtacatgagctcgactggaatttgattgcggtcgtcggcggcttcgtgatcggcttgctgactttcttcgtgaacttttattttaagcggcgccaaaccagagcatatgaaaaggctctggcgcggggctacgtaacgccaccaccacaggatcactaa

SEQ ID NO: 200414 - DNA, 255 bp, Klebsiella oxytoca
atgctcaagctcaaaccgctgcagcgcgtgctgctgccgctaatctctctggcactgttaaccagctgcgccggcaggcaaaagcctttgccacccgcctggacgccgcaaagcacaccacaagtctcgccgctgccgtcagaagcaaaacaaccggcgccaccgccggaatgctcgccgacatgcttggagaccttgcagacgaggctcgacggtatgctgcaattgctgacgaacgctacacagcaggaatga

SEQ ID NO: 200415 - DNA, 420 bp, Klebsiella oxytoca
atgtttaatcgtaatgatctcaccctttcgcttttctatgcttccaacacgaatgaggaaggcgaaaaagtcgcgacattgaccgttcaggtgaacaattccgacatggtagccatgcagagcaacaagctgcaatgcatcactgatcaggcaggtaagaagatttactccgtcggtgagcagatggtcagcaatggctcagatccgctgctggtagccctggagagctactggcgccagaaaactgaggcggtcgtgaccgggttgctggttgatgttggcgatttcattgcaggccatatcagccagtcctcaacgttcttaggattcaatgggctgaagatcttcgagaatgagcccctgacggtgcgcatccccgaggatgtgctgcaggccgacggtggcgcgtccgaaggctga

SEQ ID NO: 200416 - DNA, 1035 bp, Klebsiella oxytoca
atggaagatccaatccaactatatgaaatcaatagcattgatgatatagaaactattttttaccgagtgctttctggcgaagaaattcatattgaaaatttgaagttaaactttttagaaagcattgatttcaaattctttggtgacgaagagaagtataatggtaccctgcctgcgagcttagcccaaggcatctgcgagtttcaaactgagatgtacaaggtttatactcttatcaagtataaaacttcaaacttacagaagctcacagctgaagatagagaagctgcagagttggtttttgcaatcaagccaggctgcactgaaattattacagcagttaaagctttgattgactcctttggtgaagcgtttgagaaggtaacacaaggtatgagccctagacagaaaacaacgtgtttcctgtttgcagtcgtcgtattaggcggcgcatgggtcggtacgtcctatttagagcaccaaacgcaagtagaaacccagcaaattgaattgcagcaggaagaaattaagcaacgggctgaatcagaacgcatgacaattcttcgtgatggaatgctgtctgcaatcaaagagcatgaaggcgttgatacgatagaacgcgccgaaggtatccaggagcatacagctaaggcgtatactggggttctcaaaggtgcatccgatgctgacaaagtgactattcgcggggcaaacaacatcgaactctcacaaagccaagttcaagagattattaaaaatccaatagaaaaagccaagtcagagcagagaacgttggaagtagtcattgatagcataaagcgttcagctgataagctaacactaagttgccatgagccaacaggcgaagattcattcccaatatatgtggatactagttttatcaatgatcctgatgaaattggcttaatctttgacgctatgaaaaacaataaaacagtcaagatcttaggtagttacaaaatcagggcagggataatagaacaaggtaacgcctccacaatatcaaatccttag

SEQ ID NO: 200417 - DNA, 4086 bp, Klebsiella oxytoca
atgagtatggccagcatacacgatgattggctctcgctaatcgatatttcaggccctttccttgccgtaccagtactaaaagatgcattcccgcaagggctggaagagctagacgctactaagcgtaaacgactgcgccaagcttacgatgagtggcgagaagcactggaacaagaagatcctcagtttaacaaattgcatttcgcgtggatcgaagaagttctttcacgtggtcttgagttcgatgaggatggtaaaggcgatgtactgaagggcgcagattggtgcgccgtcaatttgaacacttttctccctgaccatggtgtagttctgtcaccaaatctagcaattgtcgacgagcaatgcgcgaacaagcctttgatgctcattcatacctatgcgcacgatatcgatcttgacgcaacattgaaaatagacggatgggccgctacacccacggatcgtatggttcagctgtgccgctccaaggagtgtcgccttggtttagtgaccaatggcgaacgctggatgctggtggatgcacccgtgggcgctgtcaccagcttcgcaagctggtatgctcgactctggaaccaggagcccatcacactgcaggccttcgtgcacttgctcggtatccgccgtttcttcgtcaatgaatccgaacaactacccgcattgttcgacagttctttgaaatatcaggacgaagtaaccgatgcactgggagaacaagtacgtcgcgctgtagaagtattgatccagtcccttgataaagcagatcaggatcgcaaccgtgaattactttacaacgtaaaagaatccgaactctatgaagcagctctgaccgtgatgatgcgcttggtgtttctgctctcggcagaggagcgaggcctgcttcttttgggcgatgagcgatacgaagccaactatgcgctttccactttacgcatgcagttacgcaaggttcccgaagaaatcctagaacgacgctgggacgcctggtcgcgcctgctggcaatcttccgtgctgttttctgcggggtggaacatgagagtcttcgtctacctgcactgggtaactcactgttcgatcctgatcattttccttttctggaaggacggactaagggttccagttggaggacagatacagccaagccattaccgattgataaccgcacagttctgttgttgctagaggctatccagcaattccagggccgaacactctcatatcgcgcactggacgtcgaacaaatcggttacgtgtatgaaggtctgctggaacgtactgtcaggcgcaccgatgaagtcacactggaacttgctgccaccaagaaatcacagtatccgtgggttacactgaacgagttagatgcagcaaacactgatggtgccgaacaattaatcaagttgttgcaagaacgctccggcagttctgccagtcgggtgtgcaaagatctgggtaaagctgttgatgacacattagctgatcgcctgctgacgacctgccaaggcgatatcctgctgcgtgaccgaatcaaaccttacactcacatgctacgaaccgacccttggggttatccgctagtttactccaccggagctttcatcgtcaccagtggctccaaccgacgtgaaactggtacccattacacgccaaagtctctcactgaagcgattgttactgaaacactgatgccggtggtctattttggcccatcagaaggcatgccgcgtgaagagtggcaactcaaatcccccgccgaactacttgacctcaagatttgcgacccagctatgggctcaggtgccttcctggtgcaagtctgtcgctggttagccactcgtctcgttgaggcctggtcaaacgccgaagtaataggaaaggtggtaagtgtggatggcgatgtcctggacgctctgaatactaaagagccgttaccacgcgatgctgactctcgcattgtcattgctcgtcgtcttatcgccgaacgctgcctatatggtgtcgacgtgaatccactggcagtcgaactcgccaagctatctatctggctggtgacgctggccaaaggtcgcccatttggtttcctcgaccataacctgcgctgcggcgacagcctgcttggcatccatcggctagaacagctcactcagctttcgatgaacccatccggccaaggtcaaccgtgcctatttggccaaaaaattgagcgtgtcgtgtacgaagccattgaacttcggcagcaattgcgcgagatgcccatccatgatatccacgatgtggaaaccatggcgcatctgaatgcaggcgcacaccgctggctagaagtgcctaggtatatcgccgatgcgtttatcggggaagtgtttgaggctatcggcaatgccacggcgttggaaaaaacgcaggcatcgttggtcatccaggctaggcaagccatagaaggcgaggacgaccagattgcattgatgcgccggagatctgttacattgctttcgacaaacctatctgccaacaagcctacgcataaacctttccattggccactggagtttcctgaagtatttgcacgtgaatatggcggcttcgatggtattgtgggtaatccacccttcctaggcgggcagcgcatcaccggtatcatgggcactaaatttcgtgattggctggtcacgcacattgccgagggccgacgtggttcagcagacttggccgcctacttttttttacgagcattgagcttattgcgcaaagacggtacgttcggactactgtcggtcaacaccatcgcagaaggggatacacggcaggttggacttgaagccatggttggatccggtgcaaccatatactccgcctatccgaatgagccttggccaggaaaggccgcagttataactagtcgtgtgcatatccacaatggtgagtggcaaggtgaacgcgtactattaggacgatcagttccctttatatcggcattcttgtcggatcgtgaggaatggagtccagagcgactgaaggtgaacgaaggtctggcataccaaggctcaattgttcttggtatgggttttgtgctccttcccgaacaagcccgcagcatgatagatgctgagcctagaaacgccgaagtaatattcccttatatcaacggcgatgacctaaattcaaatccagaacagaagccaagtcgatgggtaattaacttctgggattggccagaggaacgtgctcgagagtacaaattaccttggaaatggattgaggagcgagtcaagcccgaacgacaacgacaaaatgaaaacggtgaatttgtccttcgaaaaccactccctgaacgttggtggcattatgctgagaaacgaccagcgctctatcatgcaatcggtcgtggctatcatttcagcctccatccgaagggctggacctctgattcttgtcagattgaaagagttttttgcctgtcgcgagtatcaaagttcctagctcctgcaatgactccttcaaattatgtgtggtccgacagcatggtcattttccgttcggactcgtttgcttttctaggacttttattcagtcagattcacgaggtatgggtacgcaagaactcctctcgtctcgaaagccgactaagatacacgccgagcgatgcacttgagactttaccatttcctaatgtctcactaaaaaaactggaaactatagccaaagaatttgcggatgctcgcgctgctgtttgcttggacaaaaaaatgggggtcacggagatatacaaccgcctccacaccaatagtgaacgaaatccgcacatagaaaaactgcgcgcgttgcaacgtgaaattgatattgaggtcgcccacgcctacggttgggatgaccttgatcttggccatgatttccacgaagttccgtatttgcccgaaaatgaccgggttcgtttcactatatcagaggctgctcgtgtcgaagtgttacaaaggctgtcagaacttaatcgtgtacgctaccaagaggaagtagctgctggattgcatgataaaaaagctaaatccaagacattaagcacactaccaaagtaa

SEQ ID NO: 200418 - DNA, 168 bp, Klebsiella oxytoca
atgtttgctaaatcctttctcgctctcggcggcaacgctagcctgatcggtactaaaacggctcagccccccccttacgagcgctatacctgccatctacgccactcaagccgccttttattccgccactctcaactagaaagcttacgtctgacatatcgaagctga

SEQ ID NO: 200419 - DNA, 927 bp, Klebsiella oxytoca
atgttcaacaccaaattcgggccatttaacggatctacctgggaaggtctttgtcagcaggtctttaagcggaagtatcaagctgaatgctatcagcagatgccagcatctccaggagactacggcatagagggctacacctcagacactgggtgggcatttcagtgttattgtcctgagaagcactatgaacgcactgagttgtatgataagcagcgcgacaaaattactactgaccttagaaagctgaaagattacgcgcaggagcttcaaacacgactgggaagcacgaagatttctcgatgggtgtttgtcacccccgagatagatcgtaatgcgctccttgcacatgcaaaggccaaggaagcggaagtccgtgcttggaaactgcccatcctaaccgatgacttcacagtattgctccacgatggcgatcactatttggtcgaaattaatgaggtacgtgctgcctgtggagaggctttggtcttcgacgacacagcaccagtcctagctgccttaactggtcagcaagaacagtacgagataaacgttcatcgtaagtcaggctatcgactcgccgaaaaggctcaggtgccggactttcagactcgcgtacaaatgcttagtcagcgcaccattgagcagttccttgaggctgacggatatttccgccgtgtcgcatcagcgtcaccaatgacacatgtgcgacttattcgccttatcaacgagtacgaacaatacgtcattgaaacttcagctacttggtctggaaccgcagaagagttgactatccaagttcgtgatggattggcaaagattatttccgacgaactcgcacctgagtttgataaggctaacactttgaaagtggcaagatacatgaccgctcggtggttggcagtctgcgagttggactatggttga

SEQ ID NO: 200420 - DNA, 2037 bp, Klebsiella oxytoca
gtgatcattcgtggcgtaaaattcagggctaccactaatgaaggggaatatgggtttagtttcaactttgcgcggaccctgaccatcatccgggccaagaattcaagcgggaaaagcacattattcaacagcttgctctacggtctaggcatggaagaacttgttgggggtaaaaatgaaaagtcccttccttacgccctcaaggagtatatcgaatacaatgatcgtcgaatcctaatcacagcttcggagatgatgcttgaaatagagagtcgctctggagaaatagttacgcttcgacgtgcaatcagggatgcggtgagggaccctaggctcattgaggtatttgcgggagctcatttaactgaaaaaaaagcatttggcgaagccaggcctacctacgtgcacgatggcggtggtgctaaacggcccgagggtttccatctttttcttgagcgtttcttggatttgagtttgccgagagtgccaactacgaacggtggtgaggcaaagctgtacctacaggtggtttttgcagctttagccgtggagcagaagcgaggatggacagactatatcgcgaacattccgttttttggcattcgtgatgcgcgaaccagagtggttgagttcttgcttggtttggatgtattcgagacgaacgctacacgcaatcggcttaacgtcgaatcagttaagattgatgctgactggcgcaagctttattcggagttgctacaggaaacgagtccgcttggaacagaaatctatggcgtttcctcaatcccttcggctctcttcaaagaggatgaggcaagcatcagaaaactggctggcaattcatctgttccattgaacgagtacatcagccaactacgatccgagtacgctaccttgcagaaacaggctgagcagtatcataagacctctggggtcgaggcgattcatagcgttacagttgctatggacgaactgcaggaacttgttatgttgcatgagcgtgctacaaccttctacgcggagcagcgaagatccctgaaggattacgagaatctgctcgtcgaggctaacgaggacctggaacggaacaagacagcagcgaagctccgtgacttgggtgcgaagtacgatgtggcgaccgctattggtaagtgtcctacatgcaatcagccggttgaggacacacttttggccggggcagtgactggtccccaaatggacttagcggccaatatcacctatttggagagccaacgtcgtatgcttatacgtcagattgctggcttgaagagtggtttgcaggcgactgaccttcgagtaattgagttggctgctcgtatagctagcaagcgtgacctactcgtcgcaatgcgcggtgatataacatctggagcatcggagtcgaaggcaatcgtgcgtcggcaggttcagattgaagttgaggtagaagcgcttgagaagctccagatcacatctatggagctgttagcaaaattcaggctgattgcagagcgcatgagcgtcaatcaggcgacaagaagaggcatgccaaaagaaaactatagcgaggcagacattgagcgaatccgccgcttccaattaaatttcagagcaaatgctggatcgtttggctacgaaagtgctccgattagagagatcgaaatcagtaaggacacgctcattccatgcctagcccagatggcattaagggagatacggactgacattaaatcggactctagcgccagtgactttgttcgcctcatctggagttacttgcttgccttgtatcagacctcgaccataccctcatccctcggaaatcatcctggcctgttgatgtttgacgagccaggacaacattcaatggcggttggcagtcagcatgctcttctcaagcaactagcgaacgaagcaagcttgcagagcatcgtcgccgcctctttcgatgagtcggaagaagtgttccgtcaggcaacacaaggcgtccaatacactctcatcgaatgggatggcaaacttttgcagccccagtaa

SEQ ID NO: 200421 - DNA, 696 bp, Klebsiella oxytoca
atgactactaaattctttcgttttcctcataccccacaccttgcttggctgggtaatagctcaccacgcgatgataaggtgctttcgcacggtgaggtggcatccttactttcgggtgaagttgtggtagaggaaaaattggatggtgcaaatgttggcttgtcgcttgacgcgaatggtaatttagtagtccaaaatagaggtcaatatctgtcggggccccatactggacagtttgcccgcttaccatcctggttgatacagcatgctgactcactatactcaatgcttacaccaaacataattttgttcggagaatggtgcgctgcgcgccattctctggattatgtagcactgcctgattggttactgatctttgatgtgtatgaccgtgctatggggcgtttctggagtacctctcgccgtaatgcattagccactagcacgggtttggttactgttccgcaattgctcaaaataaaaacttccctagattcacttaagcaattagtcattacgcagcaaagtcattatcgaaaaggaccactggagggtattgtggtccgccgagaatcagcagagtggtgcgaagctcgcgctaagctggttcgacccgatttcacccaagccatcgacattcattggcgtaagcgagtgatcgagtggaacagagtcagcaacgaaaaatgcatttaa

SEQ ID NO: 200422 - DNA, 534 bp, Klebsiella oxytoca
atgtacctagttgataccaatgttatgctcgcagcaagtgctgtctctgagttgtcaaatcaagcagtgagagccatgccgagtgagattgagctgcgcgaaatgatttacgactggctttcttcttttgaacagtctgagcagagtattgtcctagatgaagaagggctagtacgagacgaatacgaacgaaacatgccttacaactttcttgagcaagaatatggcatgcaagttttgcaatacaagttagatagaaatcaggtcgtttatgtacctatcaattcgattgaggcaaacggtgagcacattgctgtgcttgatcctgtgcacgaagcactggtatcagatcgagaggatagaaaatgggctgcttgtgcactggctgcacagattcttttcgaccaagtgccgccaattgtatatggggcagaaactgactggttcatagcagaagaacaactaagaggaataggtctttgttttcatagactattgcccgatgaatggtatagctcaaaggttgcttcttaa

SEQ ID NO: 200423 - DNA, 1308 bp, Klebsiella oxytoca
atgtttaccggactaaaattgacaaatttcaaggcgtggcaagacacgggtgacattgacctgaagcctgtcacaatgttgctcggcaccaactcatccggcaaatcaactttgattcaaagtctgttgctactcaagcaaaccgtgcaatcacccgatcgcagcatatatctcaaccttggtggcgatgaagtcaacgatatctttaattttggcgattttgacgatgtgttacacaaaaattttgcgggtgctcgccaattttcattgaacttcacctttcagccccattcaccttcccgaatcaataacggaagtttttcctgtagttatggtcaaaattctgcaggtggagtgaccatcaaggaatggagcgtcagcaccggtcaacgccagtttaaatctatacgtcgcgatagaggcgcttattcggttatggttgatgaagagggtcaaccgcggggtaaaggtcgtcacctatgtcctgagcgctcggtatcgttgtctgcagaagctatagcaatattgggtcatgatggcgcactgcttgaagatttgagtttatctattcgccgtgagttggaaaacatcgtctatcttggcccattacgccggaaacctgaacgagattatgtttggaacaagtctaatccgggtgaggtgggtagtgatggtcatcgtgcgcttgatgtgctcctagccagcgccttaatgaaaggcgatgaccaaaatcgcattattgaaggtgtatcgaagtggcttgtgcggatgaaagttgccgacaagttagaagttaaacaattgggtcgttcgacacgctatgaattagtggtacaccgtgatggtgtagaagcaaatttgcgtgatgtgggtatcggaatttcacaagtcttacctgtcttgataatcgcctatttcgcaccaagtggcagcacaattatccttgaagagcctgagatacatctgcatccgcttgcacagtctgtgttagctgagctgtttgtagagatcagcaagcagcgaaatgttcagttcatcgtcgaaacgcactctgagcacctgttccgacggatgcaaacactgatcgctaagcaacttatcacccctaaagattctgcaatgtattttgttgagcgtgaaggcaaagctgcacacctgcggtctttagtgctggatgattttggtcgtgtgaaaaactggccagaaggtttcttcggagatgctctgggggagacaagagagcagacagccttggccattaatcgtgcaaaggaattaagatcgagggatggtaatgtacctagttga

SEQ ID NO: 200424 - DNA, 759 bp, Klebsiella oxytoca
atgtatttagttaaaagttgcagcaaacaaaacaaccccaaaacgtcaggtacactaagaattggttccttaactgagtatagagactcagaaaacaaagaggttgaagacagggaagaaggtttttatcgaattaatatagatctaaaagacaagtggataactactaatttattcagccacttaaacaaatcacaccttagtttatcgagtgtacacatccaccatcttgcactgaaaggaagttatgaggataggattctcgttgactatcacgctaattacacatgggataacttaaaccgatttatcttttgcataacaaaaactgaaagagctgaagacgcgcagaatatatttagtggctacgacgatagctggtcaatcgattacaaaaaaataacatggatgaaaaaagcaatggaaaaaaatgttttgcaaaaggttaaggagctaatttcttcaggtgaaatgattttcggtagtgactttaatgatccaggtaagataagaatacaatcttacactcaagatataatttatcaagcgagggatttgtatttggggaataaagatatagatgccatgtctgaaactttgatatcactttttgaaaatgtaaaatttatcaagcctgttgactttaaaaaagaaaaagaactcagatttgtttttgacttttattatgacggcattattattttccctcaaattaatagtctcattgtgcctgccacaggcattattgagttattgtaa

SEQ ID NO: 200425 - DNA, 747 bp, Klebsiella oxytoca
atgcttggtctgctaactgaagcaattcgcgaaaaccaatttattgtttattatcagcctaaatatagttttattaattctgatgtatccggcgcagaagcattaatacgatggtatcatccaagttatggtttcataccaccagacaattttattccttttgctgagaaagtagatttaatacattctataactgcaatagttatcacaacggtcttcagtttctcacaacaggtgaataacatttctttcgcgattaatttatctggtaaggattttgaaaatagttttcttcttaatcatatagacaaaatggctgaactatatgaagtcaatccttgcagaataatttttgaaattactgagagcgtaatgataactaatccaactttagctttaaataacctaactaaacttaaagaaaaaggatataaaattcacattgatgattttgggactggatattcctctctcaactatcttagagaatttccatttgatgcgattaagttagacagaactttcattagtggtattgcttacgatgcacgggacttatctattgtaagaagcatagtttctcttggaaaagctttcagtttaggtatagtagcagaaggtgtggaaaataatgaacagtttgaattgcttaaaaatatgaattgcgatgaatttcaaggttattattattcgaagcctttgtcaggtgatcaactgattgattttttgaggggccaaaaaaaatag

SEQ ID NO: 200426 - DNA, 153 bp, Klebsiella oxytoca
atgggtgcagtgcatgggttaatgaaaattaactacggggctttctgctttctgccgcacaacacggtaacaaaccacctttacgtcatgaggcaaaaagcctcaagcgccgacgtcattataccctgtcgtatcgaatccacccaggactaa

SEQ ID NO: 200427 - DNA, 1191 bp, Klebsiella oxytoca
atgtaccgtacgatcgatgttcatgttgataaatccagttggccagggatcggcaagattcccagttttccggctgctttcaccgcaggcagcagttccttcaatttgaacatcaactcgatgttattaatcatcggttacctgacaacaccgacttctgtcacaggtgtttcgcttgcagaattctgggcgtgggtgagatatttggcagcgatcacgccccgagaccatgatctccgcttgacaagaagctatgcagatcttgatgcgcatcagaaaactattctaagtgatgacttcggaatgggagtgccaatggtctggctcatgaagaatttaccattggttgatattgtcgatggccgctattttttgcagcgctacggcgcaagccatggcgcataccagcatcgcaccgcaaagcgagggccaaataagacgcctgacttcgtggtccatgggcacgatggaaaatggcacattatagaatgtaagggaactcaatctggtgaggctttcagggatagccaaatcgattcgggcatatcccagaaactttcaataaagttcccaccagggcatacagggcagaggttggtatcaggtcttagtattggcattgaggacggtaatccaagtcacctgaagatcattgatccagaacctgaagatcctgtaattattaccgaaagtgaaatggagtttgtaaaggacgccgcaacccgtggcgtaatggccaaactgcttcggtcgacaggcttcgaaacagcggcagaggcggtagccgcgcctttcgggaaaccgcaagccatgcctccatcgacaaaaaaaacagataaaaagcgtatagagtttcttgcagatcgcgaccgacgcgcacgcgaagagttgctggaaagcacctcaagagctcatcttttcggcggtcgctatcgaggtcgagaggttactttccagttgccgagaccgatctatatttatgacgatatgatttcaaaagttaccgtaaggcaaggaatgaatgtggatgccatcgatttgctcagagagcagccaaccattgagacgctaatcgacccatctcgtaaccattggatcgatatgatgggggctaacattattcaggatgacgagcaaaccgcgacgttgcaattcggaagtattttcaggtccgagttgattcttaattaa

SEQ ID NO: 200428 - DNA, 1638 bp, Klebsiella oxytoca
atgcaaagcacagccttagataaaagtcaagagtttcaacttgttgggaatgatgatgttgccgagcagtcaacaattaatgcaactcaagaaataaaagacagtgttactccagagattataatcgcactttgtgggccaattggttcaccgctacatgagactgctgagcagatatcattctcgctgaaaaaatatggctataaaacatatgacatacgtttaagtgatctaatccggattaattcaaaatatacaaatattaatattgatgaaagcactaagctaaagaaatttaagtcgctaataactgtgggtgataaacttcgtgaaatttacggtagtgatattcttgcaaaattagctattgctaaaattagcgccgagcgtaaaaaaaactttggtgagtttgatgatattgtcaatgaatccagcaaaggggaagcgagtaagattaaaaatcaaaaaatttgtcatattattgactcagttaaaaactcctctgagcttgagttgttgaaatcaatctatggaaaaatgattttctctataggtgtgttctcccctttagaggcaaggcgtgaaaatctttcaaaaattaatagcctaagcgttgaagatatcgctgaactaatcaataccgattctggtgaagagttcgaccatgggcaatcagttagagacactttcccgaaatgtgattactttttgcgagttgatagtgggttggcagagccaggaaatgccgaggctaaaggccaaattctatctaaactggaacgtttctttaagctaatttttaggagttcagttatatcaccgactgaagaggaaaatgcaatgtatgcagccacctcagcggctcgtaattctgcatgtctatcaagacaagttggtgctgcagtaacatcttcatctggagaacttctttctaccggttggaatgatgtgcctcgtaatggtggtggcctctatggtaaacaatctatccgcttaaaagttattgatcctgatcatcgttgttatgctttacaaaatagaaattgctcgaatgatgcagaaaagagaatattggctgaagttgtcattgatagccttgtacaggaaaaaataatccctgtaaaaaaaagagaagctgcgattcaaaccattataaaaaactcacgattaaaagatttaatagagttttcaagagcggttcatgcagaaatgcacgcgattcttggcgcatctcgtgtggcaggagaaagaattttaggcgggaaaatatttgtaacaacctatccatgccattcctgcgcaaggcatattatcgcttctggtatctctgaagtatatttcattgaaccgtatagaaaaagcttagctcttaagcttcattcggatgcgatgaccgaatcagtaatcgagacggatgaaaaagtgaagttgatacaatttgatggagtagctccaactaggtttcttgagctttttgaatctggatctcgaaaatctaaagctggggtgctagagttagcgacagagggtgcggctatgcctgtggatagcgttagtctcaaagcaattcctaaattagaacaggtagttattgctgaagttgatagtaataaacttaacttgttgaggcttgagtga

SEQ ID NO: 200429 - DNA, 261 bp, Klebsiella oxytoca
atgaagaagcgttttcccgacgaacagttcatcagtatcctccgcgaggctgaagccagggtttctgccagtgagttttgcagtaagcacgccatttctgacgccaccttttacacctgtcgcaggagttttagcggcatgaaaatgcctgaggtgaagcggcttaagttgcctgaagaggagaacggtcgactcaggaagctacttgctgaagccatgcttagtaaggagggaattcaggtggctctcggtcgaaagtaa

SEQ ID NO: 200430 - DNA, 411 bp, Klebsiella oxytoca
atgttcggattctttaaaaagacaaaacctgacgctgagctagggcaaggtccccgactgacggcaaaacaatttatcgcgctgacgctgagtgatgaaaagctgtctatgcccgtgtacctgccggggatccgcagtgaggccgaatgtgacgaaatgggtttatggccactcatctacatctggaatgtggatcgtgccactggcacgttcagcctttctgttaacggtaaggccattgcccacctcctggagcctttagtgccccgagaagaccctgcgtatgtcgaaattcgtgatgaggcgatgaaggtcatctccgagtcttcaacgcggtccgttctggcgacggttgagaaaaccggtctcatgcccgatgttttgttcgcgtatgacgttgagaacgaatga

SEQ ID NO: 200431 - DNA, 348 bp, Klebsiella oxytoca; identical to SEQ ID NO: 190507

SEQ ID NO: 200432 - DNA, 486 bp, Klebsiella oxytoca
atgataaataaggctctggcactcattttatattgcctgcgctggctggtctgggcagtccattacctggttatgtggcctgctgcaacggtaatgctgtttgtaatcttaattttctggctgcgtgacaccacgccgggccaggtagcggcagacgaaatagcggcttcaacgcgatatgtaaattatggggaattcaggacaccgggagggtgtggtccgaacttaggcggtcctttattcggagagcactgtcgtagcacggatgctgcgggttatgccgattatataaaagagagtattgacgaattgtggcgcggaacctggaaagcgctttggatcgtaatggcgctggtatatgcaggactgtcctggcttctggggtgctttccccgtttccctcgccatgtatttgtcaaagtggcaggtgacgcgggaagcgtcacccttcccgataaccggctcagggagacagatcagaaatga

SEQ ID NO: 200433 - DNA, 438 bp, Klebsiella oxytoca
atgagaaagccggaggtctcaccgctggtcagtatccgcgacggtattcaggtggtggccatactgccgcgccatgaaaaggcccgtctggaatgggaaattctgcaggatgctgacgtgtatcgccgtcagatggttgcccttctggacctggctcaacggggtgtcagccgggggctgatatacgcgccggcggtgatgctggctggtctgtgctttcttgcccggggatttccgcaggatgctgttcgggtcttcaacgctctgcgggaaatgcccgccacagagcttgtgcatcagactggttttgtcctgcgctacgtcctgctgatttccgtcatgtcggctctgattgccgatgttctggccgggagaggattgccgaacgcctttcgccgcgcattgctggacaggctgccggcagaggcaaaggaataa

SEQ ID NO: 200434 - DNA, 900 bp, Klebsiella oxytoca
atgctatcttacatgctatctcaatatgctaggctacctgtgcctgaagttactctacgttcatggttaaaacaatggttgtcagagcaggaatcgaggtgtacagacagaagtttctcggcgcgatttccctggagagaaactggattatgtcaggaatattttttacaacgaaaactcaaaattgatggaaagcaatttcttactggcccccgttatcagggcggaaatattaacaaaccttttattgatattgtaggtatggattctgacctaaatcatactgcattagaactcattagtaaggaatggtcacaactcagagctcagtatgtccgcattcttgtgccaggccagtccttcccgcagggtattcccgaccagtatatatatgccacgtctttttctgaaccccctgaattcaatgataaatctcttactttgcaagtggcgacatacgaagattttgactggtgttgtcaggctctgggcgatgcctataagcatacatggcagacagttcgcgaactgtctgcaagcaatttggtagcagttgatgacgaagagttgtgtgaccatatttctgagagagaagtatatattatctatgaaaacgatgttcgcgccgggttgctaatatgccagaaaggaaacctcgcttttctgagaggatatcgtattactgacaaagtaatacttcctgcttttcgtggtcgatcattgtcggcccgagcgcaacgcctactgtaccgattattaactcattccgattcggaactatctttgtatatgggcacaattattccggagaatataccctcgatgaaaactgcagaaagagcgggacgaacttgcatcctaagttatcaatttctacccatctgcagaacccacgattaa

SEQ ID NO: 200435 - DNA, 636 bp, Klebsiella oxytoca
atgccagatatcggtaaatctggacgtagaatgtctgcgttacagaaaagaatactcattgtacttgccgctttggatgagcgtaagcatatgccagtagccactaaggatattgaacgagtgctagcacaaggaggggaaaaaccggtatatagttcaaacttaagagctgcatgcagaaagctcgaagaagcaggatttctcaatacactgagagcacggaatttgcaacttgctgtcgaactaactgaaacgggtaaacttatagcacagcctttacttgagaaggagaagaatgatgaactggataaaaaaaggattagagagtgtcatgtattaccccacaccatggcttcatggagggaagttgcgcatagtatcgagatagatggtaaaacatattctgtattccgctgtgcatacgtaattcgtttgaataaaacaaactgtctacagttatggacaaacacaaggaaaatagtgaaacttgaaggagacgcattacaaatcggcgaatggtatcagaaatgttacgatgcagggatacattgtcacattcaaattaatgaaggcgaatgcttgagcaagaggagtgtggagtatctcaatttcaaacatggtttattcactaaatag

SEQ ID NO: 200436 - DNA, 267 bp, Klebsiella oxytoca
atgaatgcattcatttatgaagcattcattaacatttttaaaaaaatagcaatcccgcacattcaattcataatcaaaaaaaatgatgactacctgctcgataaagatgttgtgttttatgagaccgtgccgggcgaattattcttacctaatgcaaaatttatgaaatgtaaaccagccaggattttgtttatattgcatgattatactgatggcttttgttttgatgatgtaaaacgatttgagaataacacttttactttctaa

SEQ ID NO: 200437 - DNA, 291 bp, Klebsiella oxytoca
atgattactatcaaacatggtttgataaattacacacattcgcaatcttgttccattcaggaagaaaagtttgaaacacgtgtacgcattaatttatctaaaaaacagtcaaaaattactattcaactggcgaatggactggatcttaagacaatatcttcactaaacaaagttactgtcaatactataaaatatcatataaaagaaataaagaaaaagatgaaactggctagcacatatgagttgtatcaattcgcgcatatgttaaaatccctcatggactcgacctaa

SEQ ID NO: 200438 - DNA, 534 bp, Klebsiella oxytoca
atgaaaaagaaaaaagcgtcagaaccggggttactggcaagcgacagcgactggcacaataacgcatgtttgaattacatgcctgatcacggcacaacttacaccgaaggttaccggcgggctgctgacattctgattaaacacattgatgaatccgggcgggaccaggattttctggtttatccggtgttgtttctctacaggcatcacatcgaactccttatcaaacaaattgtcggactggctttggtactatcagaagagccggatacagaccagtacaaaaaagataaccataacctgaataccttatggctgctggcaaagaaacttctccctgaagttaatgacagccatcgatcttctaattttcgactcatcaaggaagtcgttaaaaagcttcacaatgcgcacaggctagtaacggatttgcgttatgcccggagaaatgacgacacgcggagctttgaaggaattcaggatgtcaacaccagttgctttagagaaaaatggaaacggcttcctattcactag

SEQ ID NO: 200439 - DNA, 804 bp, Klebsiella oxytoca
atgcggacacccgggcccgggtggaggccttccgtcgcgcgctggagcttggctgcttatgaacggtccgctgagccggtaccgtccgtctggcgtgactttttaagggcatttccgctcggctgctgcgagctggccagccagacactggtgcagtacctgatggatcacgacgaaaaactgtttccctatgttatcggcatggactggagagttaatgcgaaagactatggccacgtcattgtcgccctcgacggggagtacatcgacctgacgctggatcagtttgacgggtatcacgaccggattgtggcggagcccattgagtccggcggacagatcgcgggatttatacagacggtccgggcccacggcgggacactcagcacgcgtgaactgacgttcgacggcattccggaccaggcgtggaaactgtatgcctggctgaaggaggtggcggacgaactgctcgctgcgtcaggacagggcagggcacctgacagtatgcctctgctggtctccacggagatcctgcctcagtaccgcgccgcagcggtggccggtgcgtcagacacggccactcaggtcaccgggcagaaaaaacagcggccaatgacgcacgtggggatcattacagaatgctaccggccccgcgaggtcaggctgcgggaaacgaacacccagtgggtcagtgagtgcggcctgcgcttcagaaaggacacgggcgctgcggccggaagcggcgcctggagtgcaaaccgccttgatttgaagagcatccgggaaatccagtctgaagattaa

SEQ ID NO: 200440 - DNA, 1134 bp, Klebsiella oxytoca
atgcatttttatgtggatgaaaccggtcataccggtccgaatctttttgaccgtacccagcctgtgctttcctacggtgtgctttcctcaccggatgacctggacaaggttgccgaagcagatcttgctgccttgcgtaagaaactgggagtgcagcgcctgcacgccgcagaactgggaattcaccgccttgatgaggtggttgatacgctgcttgtcctgcagaagaagcaccggatacggtttgatgtctggcaggtggttaaacgggatcacgccgttatttctttcttcgaccaggtgttcgaccaggggatgaatcctgctgtgcccgtggttgcctactggaccccctttcgttacccgctgctgctgaatctggcaagcctgttcgatgatgaactggctgaaaaagcgtggcgtgcccgccttgaagcccatgatgaacgttcctcatccctgttcagtgaggtatgcagtgcgttacttgcgcgcgtccataccctgggggatcaccgttacattgaactgattaccgatgcgttgtcctgggcgatgacccactttgacgagctgggatataactgcaaaaccggcaagcaaaaactgcagatcatgcccaacatgattggatttcagttcgtattacgcggtatctgtttccgcctgggagcaccaaaccgaaaagccgacatcgttgtggaccagcagtcgcagttcaacaccacccagcgggagctgagggatttctattaccagatacgcgagcagccctggataaacggacccggtttaccgggcatggatgtgacgaacatgccggctgaaccgctggtcttccagtcgggtacacagagtgcagggctggagctggttgatatatatctctggatcttcaaacgctttatggaagggaaggagctgaccaggccgttagcccgcctggtttacaccaaccgcaataccggcaggatggacagtgtctccctgcaatcggtcgctaaacgagctaaggagttcctggacaaactgcaggagccaacggctgaaatgttgaaaaaggccagtgaataccgggatcaggaagaggctaaacggctggcacatcgggtgcaaatcctgccgacatcctga

SEQ ID NO: 200441 - DNA, 675 bp, Klebsiella oxytoca
atgaatattatcaaccctttccacacagactgcactgccagaatacacgatagttaccccgaccatgtgccgcgctcccccataacatcccagcttgatgcggcgcaagttctggctttcgcaggggctaatggcgatattgcgtggcatattgaaaatgaactggagaatggcggtgaatacgcgaactggagagcaaacatgccgccagttacaccgcaaattttactggactatcagcagctgtatcccctttcgccggtgcagatggctcaggtgaacaacgaggtaaatacccatggaatgatgatcccccatggtcagattctcttccacggtggccaatggaagggaaataacgctgttactaaactcagtgatccctttgccacgaccttctgtccacaagttgccatgcgtgaagctgagcactcaggaaaagcatacaagcaaggctacattgatctgatggtcattacggttatcgatccccaggtcaaagcctttgtgttcgacatggatgagccagaaaagggaaatgagcttgaggttctgtttgcggccggggccacgataacggttaccaacagaaccgctatgaatttcaaataccctgtttacgggaatccagaaaaagaaattacgacctacctcgttgaagcgacactcagttaa

SEQ ID NO: 200442 - DNA, 987 bp, Klebsiella oxytoca
atgaactttcagacttcatctgaacaaaacgagtctcaggggaccgtgtcggtttcacttaagggtattccgaccgatcagggcctcgcactgaaagaggtggccagagcacgggacattaaccagtccgcgctgctgcgtgagatggtcaatgccagcatgggcagtatactccacgtcttctgccttaagagcccgcttgtcgcatccctggatcaggataccgcccagtataacggctgtactgtcctgccggcatggggcagtgtccctccggccccccagtttgaagcggcctaccgcgacctgcttggtatccatacggaagatgatctgacccggattttactgcgtaatgcacagtacctgcggatgcggacccaccaggttatgccacgggggacgcagttctacggaggggcagcgctgtattttgccctgttctgtgatgtcgccggtcgtgatgaacagacgattgaagccttctgggccagtattgcgcgcttctggggaggttggtaccggcgtcaggattattacctgcagatcaaccagcttcgcggagtgttgggtctggcgccggcgaatggtctcagcgaggcgcatgcgaagggcgtttacagccgggtatccgtatttcaggatgaaagccgccagaaagggttcagccaggtgctgctgacccttcgcacagagaatacgcgagcgctgccggcaggcgcgttcgatcagtttcagttgccgggctgtaatggccacattctgacccctgacccgggctatggtactccgtatattttccccaacaatgcatacgtcctggggttccgtttccgcgaggagtcctgctccctgcactgctacagtgtggaacacgtccctataggagacacacaaacgctcagcgaactggcccaggccctggtcgatggcgttgatgaaacactccgtgcctatgctgcaaccatcccggtaaatcagaggtag

SEQ ID NO: 200443 - DNA, 1341 bp, Klebsiella oxytoca
atggttgactcaacaacagttaacggaaatcctgattcacaaccacctcagttgaactggaatgccctgtttcgtggtgatcatgcacgggggggctacaatgcctgcgtgggtaacaacggctcaccagacctgtattactatgctgacggcttcgctgacagcgtagatctgcttattgaagccctgacggcaggacacagtgcacaactggatacacttatttatcctatttgcttcagcttgcgacactccgtggaactgactataaagggtcagataaaggatctcagccagcttgcgaaacgacgaaaccaaccgcttgcacccgatacagacatagaaaaagagctgaatcagcacgatattatgaacctgtggatatttttttcagtccatgcagccgcattcgatcggcgttataaggaaaaggtgtcagcgctggaacctctcattcgctgtattggggaaactgatcccaccggtcagacatttcgctacagttacagcgcggaagccaagaaacacttaacggacgtcagtgttatcaatgtactggtcctgcgtgaacagttctgcgttattcgcgagcaactggaagaactcacagggttaactcactggctttggcgggaatactccaccgggattttcaccaaaaccctcagtcgtaaagatcttcaggctattgccgttcaattaccgccgcggcagtcatggagtgacccgtcagctggacttgatggtatccgatcttgcatcaaatctgaatacaacataggcagcaaagaactgactgaggcattcagcaagattcaaaacagcagggatttggctcgaattatcggcgtgcccgtaaatattccaggattgtctatcgtagatctgaatactctcaatgacgtctggaagatggtatgggatcgcgatgctttggtcgatgaattacgtaaggatatatccggtgtcaccgcttcaccgataataccggtcaatttgctgcaagatacgaagagagaaattttgatgcagaaagacaccaaggcttcattcgcccagtttatgcaatgggcaacaaaagagaggctcgccggattgctggcactaatggatgcccgggattatcgtttcagtgaagagcatgacagtagctacgaatattataaagatgaactgacggctgctttttcaggctctccacaagctcgtgacgctgagatatccgagatttggtttcacagtattgcccggcgtaactatccttcgcgtataattgattacctcaaagttactggctttgctcatgaaagtgctgcactagaggaaaacctcttctcctga

SEQ ID NO: 200444 - DNA, 867 bp, Klebsiella oxytoca
atgaaattcaaccctgcctgtactgccactgatgtgatggggatactgaaatcataccgtgacgatctgctagaaaaggagttgcgaaagcccttctggcctgtgctcgaaaggctaatttcacgtgatacagagatgaatcaggtgtggaatgacatcgcgcggcatgcgcttaccggggaacagtgctggaatctgctggaacagatattctttgccggggcctacggaactggtgagcaccacacacgcctgaaggctgaccactcaagactagctgtcctgaatgagggtattgccgaaaaggccgcagaactcggcagaatgctgactgaacgggaagatattcttaaccgcaatgaatttgacattgaacatacagcccatatcgtcgatctgattgatgcagcctccagccagaacggacattaccgctcttttttgcgtgaaaagcttcatggacttcgcacccagttcggttgcaaatactggccttcgctacagcagctcctgcaggtgacggcgaaagaaaatcccgtggtagttttcatggaccggagcgatgaagctatcgtccatgcacgaggagcggcggtgccggatttcctgcgccggctgttcagtaatttgcatgacatccgggtcatgaaaggggacttgcgcacagcacacatttatttgccgactaattttcggctgactgacgcaagtctggcgaccttggcctctgtttccctcgatctcgatgagcctgtcaccgtggacagtgtcaagatgctgcgtaccagattatatgatgcgggttatccgggagcctgggcgactcccgttacgaacaaaccgaggaagtcaggcatcagtgtgtga

SEQ ID NO: 200445 - DNA, 267 bp, Klebsiella oxytoca
atgcactacgcggataaaacgattgccgactatacacccgacctgaaagcgagggacgatcggttagaatccgtcgccagctctaccggttatgttctggataattactattcttttgcggataaaaaaggaaatcttcttaacatcgtcgctctggtaggttactccattggcggcacggccagtgacaaggtgttctatcgtgttgatgatatgaacaatcgtgtctggaagatcaccaggcttgatgaaaacagcccgttgtga

SEQ ID NO: 200446 - DNA, 417 bp, Klebsiella oxytoca
atgaacaagacctggatgctcgacacctgtatctgctcgttcatcatgcgcgagcagccggaagccgtactgaagcgcctggcgcaggcggtactgcgcaaccagcgtatcgtgatctccgccattacctacgcggagctgcgtttcggcgccaccggcccgaaggcctcgccgcgccatatgcaactggtcgaggcgttctgcgcgcgtctcgatgccgtcctgccctgggatcgcgccgcggtggacgccacgacggacatcaaagtggcgctgcggctggccgggacgccgatcggcccgaacgacaccgcgattgctgggcatgccattgcggccggcgccatcctggtgacgaataacacgcgggaatttgagcgggtgccggacctgatactggaagactgggtgaaataa

SEQ ID NO: 200447 - DNA, 570 bp, Klebsiella oxytoca
atgcctttaaattcatcgcgggaagcaccatccgcatatttctgtcggtatctctcacctcttggtgaaattacgcttgccgcagacgagtattatctcaccggtctctggtttgtcggccagaaatattatgcggctaatcacgccctgccttgtgtcactgagcacagactgccggtgttcactcagatccgggactggctggacgcctatttttccggtcttgcccctttgccgaatgatttaccactgcagccccggggctccgaattcaggctcgcggtctggcgccggctgtgtcaaatcccctacggcgaatgtgtcacgtacgggacagtggcgcgggatgtggcgacagtgatgggaaaacccggcatgtcagcccaggccaccggcggtgctgtcgggcacaaccccatttccctcattatcccctgtcacagagtgatcggaagcaataacagcctaaccgggtatgccggagggatcgcaagaaaaatccagctactgaagctcgagggcgtcgatatccgctcactgacggtgccggccagaggcacggctctgtaa

SEQ ID NO: 200448 - DNA, 948 bp, Klebsiella oxytoca
atgtcacacaatattccgctatcttcattacggacatttatcgaagtcagccgtcagggaagcatgaagcttgctgcagaaaaaatgtgtatcactaccggtgctgtcagccagcaaattcgccatcttgaggaacaaatggggatcaaactgttctcccgacagggaaaacgcctgatgctgagtattcccggactcagcttacgggatgcggttggacgcggattcgaagagatagaaaacggctgggcaaagattgttccgccggttcagaaccagctggtcatttcagcgttaccggtcattgcctaccggtggctgctgccatacctgaactcctttcagcaacagaacccgcggatcagcctttcgctgagagcctgtcagtcagaagaacagctaaaaatagataacgccgacatctggttagcgttgtccatttttcccgatgataacctgagctctgtcccgctgtggaaatccgcgcgcattcctgtttgccatcctgcattgttgaatggcgcgacgatcactcagcccgaccagctgcttcagtaccctttgctgaaaaacatcagcctgaactgctggaatgaatggttcgcgcttaataatgtaaaacgggtcgcggattcgcgtggcggatgctttgacgatgagtttggcctcatcaacgccgcccttttacaacaaggggtcgcgttagttcatgaacagtttgttcgtgcggaactggaaaacggaacccttgttaggcttttgccggactttcccaccgcttacagtacatgccagttcatgtatcgtgaaggaacgcgtcgtcactggatggttcagcgatttatggagtggttgacaggtatatgtcatcagacaggctgctctgagacgcttatagttccgccgccgcgtactgactgtgaagagaaataccgtgaagcaggatga

SEQ ID NO: 200449 - DNA, 915 bp, Klebsiella oxytoca
atgcgtattgcagactatatccggctaatactgcttgccgccatctggggagccagctttttgtttatgcgtatagcgtctccggaattcggggccattaacacggcattccttcgtgtatttttcggtttttttggacttgcaatcattctttttgttctgaagacacaatataactttgaagggaaatttaaatcttcactgattctgggtgtaattaattcaggattgccttttttcatgtattgcctcgctgcacgatggttacctgcgggatattctgctgtactcaacgcaacgacaccgctcatgggcgcattaattgggttcgctttctttagcgaaacgctgacggcacggaaatggggcggtgtggtgcttggcctggtgggaattatggtcattaccaccatcggtgaatcacagtccaccagtgaaaccctcgccggtgtcatcgcctgtctggtggcgaccgggtgttatggtgttgctggtttcctgacgcgccggtggatctcaaataaaggcgggcttgatccgaaaatagttgcctttggcagtcagatcggtgccacgttgtttttattgcccttctttatctggagcactacgaccgggccatcgattaactggctgcaaggaaacgtgtgggcaagcgtggtagccgtcggtctcatttgtactgcctttgcctatattctctatttccggcttatcgctgatattggccccttacgttcactcacggttacttttttaattcctcccttcgcagtgttgtggggatatctggccctgggggaaactattaacgaaggatttattatcggagcgttaattgtatgcgtttccgtgtggctggttgtcagtccggaaaaagcgtcgacggtcttaaagagtgaagcaacaaaataa

SEQ ID NO: 200450 - DNA, 900 bp, Klebsiella oxytoca
atgaaacttccacctttacatgcacttatgtgctttgaatcaacagcaagacatttaagtatgaaaaaagcggcggaagaactgtgcgtgacatccagtgcggtcagccagcaaattgccaagctcgaagatatcaccagcatgcggctctttatccgtagccccagaagtctggaactgacggatgaagcccgcatctatctgcgcgcgatccgaccggcgttcagccagatagaggaagcgacacagcggctgatgaatgaaggtaaaccgaacaagataaccatcagctgcaccagtggttttgcgatccagtggttactgccacgtctcccgggatttgaaaaggagaaccccggggtggaggtgcaaatcagcaccactaaccggcgggtaaacttattgtcagaagggatagattttgcggtaaggcatggcctgggtcgttatcctggtctcgaatctgaatgtcttctgaacgacaggctgcggcccgtctgtagcccgcgtcttatccctcagacgcagcccttgtcctcacctcttgatattacccgatataccttgctacacgatgagcatcgcatggactgggcagtctggtttaatgctgtgggtctgccgggtgccgatacgaataaaggccctgtttttgtcgactcaaacggcgttctggaagcggcactggcaggcaaggggatcgcacttatccgcagcgcgatggtcagggacgaactcaaaaacggaaccctcattaatcccctgagagtggccatcgaatcaccgatcgcgtactacctggtgtacgacgagtccgcgattttgcaacgcataagccgacggttccgggactggatctcggccactgccgccgccgacaagaatgaataccctgcctga

SEQ ID NO: 200451 - DNA, 387 bp, Klebsiella oxytoca
atggccggttttcagatatttcgcccgatgcggtgggatacgttagtgcacgaatatgatcttgatggttcacgtctcctgccgtgggaaggatatcccaccccaatcggcgccgggtggtgcgtggttcgtccacatactcagtcacaatcccacacgcaaatcgatcaggaatttttcattggtataaaagggaatgcgaaactgaaagtgggtgacgaaatatttcaattcacgatgggagatatagctgcaatcccgaagcacaccgatcactacgttattaatgacacggacgaagattttcatttttacgttgtctggtgggatgaaaatacggccaacggttttcttaaagagcacgccgaaataggggatacattatga

SEQ ID NO: 200452 - DNA, 1509 bp, Klebsiella oxytoca
atgagtcgttttcttgtcacgattacaccaccgacacccaacggcgatttgcatattggccacattgccggcccttttcttggtgctgacgtctttacgcgcgttcagcggcagcaggggcacgattgtgtactggtttcatactcagatgactatcagtcatatatgttgcgacggggtatcgagctggatcgcaatcaccaggcactggcagaagagaatacccaaaagatatgcgaaacactggcgttggttggtattcaggttgataactggatgcagccgcgacacaaccgatatttcctggaggcggtgacgcaggtttatgatgctgcccgtgatgccggcgccatttactcgaaaacgactcaggaaccttactgcagtcattgcgataagtggggttacgaagcatttggtcgtgggctgtgtaatcattgtggtgtgaactcagacgccagccagtgcgaaggatgcgcgcatactcctgacgccgctaaaatgaaattgttttactgcaagctatgcggtggtgacatggcgttccttcctgttgaacgcgaatttttgcagctgtctgcctaccataattttcttaaacagctgttcagtaccaaatcccttcgacaccctatgccacagttcctccaggaagagtatgccctgggtccgcaggactgggggatcactcgcccgcatgacggcggcctcgatttaaaagccgacggctcacgacgtattcatacctggtttatggggctggcggggtatcttgccgctttccgggagttcctggatcgatcaccggacggtgaaaaacgctttgagcagttctgtcagtccgaccagagtaagatgattcattttctgggctacgactgtgctttcagtcacctgattgtctatcccgtactgctttcaacgatagaaagttatcgtgttgagcaggaattttactcaaaccatttcctgacgttgaagggcgggaccctttctaccagccgcaactacgcgatttgggcgcgtgatattgtcaaagactacgatcaggacagcgttcggttttatttgtcccttctggccccggaagagcatgaaaccgaattcgatttggacaaatttacgacctggcgtaaccagacctttatacccacgacggagcagctccaggaacgtctggcggaagagacagagaaaagcgacagtcttaatcttcagacccaggatatgcaggctatccggcgattcgtgcagcgctggtaccatgcggcttctccgacccatttttcgatgaaggcgctggctaaaatctgcgaggatgtgctggatgttatccgagaccgtatcgcactgggcgccacgattcgtccgtatgtggcgttactcagttttaccggacagagtatttttccggtactggctcataagctgcaggtggcatccggcctgagtcgggaagaaattttccagcaactggtatcagcgacctccgttgagtatgaaatctga

SEQ ID NO: 200453 - DNA, 1116 bp, Klebsiella oxytoca
atgaacactgtatttgatgttgctgttattggtgccggttctaccggcgccaccatcgcggcgatgctggctgagcgacagataaaggtgatcctgctggaaaaagcgttgccggcatcgacaggagccagcgcctggtccgggggtatctttcgtcagtatgagccggatctggctttgctggcgctggccaggcttgtccccgggagcgctgtagtgacaagagccatgcaagaatcccggctgaaaacaggggtggaaatacaactcacttcagctcagtaccagcattttcgatcgcagctgtctggatcagcacttttcagtgaagaagaacgaaaacagatactggctgggctggtcccgcttagtgagacgggtgatgtattgaggctgaaagactgtgaggggggtttttcggcggtcagaaagtacgtcaccgatctgtgcagttacgtgcgagagcatgccgtcgtactcgagcgcacggaaatcagtaaggtggaattctttgcagaccatatccatttgcatggcgacctttccgtcattcgggcacggtttgtggtggatgcgtgcggcgccggaggaccttttgagcgctctctggaagggatttacgcacgtactgtccctttttctcgcgtgtatcttgatcgtgcccctgaaaggcccgttatctcgtatcccgccagcacctatgttttgccgctgagcaaaacgctcattcaaattggcggaagtgagcgccatagcgcttcctcgctgaatgggttaccccgcaccggtcaggacagcgaaacgctgctgcgccagaagctggacgataccgggatcgatacgcgggggtttcagcttctgcagcaggttgtttcgtgggattcgtggacccgcgatggtcgaccggttatcggtttcagtcaatcgcaaccgcgggtgatgaccgtttccgggtttaacggcgtggggttcaagctctccccgggtgctgccatgattgccgtaaaccagatcctggacgggttgaatgatgtcagccagccgaaccaattccgggatctggccacgctctttactccgggacggtttgcccgaacggaggggatatgcgtatag

SEQ ID NO: 200454 - DNA, 948 bp, Klebsiella oxytoca
atgcgtataggatttacggccgcttttcgcaccgaagtaacgattcatgcccgcggatttcttcagggaatatacctgagcgcgcagctttatccggcaacccgcgcagcagagtgggtcttttatgatgataatgccagtgttgccggcggtctgaatgcggcagaatcgttcgtgcgcgaaaacgtcgatgttgtggtgggccactttgcatctgaatcggcggcggcagcgcttccgctttataaggcacattcaataccgttgatcctgcctgcatccacctgtgcgtcgttaactcaacgctctgatctggcatttcgtgtgtgtgcatcggacagaacgctggcgggtaagctcgttgaacatcttattcatcgttcagtgtatcgctatgctttattctgcgatgaaagtttgcacggccgtcagcaggctgcagaaatagaaacgcagctcgtcacacaatccgttgagcgggtgacactaccggaagacgcggaggtggtgatcttttgcggccgcctgaaagccagcaacgaatttctgaaaacgcttcgctctgcatctctgaagatcccggtatacctgacggacgatgcctattccgatgccttatttcacaacatcccggcccccggagaaatagttgtattcagttttccccctggaggggaaaaaaaatcgcgcacctaccaggaaatgcagctcagctgcaggacgcatttccagcatggattattactgtataccagtgagactatctcagccctctctttactcagtcagaatggtttaaatcgtgaacgaattactgacttactgataaatgaaagtttcgacacgccaggaggtaaggtagcattcgattccggagaaaatatacacgcacgcatacaaataactcattatctttcgaataatacgaaacatagcattattgtataa

SEQ ID NO: 200455 - DNA, 1332 bp, Klebsiella oxytoca
atgcttcatgtatcagaactgccgcatacagaatgggatcttgatattgcctgcattggatttggccctgccggaattgcactggcttgcgctattgatgaatgtgaagaactgaacgcaatacgttcttccggtcgcgtgagatttttcgaaaaaaacagcaacaccacctggcatgggaattttattttaccggggacagatatcaaccatcacttattccgggatttggtgacaccccgcaacccacaaagcgcatattcgtttgcgatgtatctgaaagacaaaaatcgcctttttaaatttggtctgctcggcaggccggcgagtcgtgccgaatggtctgactatataaaatgggttgccgggcaactcgaagagtttgttgaatataattctccggtaaccgaaatattgcctgtcgtttcatccggcgttttaaccggctttcgaatcaaaacacctgaaaaagaatacacgacaaagcatctcgttctgtcatcaggtaatacacctaatattccggacgtttttaaaaatgttatgggcggcaatgttttccatacatcctcttatctccagcacatgacacaaggtgagggacccgtacctcatcactggcttgttatcggctctggccaaagtgccggcgaagccgtatcccatctgctgagccgctgcccggacattcaggtccactctgttcaccgatccgtcggattccggatagggcagttaggtcagtttccaaatctggcgtttttgcctgaacaggcgcgttacttttatcacctggatgaacagacccgggagcaggttttgagtgatgtccgtgccgtcaattacgcaggggtggacgccgatgaaagccaggcgctgtactcgcatttgtacgaaggagaagtttccggccagcaacggctagttttacatacatacagtgaaattgttgacattgaaaaaatgggtgtcggatacagcgttacgatacaggatataaatacaaaaaagagagataatatttatattgatggaattgttttaggtacagggtacatccaggagacgttaccttcctcactggccatgcttattccgtggctggaaagaaattcagagggaggaatagtcgtcagccaggaatatcagataaatattaagtcagaaaaaggagtgtgtttactggcgaacggcatatctgaaaaaacgcatggcatcagtgattcacaatcattttcaatggttgcggttcgggcggaaattttacttgaacaactattgactgaactacgcaatgaaaaacctttcactcacgtcgcactaaccgcgtaa

SEQ ID NO: 200456 - DNA, 1008 bp, Klebsiella oxytoca
atgaatactatttctcagtgcgtcggcgacgctaactttatcaatattcgggggctgggattcgatcatgtacacatgaaacttgaatcactaaaccctgctggttcaattaaacttaaaactgcgattggattagttgattattatgaaaagaaaaggcaaatcaacagccacagcatattaattgaatcatcttcgggtaatcttggggttgcgctaagtctgatttgtgcggagcgaggctatccttttgtttgcgtcgttgatcccaacaccaacatcaataatatcaaaatgatggaagcgtttggcgccaaagtaatcactgtcactgaaacagataataacgggggatacctcggtacaagaataaactacattcgggataaattagacgaagatgaccggtatatctggttgaatcaatattcgtgcccggcaaaccccgaaacacacgcggcgaccacggcaaaagccatccaccgtgcatttccacggcttgattatctgtttgtgggcgccggaaccaccggcaccctgatgggctgtacgcgttattttcatcagtattccccggaaacccgcattatcgccgttgacagcctgggttcggtgacgtttggccagcctccgggcaagcggtttatccctggccttggctccagccagatgccgcccatttttaacagcgctcaccttcacgatcgtttgctggttgatgagcgcgctgcggtgggtatgtgccgctggctggccaggacaaatggtgtgctcgccggcggctcgaccggcactgtgcttgctggtttctgctcgatggcccgacaactcaataactatgcgacctgcgtggtgatctcaccggatacaggcgagcgttacctggattccatttataacgacgaatgggtcaacgcacgatttgacgggatgaaagccgtgctcgaggacccctccagggttttcagcctgcttgatgaaaccgtcacccgtctggaaggagaataa

SEQ ID NO: 200457 - DNA, 993 bp, Klebsiella oxytoca
atggctgactttcacatcatcggcggtgagtttattgccgaacacctgagtaagcatcacgccgtcgtcacggaaatcgtgaagaagacctatcttcatcatgacaacgggaataccgaaaacccggacagttattttctccggttccaggattccgcatcaaaccggataatcgcccttcctgcggctatctacccggaagaaaccgccggcataaaatggattgccagttttcccggaaatgttgagcataacctgcagcgcgcctctgccgttctgatccttaattcgctggcaacaggatatccctatgcctgcctggaaagctctcttatcagtgcttaccgcacggcagcgtctgctgtacttggagcgtactggatgaacgggcagtcacgcacaatcccctcaatcggttttgtcggcgccggcgtgatcgcgagaaccatcagcgatttttttgtccagcaggaatggatggttaacatcgttgccgtatacgatcagcatgctgattcagcgcgcaacctggtaaaccacctccgcgctgggggacagcatagcggcgcgacctctctggaggacgccctggcgtgcgatattgtggtttttgccaccacagccggttcgccttatgtggagacgccgtttaaaccacatcagaaggtacttaacatttcactcagggatatcgcaccagatgtgatccttgcgtcacataatatctgcgatgacgttgagcattgtctaaaagcctctacttcccctcatcttgcagagcaacgcgtccggcatcggaagtttatcgacggtacgcttgccgggctcatgactggccgattcccgatacaccaggataagccgaccatcttcagcccgtttggattgggcgtgctcgatctggctctgggtaaatacctttgccagcaggcaatcgcctccggaaatgccttcactgctcctggtttttttgccgagacctcaaggtggtaa

SEQ ID NO: 200458 - DNA, 1806 bp, Klebsiella oxytoca
atgaaaaagcaacataacgctattctgcatatcgggattgttggaggagggcctcgcgggctggtcgtgctggaacgcctgacacactacgcgactaagtatgacattcctctggtgatatcaattattgaccctcaacaacccggtgctggtgtccattccccttcactgcctgaatacaaaatgttaaatacggtggccgggcagatcacgctctttccggatgaaacgatgctgtcggcaagcgaagagtcccggccggtctgtacgtttattgaatggtgtagacagcataagtctttgcctgatttttggtatacccatgaaaatcgccgcttatgcagctgggattttttgccaaggagctggttaggcgaatatttgcagtgggcgtatgatcatatagtgtcgcaagccggcccggaggtaacggtccgccatattcctgctgcagctgtcgatattgatcggattaccgatcagaaattcatgatttccctgagtaatgaagaaattcttcacgttgatgctgtctacctgactaccggccacggccagggggcggaggagggggaggggccagaatacattgcggacggggcgtccgtgttactgcagggcatggggcttaccgccatcgatacaatcgcggactggacgacagggcgaggtggtcatttcagcccgcgttctggcggcatacctgaatatattccgtcaggaaaagagcctgagatcttcctgacctccagaagcggtttaccgtttcgctgccgaccggagtcgctgactctcgggggaaatattacccgcgatgctgtcattttccgcactgacagagtacagaggctgaaggacaaactgccaaccggcattgacttcgaacatcaggtgcttcctcttatccgcgctgaaatgcaggctgcgtactacagcattcacctcatgaaagacgtcggagcggataaagctgtacgtttcagggaggcgcttcggaaggcggagagctggactgaaatcaacggtattatgcagaatgctgtttcccggtatggtgaatttaatgaagaatacctcctggccgcatccttaccccgggaagtacacccaaacagctatgcaacctggttggtgaatgaaatggccgaagatcttaacgaaagcattaccggcgtgacccacagcccggtaaaagcggcgaatgaagtatggcgaaactgccgccatcagttgcgtatcatgatggacgacagcgggctgtcagacgcctccaggacatttttttacacccgctatgcgccggtgataaaccgactggttgctggcccacaaaaagaacgtcatcaggagttgctggcgctcattcgcgctggcgtggtgaaaccgctacacccggatgtggtaataaatcgtcgatacgaccatgccattcaggctttgatccaatcggagaaaccgggtctggatatgccgcccctggtgaaaaagatggtcaggaaagggttattaacgattaagacgtcagggaggacctacgtcgacgttcgggccgacggacggccttccgcgctgaagccaaaggcacacatgtgggtattcggcccgttatgtgaaggcgcaacgtattacaatcactatgtaccttcaccgggttcgttctcacgatccagcaatgatgccgatcgcagcacccgggagttgttgatcccgggagggccatatcccaatactaaaatcaccgttccggctgaccgtagtaacgtttccctgtcagataaaagcggaagttctgagatacagctatag

SEQ ID NO: 200459 - DNA, 228 bp, Klebsiella oxytoca
atgaacacatttaacgaactggatcgtgtaacagccgccaccgagatagcgctcattcgctggctgacgtatggctgtgttatagactggttagcttatcaggcttgctattgcagactgggtcgaatggcggttgatcttactcgcctgacggtggtatcccagattgcgctcaaggagatggaccggctggccattgatggcccggttgctgcagcgctgagataa

SEQ ID NO: 200460 - DNA, 261 bp, Klebsiella oxytoca
atggatcaggaactgaatttttcactcagctatgagcaagtgaccaggataacggaggcgcgtatccgggaatgcgagctggccagccagggcgctaaatacctcagcgaatcgggtaaggcctgcgccattctgggattctggtatgaactggcgattaccggtgcgccagtgaaaaattacgaacaaaccaaagcgctcattgacaccgatcagcagcgcctcagacaactcatctggctggaggcggataagaaatga

SEQ ID NO: 200461 - DNA, 195 bp, Klebsiella oxytoca
atgaaagtcactgaacccggactgaatacgctgttcgataacctgaacaccctgatttgtgaggacagcctgctcacgcgccaggagcgtgaaaccctggtgcgggccgtggcggccatcggcgccatgaaagcgcgcctcggcatgaaaaagcccgcgataccggcatcgtcgaaaccgaagaaagagaaatag

SEQ ID NO: 200462 - DNA, 903 bp, Klebsiella oxytoca
atgattgataatggaataagcagctccacacctctgtggcgtaaaatcctccaggcctgccaggatgaattgctcgattctctgggatatccttcgacattgcgccgtcgactaaacaatgggtccttgccggtaaagctgccgctaattgaggataccatctggctacgatctgttgtgtgctggcacacttggctcaattatgaaaaaaattgtattcgctatcttcgacctggccatgatggtgattatgactacctaaaactccacatcccgcaactgaccgggctggtcagctgcgagattacagaaaattatctctgtgatatttctgaaatcggtgggatgagcagttcaaagaatggtgacaggcagtgccacggcctggaggattttgcactgcagttctgccgggaactagccataccagtgagtagtgatcatctggacaacaatctgtcacatttccaactacggttgaatgagatggaattcagcaaattttcctggatgccggcacggatatactggaacaacctgggtggttcacatcattttgctgcagcccggttccaggctagccagctgggtcagcgggttcctctgacaggacgactaacctcctactggattaatccgcaaagtgtgaggctgctgacgtctaaatgggacctgttcctgatatcggataacgtggtttatggtgaatttaaagatgcgctggcgcgactcaaatgcccgtttggcgtatcccatccccctcgatgggaagatggagaagagcagcgtttccggattatatggctggaacgtaatcaaacggtcccgtcgcgcgtatcgcgaaccctggcgcaggcgggatttccatcagtaggccagctgctgctcaaaccggagccctga

SEQ ID NO: 200463 - DNA, 1656 bp, Klebsiella oxytoca
gtgactcggattcggacagcgattccgactctgacagcgactcggactctgacagcgactctgactccgacagcgattccgactctgacagcgactcggactctgacagcgactctgactccgacagcgattccgactctgacagcgactcggactctgacagcgactctgactccgacagcgattccgactctgacagcgactcggactctgacagcgactctgactccgacagcgattccgactctgacagcgactcggactctgacagcgactctgactccgacagcgattcagactctgacagtgattcggactctgacagcgactccgattcggacagcgactccgattcagacagcgattcggattcagacagcgactcggattcggacagtgactcggattcggacagcgattcggattccgacagcgactcagactctgacagcgactcggattctgacagtgactcggattcagacagcgactcggatagcgacagcgattctgactctgacagtgactcggattcagacagcgactctgactctgacagcgactcagactctgacagcgattctgactcggacagcgattccgattcggacagcgactctgacagcgactctgacagcgattctgatagcgacagcgactcagactctgacagcgactccgacagtgactccgattctgacagcgactcggactctgacagcgattccgattccgacagtgattcggattctgacagcgactccgactctgacagtgattcggattctgacagtgactcggattctgacagtgactcggattccgacagtgactccgattccgacagtgattcggattccgacagcgactccgactctgacagtgattcggatgctgacagtgattcggattccgacagcgactccgattccgacagcgattctgactctgacagtgattcggattctgacagcgactccgattctgacagcgactctgactccgacagcgattccgatagcgacagcgactccgattccgatagtgactcggatagcgacagcgattcggattcagacagcgattcagactctgacagtgattcggattcggacagtgattcggatgctgacagcgactccgattccgatagtgactcggatagcgacagcgattcagactcggacagtgattcggattctgacagcgactcggatagcgacagcgactccgattctgactccgacagcgattcggattctgacagcgactcggattccgacagcgattcagactcggacagtgactcggattctgacagcgactcggattccgacagtgactcggattccgacagtgactccgattccgacagcgattctgactcggacagcgactcggattcggacagcgactcggattccgacagcgattcggattccgacagtgactctgactccgacagcgactcggattctgacagcgactcggactccgacagcgattcggattcagacagcgattcggattcagacagcgattctgactctgacagtgactcggattcagacagcgactcggattcagacagcgatgccgactctgacagcgactcggatattccgcaggccaacgcggataccaatactgcgctga

SEQ ID NO: 200464 - DNA, 249 bp, Klebsiella oxytoca
atgatcttttcctattgggattattgtttccagagctcctcccttaccataagcgataacaggtgttccacaagcctgtgcctcaactggcgtaatcccgaaatcctcttctgcggcaaacacgaatgcttttgcctcactcatatatttctgcattacgtcattgggttggtagccgagtatttcaatattactagttgctttagatttaattttattcatttcagggccatcaccaataacaactag

SEQ ID NO: 200465 - DNA, 228 bp, Klebsiella oxytoca
atgtccgcgagagtatgcatcggcgcgcacgaggcagatgagaaacggcgatggcccgaatcgtatagagacgcaaacctgaatactccggacaccgcgcttcaggacatcgctcaagacgccgatagcgggcagtatccggacggtactattgaacgccggggcaacggtactaccctgccctttatgactgacgaccggctatctcacccacgcacttctccctga

SEQ ID NO: 200466 - DNA, 699 bp, Klebsiella oxytoca
atgattcagtttcaggtaactaaggattttggtaatccactacttcccttcagtaacgctcgctctgcgatgtatctagaatcagcgctatctatttacgaaatgcgcagcgcaaaagacagtagcagaaaaggtaaggctctggatgttatcggcctgagctttgatagcgagggtctggtgtgtgatagcgttgatggtcattacgcggataccggtattattgagcctctgactaataccgtcatcgttgcgtttcgtgctaacccgcaggaagtcacaacgcagatttactctggtctgccagaaggggttagcccgtttacgggttcgcgagcggcaataaccaaaaatggttttttggtggccgatgtcggcgcaacgccgacgacgatacacgctcaaaccggcaacgtcacgccgggttgggaactcgtcgcggtagtgactggggaaaagcagctttcggtgacccgcgcatcgactatgggaacagtggccacatcgtttgaaaccagaaaagagccgggaagtactatccgcattgggggcggttatgttgctccccataacctcggtattaccggtcgggtgggattatgggcgatgtataacggtgctctggatgatgcaaccattaaagacctgtttgcaaaagcgcgcagcattatggcagggaaaggcgtagtaattccttaa

SEQ ID NO: 200467 - DNA, 2178 bp, Klebsiella oxytoca
atgaatattagtgaaaaaccacaatgggaaaataatatcagtatgcttgcccgccaacaaaaggttgaaggtgggagaggtggtgcggctaatattcaggctcagcaactggcaaaccgtacccggtttttgaaacaatccgtcgatgcatacagcaccctgattaagtcgggcgagcttccttattcaaatgaaggtgaagcaaaggccgctattgcggcggggaaaattcctgaaaatagtttgttttccgttcgctctgaaagcgcgggcgtatgggttgaagagtttaaaaatattaatggggtgcctgtttcaactggcaagcggttgcctgacagtcagggtatttcggtggtggttttcaccagtgatgatgatccgacaggtgagaaggctggattgtcattaacggtgccgggccaggttttccgggttgcataccccgatgacagcagcaccgagacggtttaccggaatgacggagatcgcgcggttaagctgctagaggtcgcggataaacgtgcaatggacaggatgttgccagatgccgggattatgggggaggttgatccagattatgccgtcgaatttgttgatgaatttttccgtcgcgctgtgggtattgatttgcgtggtgtgctggaggcaaacgccggaatgcgcattatgggagttcccgtaactaacctgccggatgactccgattactgttttgcattcggtgatgagctggggcgcgttgtctttggtatcgggaaaacaggcttcatcgaagtgatgggaatacggatttttgtcacggagggcgagaactttcttgaaattattgatgaaaatcagcgggtatccgccgggatagctagcaatggcgaggttttcaataattcagcgggggagccgcaaccggtagaagaagtaaagttttggctcgaatttgctgaggtattgcatgtcatcatctacgggcaatcactctctatcgggcaatacggtacaccggtactgaacacgccgacacgcaacgcgctgatgttcaatacgggggtgcgtagttacagctcaagcccatcgtcacttgtaccgctgcgtgaaactgtcagcggcagcaacggggagacagtggcatcctctctggcgtatgggtttactgataacgtcagtgatatggccggtcgtgacctgctgtttaatgccggtggtgtgggaggaatcacggttgaagggctttcgaaaggcacggaaccatatggccgattgattgctcacctgagctggacggcttcgcagatggcgctacaggggcgagattatgctgcggattttatgctgtggattcagggcgaagcgaacatggcaaacggaaccagtgctgccagttataccgggagggtgtcaaccttgcgtgaagatgttgccgcagacactgccgggatgcgtgatacaggccgggatctggtcatgttgatgtatcagacctcttctcatggttattacgtcgggacagcggaaaatccgccggaggttatcgcccaggcacaattagatatggccctgaatgacccgctgattgatatgtgggggccgtcatatatgggacttccggcaaaccataccatcggacagggtaacgtccatcacaacgcccacggttatcgtctgatggggctgtatgcgcaaaaagcattacgccatcgcctgcgaacacgtacagcggataaaccgaacggggaaaaatatctgcctgtacatgcaacccgcgcccgtaaaataaacagcagaacagtgattactgagttgtttacgtatcatccaccgttggttattgatgattcgtatatcactgagttggctgatggtaatcatggtgtcgaattacatgatgaaaacgggcggcttgatattgcatccgtggagattgtggccgggacaaaaattaaagtcgtatcgaaaaaagatatcggaaacggggcatttgtggcgtttgcctggactccagaaaatcgaggtggaattacaaataaccgatatcaacaatggtttttcggacgtgaaacaggggtacgtacaactattcatgattcggaccctgaaaagaccgatttaacagatgaaaacggcaaaccttatccgctttataactatttgccgattcagaagattgccatttccgaataa

SEQ ID NO: 200468 - DNA, 606 bp, Klebsiella oxytoca
atgaatagcctgttaccgccgggatcgtccgcgctggagcgcaggctggcgcaggcctgttctggaatcagcgatttaaacgtgccgctgcgtgacctgtggaacccgtggaagtgcccggcaaagttcctgccttatctggcctgggctttttcagtggaccgctgggaggaaacctggacggaaaccgctaaacgccaggctgtcagcgatgccttctggatacatcagcgcaagggaaccgtggcggcggttaagcgtgtgatcgaggggctgggctactcaatgaccattgaggagtggtgggaagtggccgacccagcaggaacatttcgccttgagattgacctcaatgatatcggcatcactgaaacgatgattaacgagcttgagcgaataattggcgatgcaaaacccgtgagccgccatatatcacagctaacgctatcggtgagcactaaaggcattgcaaatgttgggtgtgcaatattagacggggaagaaataacgatttatccgactcgctataccccggatgaaagtatttattacgacgggcaagcccattacaacgggaattatcatttttcaggtgacagcaaatga

SEQ ID NO: 200469 - DNA, 552 bp, Klebsiella oxytoca
atgaatctacttgcccttacaataatattcttagttcttgcaatatttatattccaaaaaagtcaattcataatagacatcaagaatatttttagatataaatctgacgatccaaccactaatacttctaatgagcatctaaacccagcagaaatatcagccaatagaatacagtttttttgtcagagattgatttttgcagccttaactatcttcctacttgtaaaaggtggtgttgagataatagataccttacaccctgaatttttatcagatcatcagtttttaacacatataaaaaagataaagacacttagttatgtagcaaaagctttagctgtttcctgtggattccaacttgcttttatgttaataaccaaaggccccgatgaagcagtagaaccaataatgcttggcattgcctctgtcatcttattaatgttatcagtaatagatccagaaaaatggagcgtgcacaattcaatatccgttacactgttaataatttgtattgcaggtttattttatttatcaagaaagcttaaaaagtga

SEQ ID NO: 200470 - DNA, 1062 bp, Klebsiella oxytoca
atgcttaaaacaaacaaggtatttattgacacacaatcgtatgtaaaggctggccttcactttgaagggagtgcatttaaggctttccatgaattatgtgcgaacggcgatttggtcttaattacaactacagttgttgagagagaagtaaaaggtaaaattgaggaatcaataaaggatgctctgcaggctgtaaacacagtgcaaagaaaagctaggcttctgaatagtattgataatggaccactccatggtttttttcggcaatttaacgaacgtgaaattcacgaagcagcacaaaaagtttttgatgatttcttgaaaggatgtcacgccagattagctcctatagaagtgatagatcttaatgagattttagataaatactttggcaaagaaccaccatttggacaaaataagaaaaaaaatgagtttccggatgcaatcacattggctgcggtagagcgatttgttaatgatgaagatgtgtatataatttctgaggatagtgacttaaaaaattattgtgatggaaaaagtaatctccatcaaattgactcccttgataagtttcttggtgaatacaatgcgcatacaaacgaattaagtaataaattgatgcagtttatcgaaagcaaacgtgaagaaataaaaacggatgttattgcgcaactcaatgatgcagatggatataactattcaacttgggaagatgctgagttagattcatttgaggtcgtcaatattgatgattttgaaccatcaataattaagattaacaataattattgtctggcgaccttttctgttcctgtagattttgaagttactgtatctggcccagactttaataatggctattgggatagtgaagataaggtaatgattccaatggagtcaactacacgaactgaagttcaagagattagttttgatgttggaattgaagtcaattatgaactcgaggatggggagttaacagatgttgtatttgatgtaaatattgataacttatcccgagggattgagttctctattgaagaaaataactttgaatattaa

SEQ ID NO: 200471 - DNA, 561 bp, Klebsiella oxytoca
atgaatttggagaaaggcggccgtggagccatagagcgtatggttgaagcttatggtttcaagacaagacaagctttgtgcgaccatttgggaatttcgaaaagtaccttagcaacacgctatatgcgcgactcttttccggctgagtgggtgattcaatgctccttagaaactggtatatctctaaactggctcaccacaggacaaggttcaaaacaaagttcacataaagcaaacactaaagaacttgagaagcatgttttgaccaatgggtcattacgcaaagatggctcatatgtttttgatgcaaactttttgcctgataatcttaaaaatcctgttgttgtgatcgatggcacttcagaatttatctgcgatatggattatggagatgtgcgtgacggcatgtgggtagtgagtattgatggagaggttgctctaaggagtttgacacgtcttcctggtagccgacttcgcatagatgggggcaatagttcattcgaatgcgcaattgcggatattgagatacttgcaaaagttttagttagttgcatccgataa

SEQ ID NO: 200472 - DNA, 585 bp, Klebsiella oxytoca
atgacaacaacgtccgaatccaatgatgaacagaatgaaaatggtgatcttagggccgtaaagcgcctctatgagctgactattcgcataagagactttgagataactcagttatctcaacgtaataattttttcatgatttttcagggcgttcttttcgcaggtttagccaccttataccaaaatgacaagggtgaagcattcgtacctttcattgcgcttgttggcttgattgtatcgttctttcagataggaatttcctctggtgcaaaatattggcaagaatattgggaggaggcggttaaagaaattgaggaagaattactccgtgtgatgtcactgaaagggcatgaaacacgtgagaaagtttaccgcatattcagcattgcgatggtagaagtagatgctaaagtcaaagatcgattaaatcgctcaagcacaaacatgataataaaatttttagtatcttgtaaattttcagttagtcgcataccaatatacactgctttaacatttttcgccctttggctatccctaggtatatatagttttattggacgtcatttcttgattctttggatataa

SEQ ID NO: 200473 - DNA, 1074 bp, Klebsiella oxytoca
atggaaaacttatactacactcagttcagccatatagactttaacgatcccttcttcgattcactaaacaatgattatccggactttgcaggatggattgataagaaaaaaaatgatccatcagcattagcctatgtgctttttaatgaacaaaacaacattgaaggttttttgtatctgaaaatcgaaaatgagaatgttactgacgtaacccctcaattaccgatgagaaagcatctaaaggttggtacattcaaatttgaatcacgtggaactcttcgaggtgaacgttttattaagaagatattcgaccatgctttagaatgcgatgcagatgatatttatgtaacggtttatccaaaacacgcttatcttattagattattcaaatcgtttggatttgatattgttggttcgaaaggtcctgacgataatgcggaagacgttttactaaaagaaatgcacaacgttcagttgactggggatatagtcaatgattatccattcatgcatcattcagatagtaatagaaaattcattctctcggtagatccccattaccatacaaatcttttcccggactccatactccgtacagaatctcctagcatcgtcagcgacgtgtcacatacgaatagcataagaaaaatatatatttgtgcaatgcacggtgttacatcatttagacctaatgaccttgttttaatctatcggacgaacaaaggactatctggttctgcgtattataattcagtaatcacttccttatgtgtggttagtaatattaggcatatagatgaatttgatacagaagatagctttataaattattgtaaaaaatatagtgtttttgacattaaagatttaagttatttctatcgttcaaaaaaatatccattcatagtttcatttacatataatttagcttttcctaaaagaccaaaccgtgctaaacttattactgaagttggtttgaatcctaatgcctactggggggtattagatttatccgaccaacaatttgaacatattattaaacttggtgaagtagatgaaagtgttattgtcaattaa

SEQ ID NO: 200474 - DNA, 744 bp, Klebsiella oxytoca
atggtgaaagccttccgcccttcattagggacaaatcagcccacagcggtacagacccctaaaacgccctcagcccccgaaaaaaagtgggcgttttcttttcgttattggcgtcaaattgagaattttgggttagatcgtaccgattcaggctggtttgtttcactaattggaaaattatctgagctttctcaaaaagatgtcaaaggctttattaccagtggggccgaaagagaggcatggcgctatcattcaataaactgggaacaaagaaatatccccgtacaacgtaaccagttgacctggattgactctgactaccttgaaaatgacgaagaatacccattattgcaatttcagatatctactgcccttggtagagttgtaggcttttgggatgagaaccaaatttttaatgttgtgcttttagatcctcttcataacatacagccaacacgctctcataactatcgagttgactactgtgcaccgcttgagaccccctactcacttttactctgtagagtagatgatataagacgcacatgccattgttcagatcctgaatgtagcttcaaacgtcgaatcgagcaatttgaagaaattccaatccagacaaacacgcttgtacactatgtcagtgacatggaatgggctgagacacagcaatttatagcggatggtttgataagcgatgccaaagaagttttctcttgggggctactggctatcagggaccagtaa

SEQ ID NO: 200475 - DNA, 561 bp, Klebsiella oxytoca
atgaaagaaacaacacccataggcaaaagagttaagaaagcattaattgactacaaagaaaaagacatgacatctgcgctggttaatatcatgccagcaatagatgcaaccgccaagaaagaatacggtggcggcgtcggaagcagaataaaagcattcatgagaaataatgaaggattaattaacactattgcgcttggtttcttcgttacactaccttcattcttttaccccggaaaaactaaagcagtagactttgctgacataatatacgataacataagaacatatatagtccatgaaggagaggttggggagatgattgagttcaattcagaaaataaattttcatgtggtccaaccaagtggaatttaagcgaggagcatgttttagcatttattttatgcgtcatcatttcagataaaaatgcaaatgaattcattgctgacgatgaaataataaacctaagattcggtaacttctcagttaacgatttatggggaaggagattgcacttattacatcacatagataataattcaaacaggcctatgaagtag

SEQ ID NO: 200476 - DNA, 867 bp, Klebsiella oxytoca
atgcaaagaggcattgtaactacaccgataattttaggtgagccgacaaaaggttataatttaaatattgaacgatttttaactgatgaagaacttaattactatatcctatattgggataaaatagtaatgcctaagtttgccatacatctcgggttaaaaaatgaacaggagttaattcaatgtggtgttctttcaagaatgccttttcattcatcaaatatatcatcagcagatctacctcgattaaacgttttagcacaatatactgctgttgatgagttaagaaaaagtgaaccaggaactgactggagaatacatcagataggcagtcggttaaattctccttatgatttttcaattaattccccattaaaagaacgtatcagtatagagttaatgggattactgccagttccacaatccggtgttaatttacatgacattcttgagtttaaggaaagaaggcgtcctgaattaacagcactccactcttattgtgatgatttgtatttggaggttttaaattccgctgatcctaacctacaaagagctcgtaactttactaagttaaaaaaagctatcgatgatttggatagaataaattcgcaagggtggcagagtcctatcaaattcaatcttgatatatcatcagagtttgatatatcaaatattagagctggatatgctatgttattcgatgcaactcagtcgccagcacctattactactgctattcttgccggtgctttatccgtggctgaaggttttgtaaaaattaaggtagaactaagaaatgtcaggaaaagtaatggtataaatcatatagtctatgtatctaatgctaaacaagaggggattctttaa

SEQ ID NO: 200477 - DNA, 225 bp, Klebsiella oxytoca
atgatttttgaactcaaagaagacattcccgataaagggcttgtcgccggagaaaaaggctatgggggtttggtaagtatcgggcctgataaattcaggcacatggttaagtttaccggaaatgataaccataagagcataatcatgtatttcgatgttggctatctggaagtggtagacggatcaaacactggtgttgatgttctggaaaatgtttatctttaa

SEQ ID NO: 200478 - DNA, 561 bp, Klebsiella oxytoca
atgaaggcaattttgtttttagtttcagtgttagtatccacggcggcttttgccgagaagaatgttaagtgtgaaattaaatatcttggtgatgtggataaattcaaagttaccgaattttcttttatgggtataccttctgatacttatcttttcacttgtgcagattgcggtaatttacaaattaacatattcccatcaacacaatcagttttatcatactcatttgaaaatcaacaggattttgaaagaaaaatcaaagcggactataatcgtaaggacatcgcaacgctcgaaatggaaaacctttctcaaggtgggaaaataaaatattccattctcgatactggggttgcagagttttatcctttgggtcaaaaaacaagctatctatattttaaggctaagcagagcaatcatgacgaagctgtgagctactctggctttgtaacttcaaatggagataggtcatgttctgtaattgctacataccctggtgacgagctttctcccgtgggaagcaaatcgttaagttattttatgaacaatatattaatttag

SEQ ID NO: 200479 - DNA, 141 bp, Klebsiella oxytoca
atgaatcatctcaccatagagaacatccgctactgctggatgaagcttcgcctttgccgtcatcgcggcactgtattagttgactaccgcatcctcaaaaactttatacgcacctgtcagctccggggagagacagcatga

SEQ ID NO: 200480 - DNA, 1188 bp, Klebsiella oxytoca
atgatatcgacatcttctacttttgattctaagttcattggcatttataagtcaacaattatcgtacaaaaagtaataccctcactgacattgctacgtcaaaaagtgtgcgttaaatatttaagtgcttttgatctttgcttttcagaaaagaaagtaaccagcatggttttgtgcccagctgataaactagagcagcatataaattttatagaagataattttttactattgatcgaacgttttaatcctagtagatatttaaaacatatacatctggatgatgaggttgataatttaaatgcacgccaagatgcaagtaaaatcaatgaaataaaaggggtgttgatagtagactttactcttaatctaaaaaatgattattttttaaagaaacacctattatcaaaattgcaaaaatctaaaacacccacacaaactcttaacgtactaaaagacattaataatataatcaaaggatgttcaaaaaaacggaagaaatactatgaggtaaattatcctgattggttaaatgaacttccagattcatttaaatataaagatgttagtgataattatggtttcgacatcgtaactaagtttgatttgcgattttgcccttattgtaacgacgaacctattcctactatcgttggagtcaatcgaaattatagaacagctatagatcatttctatccaaaagcaagatatccatttctcgctgtgtcattatataatttcataccggcagggactcgttgcaattcaggttttaagtccgaggctgacatggttggttattttaatccaagcattcataaacttaagaaagaagctttgtttgattttacttttagtcctgacaataaaattcagcatgatactttgattgtttctttgaataaaaatgatgatttactcaataaaaacatttcattatttgaattggaaagtgtttataataatgatgaatgtaagatagagattgaaaaaatacatgaaagaattttacatcatcgctcattaggtgatgaacatttggatagtatattatcgagtgaacaactaattaggcgtgagtttaatattgatttatttatttcggcaaagcacgtacgctggcagaaatatcttgttgattttttgaaccaaatttgcagtagagattatacaattaaactgttataa

SEQ ID NO: 200481 - DNA, 288 bp, Klebsiella oxytoca
atgaagatgatttcgtactggaaaaattctaaaccattccatgaagatgatgggatggtattaatttatggtcactatgatcataagcacgaatacaacggcggcactaaagaactcggcgttcactgggatggatatccgcagtcgcgtggaatactcagtccctgtgtcataccggctaacacacgtaatgccatgctctctggccttttgcaccaggcggtgacaaacggtgataagcagatgatgaataacattactgaagcaattgagttctttagcatctaa

SEQ ID NO: 200482 - DNA, 132 bp, Klebsiella oxytoca
atgaaaaactattttaacattacctgtaataccattttcttctccctgatttatgtaaaaactagacatacagttaattggcaaatatttatctatcgcaaacaacttataaccaacaaaggcaataactag

SEQ ID NO: 200483 - DNA, 564 bp, Klebsiella oxytoca
atgaaaaaaacaatcgtagctgtaatggtcgctgcatctgcagttctgagcgcacaggctttcgcggcaggaaacagcgctaacttgacaattctgggtaaagttactgcaactggtgaatcctgtaacgtcactccggctccgctgatcgcgggtggttctttaactctggatgatgttcgtgctgataaactggaagcctatgcactgaacgctccatataaagatctagccaaagatatcgaatataaaatcgaagattgccagaaaggtgctaaagattacaacggtaacatcagtgttacagtaactggcgattatgtcagcggtatgaacgacgttctgaaaaaccttgcaccaaacgctgccaccagcgctgctgtaaccgttgttaataccgactggagccgcgttgatttaagcggtgttacagctgctcagaccgtctcttataccactggtaccccatcttacatgcgcttcaaagctgcatacgtcagaactgcaactggcgtgacaaacggtgacgtaaaaggcgtagcaacctttaccatcacttactaa

SEQ ID NO: 200484 - DNA, 693 bp, Klebsiella oxytoca
atgcggcaatcattattaaaattagctatagctttttctttagtaaccagctcctttgcccatagcggcattgtcatcgattcaactcgccatctttacaaagagggctcgcgcgagatcaatgcacacattgaaaacaaggatgacaccccctacttaatcaagtcttgggtagaggcgcccgaaggtaaaaccgcatcttattttatggttacccccccgctcttccgcctggaaggtaaacaggaaaatactttacgtatttttccaaatgcaaacatttcgaatgcaccgaacgatcgcgaaacagtttatttttttaatgttatgtctataccaccgaccagcgatagtgatggagataaaaacaagcttcagttagcggttcgacataagatgagactaatctatcgaccaaaatcagtacaagagctatctgctaacacggaggcaaaaaaattagaatggcgaaaaacaaataataaagtaactttaacgaatcctacgcccttttttatttattttaagtcagtaaaaataaacaacaaagagattaatagctccatcccacatgtaggtgctttttctacagaggaattcactttaccagcaggagttagcggaacggaaataacgtggataatctcaaccgatggcggaggttcggggtctacatattcgtcatcattttaa

SEQ ID NO: 200485 - DNA, 2520 bp, Klebsiella oxytoca
atgtcaaaattaataaaaaaaagagctggaattcttgctggtgtaccatatacgattgctgttccggcacttgctttctgcttatgcagtgtcgcaacggcccgtgatttttttgatcctgattttattaaatcagtcggtcaggatccttcatctgttccagatttatcagtctatgccaccaaggattctcaagcaccaggtgaatatcgtgtcgacgttgtacttaataatgaacttaaagaaacaactagtattatgtttgttgaaaaacaaaacggagggttgtcgccttgcttgagcatcgaaaagctctccagctatggtgtacgtctaagcgcactcccaactttaaaaaatgatgtaaaaggatgtgctaatacagctgatataccaaactttaaagccgatctcaactttaatacacagcaacttttgctatccatccctcaagctgccatatctaacattgcacaaggatttgtctctcctgaagagtttgatgagggaattaatgcgttgttaacaaattatcaattcagcggctcaaaagattttgacgaaacacaagaatactataatctcaatctacagtccgggctaaatattggcccctggcgtattcgtaacctgagtgcatggaataaaaatggtggtgacgaaagcagttgggactccgtatatctttatgctcagagaagtattattccattaaaaagcaccttagttatgggggaaagctcttcactttccagcatttttgatagtgtaccttttacaggtattcagctagcgacagacacagacatgatccccgagagtcttcgtggctttgctcctattgttcgcggtattgccagaaccaatgcccgtgtcatcattaagcaaaatggctatcaaatttatcaaacatttgttgctcccggcgcctttgaaatcaccgatctctactccactggcggtaacggtgacttatacgtcaccgttgaagaagctgacggcagcaaacagaattttgttgtcgcttttgcgtctttaccacttatgctccgagaaggccagatggagtatgaaattaccagtggtaaatatcgcccgtatgataacaataccgaagaaaaaccctttacccaggcaacaattagctatggggtgttaaataacacaacgttatatggtggtttacaaacagcatcagcttatcaagcactagcattcggtgtcggccaaaacttaggtgagattggggccatttcaacagatgtaacccaagcctggtcgaaaaaacaggacgacgaaaaaacatcaggccagtcctggcgtattcgctacggtaaaaatattctcgaaaccggcacaaatgtttcagttgcaggttatcgttactcaaccaaagggtttagttcgctatcagatacgttcaacacatataatgaccattatagctcttcttcggcacgttctgtacgaaacaggactaacataacggtgagccaaagtttgggcgctaatctgggaagcctgacaatctctggattgtttgaagactattgggatagcggccgacgcaataactctctaaacattggctataatggcggagtccgtcgcttcaattactatttcggctatagttataatcgctattcatggagtaatggtgattctggccgaaatgtggaagatgatcatctactttcgttcactgtatctgtaccattgagtgaatggcttccgagtacttatgctagctacagtataaataatagcaacccgggatccaccgaccaatacgtatctcttaatggttcagcgctggaaaataacaacctggactggagtgttcagcagggttataacaatagagaagacgccagtggtagtgtgaatgctacctacaaaggctcgttaggccaggtgactggtggttacagctacaataaacatagtcaaatgttgaactatggtttgagcggtggtgcattagttcatgcaaatggcattactctgggtcaggaaatgtccgagacggccatattaattaaagccccaggactggataacgttagactggagaatgacaccagtattgaaacggattatcgcggttatgccattattccttacgcgacacctttctatcgtacaagcgtaacgttagataacacaacgttgagcgataatatggaactaccgaatacgacccaaaaagtagtgcctactcgcggcgctatcgtacgggctaattttgaaggtactttcggccgcagagcgttcctgattctgaaaagattgtccggtgaaaatgtaccttatggtgcaaccgtaaccttaacgactgataaaaaagcacaggccggtatcgtatctgatggtggcatggtttatatgtcaggcctaaaagataatggtgaggtatatgctcaatggggatcaaaaaccgatcagcagtgtaaagctacttatacattagctgcgggaaccgaaagtattgcgcaagccacagcagtttgtcgttaa

SEQ ID NO: 200486 - DNA, 1020 bp, Klebsiella oxytoca
atgaaaaaatttattctttcaataggtttattacttgcaagcttacaggcgaacgcctcttgctcttacagcagttcaactagtggcggtattacagtaagttttggtacgcctgctgtcctggctgatccaacgttacctgttggaacaatcttagccactgcagtacgtgggaaccttgatccaaaaacattttcatcatgtacccctggagatatatttgttgtcaggacaaccccaaccgttaatcaatctggcgtaaataaaattaacggacaagccgtttatgagacaggaattccaggtattggctttcagatatccgatatattaaagcctaagggacgatttattcctgcagtaattgatcagactgagccagcagaaaaccgatatttttccacatcaggaatatcaaagcaagttatggtatggctagtaaaaacggggccaattacccaaacaaaattaaccaattttattacggtctactatatggcaggaacgtctggtcaaacgagttcgggaagtaataatattgcgtctctgttcagggttaacatagacttgacgaacatgaagtataaagagacaacatgtgaaatctcgcccagagacggcaacacagtgagattgcaatccattgatttatcagatcttatttccctttctgcaggcaaggctgctggtaaacctaaaaacttcaccgtcgacataacctgtcctactacagagataaacaaaagttatatttattggtttaaccctatttcattaaattcaagttcagctgatggtgttttacttaattcacttactgacggagcaacaaacgtaggtattatcattaaaaagggagcaaccgcaataaaattcaacgatttgagttatacctttactactgccaagaaccagagtcagactttttccgccgattactacaaaatagcaaatccagtaacgctaggggttactggggatgttaaagttgacttcgaaattgttcttcaggaaaaatag

SEQ ID NO: 200487 - DNA, 366 bp, Klebsiella oxytoca
atgaaacaattaactattgttgaaatgaatgacgtttcaggtgcaggtattaagcaaattatcaatggcgaccaaggcgtcctggttggactgctggatgcagctctcggtgcggtactggtaggttttggtacatctgctgctggtggtctgcagggtggcgtaaccggtaacggtgacggtggtggtatgctgggcttcggcattatcactactggtatcggcgcaatttggggcgcaatccagggtgcttttactggcgtggtttggggtgcttatcttggttcttcagaaggcatggactatgtattaaaaggtgttgatgcatggttctcaggcactattggtggctggactccaagctga

SEQ ID NO: 200488 - DNA, 1218 bp, Klebsiella oxytoca
atgctggcaggaatccctgcatggttgatttgcatactttcctttctttttctgagcgtactaatcactacactcaccacttgtagctacacacaacgtattgatgtgcgtggggaagtgattactttgccacattccataaacgtatatgcaccacagcaaggatttgtagtaagaaaatatattgagacgggtgatattgtccataaaggtacacctctatacgaaatagatgtctctcgctcgacagtatttggaaatgtaactgatgagatgactgcagttattaacgagaaaataacaaatgctgaagatatcataacaaaaatattaaaaaacaaagacgaaactttagaggctcttcattctcaggtgcgtcaatacgaagcatcgttaaaagaaacaaaaaaaatgctgagcgataccgacactggccttaagaagatgaaagctaatcttggaagctatgatacttatcttaagcaaggtttgataaccaaagatcaatacaactatcagcattctctctattttcaacaacaaagtgcgtaccaatcacttgttagccagaaaatgcagcttgatactcaactcactcaacttaaaagtgatcttgtagtaaaaagtgcagattttgacaatcagatttctagccagaaaaatcaaatcaacgattataaaaatcagcgtgtagaatcaaatgctaatggtaatgctgttattaaagccactgcggatggtaaaatagagtcagtggcagtaaccgtaggtcaaatggttgacaaaggcagtagcttaacccagatcaagcctacaggaaacatcgaatattttcttatactatggttacccaataatagcatcccgtatattaaaaaaggcgacactgttaacattcgctacgatgcgtttccttctgataaatttggccagttccctggcatagtggaatcaatttcgtctgtaccagcttcgaagcaggagatgtcagaatatacaaacgtagtaagtaatccaaatcagcaggagctcgcgctttataaggcaattgttagagttaagaataaaaaatttgattataacggaaagacgctcgagctctctagtggactaaaagctcaagctattgtattcctggaaaagcgtcctttatatttatggatgttcactccactccataaaattaagcaaagcgtaagtgggcccatcaatgactag

SEQ ID NO: 200489 - DNA, 2127 bp, Klebsiella oxytoca
atgactagagaattatttgacagtattaccaagcggcttaactttaaattacgaaagagcacaccggttattttacaatccgaagcggctgaatgcggtatagcttgcctggcgatgatctccggattttatgggctcaatattgatctgttgaactttcgcgatcgctttggaacgcctgcacaaggcgtaactcttttatctttaagcaaaattgctgaacgagccggcctacaaaatcgtgccctttcgctggatcttaatgaaatgcgccagctgaagttgccctgtgttattcactggggaatgaatcactacgttgtgctgactaaagttcgtaaatccagcttcgttgtacacgatcctgcgcttggtaaacgtgtgattggacttcaggagatgtctaattattttacaggcgttgcgcttgaactgtggcctgaacaaaatttccgtcaggagacagttaaatctcgtctacgtctgatagatttaatgcgtaacatcgttgggctgaaaagtacgttgctaaagatttttgctttttctgtcgtcattgaagccattggtttattattaccaattggtacccaactggtaacggatcacgttattatggcgcacgacgaaagtttgcttgccgtaatctgtataggcctggtgtcatttacacttttcagtgctttcatcagcatgttaagagcctggacatctttgacactgaatacattgacgagcatacaatggaaaaccagtatgtttgatcatctgttcaaactgcccttatccttttttgagaaacgtcatttaggtgatattcaatccagattttcatcgctagacacaatcagatcaacatttaccaatagcatcgtcacaggaatcatcgactcaataatgactattgggcttttgatcatgctaacgctttatggcggctggctgtgctgggttgtagtaggttttacagcttgttatggcattatgcgcttggctacgtaccgtttttatcgccgagtatcagaagaacaagttatcaaaggagcacgctctagctcacatttcatggagtcgttatatggtatcgcaacgattaaagcccttaatttaaaagaacgtcgttcaaagcactggctaaatttaaatattgatgcctgtaacgcagcgattaaacagagtcgctttgatatgctttttggcggcattaacacccttatatcctctattgatcaggtggtaattctatggttaggggcattaatggtaattgataacaatatgacactcggtatgtttatggcatttaatgcctaccgaggccaattttctcagcgagcatccaacctgatcgatctgtttatgaaagtacgtatgctctctttacataatgagaggatttctgaaattgttttctgcgagccagaaaaagagttgccatctcgccgtatttttgatgaaaacaccggggtcaagcttcaagtaaaaaacctaaactatcaatatgatccattttcacaacccattatatctaatttaaatattacgattgaaccgggtgagtctgttgccttaatcggcccatcaggcgttggaaagacaaccctattaaaagtaatgagcggcctactttctcctacgagtggagatgttttagtgaataatcttgatatcacaaagattggcctgaacaattatcggttgagcaccgcttgtgtactacaggaagaccggcttttctcaggttccattgctgaaaatattagcggttttgatgataatgcagatattgagttcattatggaatgcgctaaaaatagtaacatacatgatgaaataatgcatatgcccatgggttatgagacattaattggtgagctgggtacaggaatttccggcggacaaaaacagcgaatcctgattgctcgagcgctataccgtaaaccaggtattttattcatggatgaggcaaccagccatcttgatttacaaaatgagtatcatataaatcagtcaatatgtaatttaagtattacacgtgtgattgttgcacaccgtccatctacaattgcatcagcagaccgtgtcatcgatctttcacaaaccaactcaatttcattgccttgttaa

SEQ ID NO: 200490 - DNA, 858 bp, Klebsiella oxytoca
atgactaaaataattaatggtattaatactggcgccattaaattaaatgacaagtttttcctgatggctataaagattaaaggcgatgactctttttgcagtacctattatatgcaattcgatgtaatggtcgactttcttattcttatgcgcaatcgtgcacacaaagcccttgaaagattgggagataaaggtgaactttataaagcaaaaataattgctgagcacgaaaagatggcaatgaacattcctgcttttgaagaagaagaactacaacaacctagtcagtccaatctaattgcatctattactcctaagtttagtgatgagcactgtacactgattgtgatgttacaaaatgaacatattttttccttaaacattgcggacatacaggccgaatttttcattttagcaatccagcaagcgcttagtgcaaccaatgatagtgaaacattaaagcaaatcgcatcgattctcgattttctgatgctttattatgttgatctttcagatttaagttaccttaactataaaaaaattgatcacgaaccgtggaaacagtcactattttctcagcatcttgctgttctttatagttttgaaaaagagcagggagaagaactcttagcgggggcagtgatcaaaacaaacgctcagccaaacacagaagaagcaaagaatcttgtcacgcggattgcacttctcgcgccaggactcaaggctattcaggagcaaaggcctttagtccagacatttatgcaaacaatacctgcgcatcgggcccaagttcttacgttagatgagtgtatgcgcccattatatgaattttgccttgaaactcagaaaaatctttag

SEQ ID NO: 200491 - DNA, 336 bp, Klebsiella oxytoca
atgactgacgccgattctattgcagaactgattaaacctgtagtgtttccttcaaccttacgcagttataccgtgtcgtatgtgacgaattatccaaaacacgatcctgtacccgcgctgattttaaaaggtcagtggcttgagaaagcgggttttacccccggcagaaaactggaggtacgcgttatggatgagtgtattgtgctcaccgccaaagtgatggagccaacgctcgagaatgcgtttcatcgtgtgcagaatctgtcaaagcgcaagcagcagcaaatcatggagctgatcgcgatggtggaaagcagcaagggaaccttcagttaa

SEQ ID NO: 200492 - DNA, 1392 bp, Klebsiella oxytoca
atgagacagcctcagtttcccaacgaatggagtttagtacaaattgaagacattcttgccatgcaagaagatggaaagatcattcatcagggctggagtcctcagtgtgaaagggagtccgcttcagaaaatgaatggggtgttttgaaaacaactgcaatccaagatgggttctttttggataatgaacacaagaagttaccggagactaaaacacctaagccacgtttagaagtgaaaactggggatctattagttactaatgcagggcctcgttccaggtgtggtatcatttgcttggttaagcacacgcgaaacaaattaatgatttcggggaagatgtacagattgcgtttgcctgaacaatttattatccctaatttcattgaggcctggctaaggacttcttttactcaaaatgaactgaacaacaggaaaacaggaataagtgaaagtgggttaaacatgacacaatctcgcttttcaacgctaccagttcctctaaccccattttctgaacaaaaaatcatcgctgagaaactcaatacactgctggcgcaggtagagagtacccaggcccgtcttgagcaaatcccacaaatcctgaaacgttttcgtcaggcggtgttggctagtgttgttcgcggaaaattatcaaagaacacgggacaatggaaaacatatttattaaaaaacatttgcattagtatttcagatggtgatcatcaggcaccaccaaaatcagaaacaggaataccttttctcgtaatctccgatgttaacaaagggcagattgattttggaaatgtatccagatgggttccggagtcttattacgaatcgcttaaagagatcaggaagccatgtcaaaatgatattttatatacagtgactggttcttatggaatcccagtaattgttaatactactaaaccattttgtttccaacgacatattgccatcataaaaccaaatagtagtttgattgactataagtttttagcattttatttagaatcaccacaaattttcaaacatgcaagtgatgttgctactggaactgcacaaaaaacagtttcattatcaagtcttcgaaattttgaactctcagttccctctttagaagaacaacacgaaatagtccaccgcgtcgaacaactctttgcctacgccgacaccatcgaaaagcaggttaacaacgccctgacccgcgtcaacagcctcacccagtcgatcctggcaaaagctttccgcggcgagcttaccgctcagtggcgtgcggaaaatccggatctgatcagtggtgaaaacagtgccgccgccctgctggagaaaattaaggccgaacgcgccgccagcggcaataaaaaaaccacgcgaaaaaaagcctga

SEQ ID NO: 200493 - DNA, 1188 bp, Klebsiella oxytoca
gtgcgaatcaaaatgtacccagcccaaaatggagatgcttttctactaagtaccaacagaactaacatccttatagacggtgggtatgccagcaccttcagttcatacatacaaaaagatctcaaagagttagtagctaaaaatgcatgtttaaatctaattatcatcacgcatattgatgctgatcacattggaggtatcattcgccttctggcctcaaacggtgattcaaatgctaaaaatattatttctattgaagaggtttggcacaacagtctccgaagcttgacttcagtaaatcaaaccactctaccacctgaagaccttgaagtgattgacgccatcattaagcgaggtcatccgaaagagatcagctcgctcccaagcgttaacgagatcagtgccagacaaggctctacattggcaactttgatcaaagctggagagtatacctggaatcgaactgatggcacacaaagcatatgtatcgactccgtgcaacataagcaattccaagatggcttcgtaagagtactaacaccgtcaagagatcgactgaacagcttaattaaatcatggcaacgggacttaaggcgctatggttttactagtcctgtaagcacgagccaaactattgacgatgcttttgagcttaactttgagcacaataataaagtacaggctaaaggagaaagtctcatatctgcagggtgcaataaaaggcttgaggatatatataaaccggatgactcaccaactaatgctagttctattgcaaccattatcgagttaaatggaattcgattgttaatgcttgcagatgcattggcagaagatattttgatggagatccagagactgaagtctcagggagaaaccatgatgtttgatgcaataaaaatatctcaccatggaagtaactacaatactagtcctgagctactcagggttatagatgctccaaggtatttcatttcatcggatggtagcaaacacaatcaccctgatattgaacttcttcgagcgataattgatagggaagcaagctttacaaggactctctattttaactattcgaccccagcatcgagagaaattagagattatcaagcaactacaggcgctactttcattgttgaagaagacgcaactggttggatagaaattacaaaggaacaatcatgttag

SEQ ID NO: 200494 - DNA, 5766 bp, Klebsiella oxytoca
atgttagacactgaaatgaaagtagcaacttgtaagattgaatgtggtgatgaatatggtacaggattactaattacaccgaaaatagtattaactgctaggcattgtgtagccaatgcaattgaaagtgattcagaattaagtataatttttaattttggttcccccattttagcaatgaaagctcatgttcttggtcatgatgcaaagttagacatcgctttagtagagttagaaattgagtgcaatatttctccagtcaaacttagtgggatattaccattaggtggaagccgattttattcctacggatggcctgttactaaattaactatggggcatcgtttagaaggaacaattattcagacgtttgacagacctaagcttcgctctgatatagagatcagtatagatgaagcattatctttaaacgactacaaaggattttctggagcatcagtagtttgtaacggcacttgtgtgggcgttattagagtttccgtagaaaaaaccattggtgttgtttctgtatttagtatgcgcacctttttgaatgaacatggattgaatgtcgaaactaataacgatgggtataagcgtaaagatttagcctctagaaattcatttattaagcaatttgataaatttgctattgagcaagaaaacagttacctattcattaatggtgcacatggtataggtaaatcaacattttgtgaaatatacacccctatagactcttctttagaacacttcggtacatatagttttacccccccaaaaagctccaaaaacgccactcggctggcccaaccacaagagtttttcaattggttaaacatgcaagtatcgatcttcaccacaggatctcctggacgtatagaaaatggtgattatccagagttaataactaagacagaacaacttttcattaagctaagtggtgtttactcctcaagaaatgtaaaaggagtactgttcattgacggattagatgaagttgaacgtcaagatgccgaagctcttaacaagttcattgggctgttacctatgacattacttcctggattggtaattgttctttccgcacctaactatgagcaagttgcaactcgattaggtaaaagacttggagttgaggcatgtatttctatgccctctcttacagataatgatgtcaaagattattgctatagagctcttacaggtgtgcacgttagttcaaaaactataaacttaatctgcgaacgagcccaaggacacccattataccttcgctatttaatcgatctcgtcaactcaggagcgagcgaagatgaaatctgtgaattgccgttaattgatggcagcattcgaaaatactatgacttgctgtggctgaagctgatggaagataatgacgccataaatttactagcaatagttgttcgtttgcgctggggaatccccattaaccaattcactaaaattttgaatccaaacgaacagtcgatattgattagcactttagcaagaatacggcacttattgttgtctccaaatcagacaacaatctatcactcttcattttctgactttctacttgagaagacagcattacgagagcaggatattcaatcacggctggttgagtactgtaaaaaacaaaaagacgaaaagtacagtgtacttaacctaatttatcatggacttaagtccgaggggcaagataaagcgctattagtaactttatgtactcaaaactgggttgatgattgcgtttatcaaggggttgagcctgatactatccttgaagatcttaaaggtattttgaaagtagcaactgagctaggtagtttagttgaaacagtacgaatccttttgcttaatcaaagaattcgattccgctacaacactctatttgctcaatctgctgatttaacagcaaatgctttgatctctatagggaaaaaccaggaagttctgcagcatgtaagtcgatataagcagttaattataccgctggaagaagctctcacaattgcattgaagctagttgactctcacagctatatggaagctttagagttattaagtattgtagagaagaacttaactgaagaactcgaacaagtgtttaacggaaatgggctttcttatagggtgtttcttgatatttatgaccttcaattacagcagtatcttctaaggattcgcgctaaagacaaaaattcgcacgcatcacttgctaatttccaattttattggatgaaagccatcgatgaatcttctaaagatgaggagacaagtaagcatcttcgaagtgagatgatgacttacatgctagctgcatcaatgtgtttatctggccgttacatgtcccttgatcaaatacgaaaactttacaacggaccactagaagagatcgcagaaccaattgtattttccgctattttatataaaggcctatgtgataactatggtattaatactgataaagttctccttgaacaagtgtttcctgacataaaaatcttaatttcagagtgttgtaatgaaaaaataaaagttcaccctagtgtaatcgactgttttttgtctctgggcgcatctagcgatattattcttgcgttaggagaaatttcaagtgacaaaccatcaccgataacatttattgcagatgacaatatttcgattgatcactcaaaactagagaatggttttgcagcatggagacttaaggcatttattgatacagaatttacttatcctgacttagtcactatatctccacgtacttggttaaacggcctcaattcaatgtatagcgttgtagcttggtgtgatggttctgctagaagattcaaagaggctggggacaatataggcttgcaaaaagtttgggaaattttaaaaaaggatatttttgactatttaaagtttagtcttgcacagcgtgttcaatgggaagatgcctatggtttaccagaaagtatagttccccaattatatcaatcattaacaatactaattactgatgtatatcctgataaaatcagtgaattacttaactttgtcgagggacaatttagttcccaatgcggtatctactctgaaggatttagaagaactctaaacctaatcctggcaaatattgttaataagccaatggatttaaatacagaagatcaagtgttttccctggtggagcgttggaaagagttcgtagttaataacttagagaatagatatgaacttgtaccagagttgcttagcataattccattttataccaaattagacgcttcagacgaagcaaataaaacttatcaacttgttttatcattctcgatgggacctagttggtataaagaagatcagtttgggttaagtgttaccgttcttcagtctctaagtcatacgtcgagtttagtgtcaggtgaacttagcaaaattgctggtctactagatgcagcggctggagaaatgacatttcagcgtttcgttcggtacgctaaacgtgatttcctcaaggctttatgttcacgtaatgaattttccagtgcagttaaatattttataagacaaacctacggaaccttagagcaaatgcatcaggaggtaactaaaggtgacattgatagaatatctgcaataaaagggactcggttccctggaggagcattggatgaacaagattcgattctgtaccttattaatccattaatctcaagtgccgactggcagctttgctgggcattattagaaagttttcaatttggtgactctcgctatattaatagatttgctgaatcctataaacttttgattgacaaagtttcaggtgatgataacgctctcaccatgataatggaccgattagaagttatttgtgaatctgaatttgaaaataaaaaagattgttccgaatttatcgtattgattgcttcatccatacctgaacgatacacagagacattcgaagctagattcactaattatatggttttgcccgagccccaaagaactacacttacaatacctgaagaaaatacggttaaggcgaataatcgagcaaatgagcagaaagaagattccgacgctatctatatgccgggactttttggctccagaacttcaatctctgaagctactacctctctagctaaagtggagaaatatctacgacgccgtaatttttcggaagcacaaaaagaaatcatttcaggattgacattaattcaaagtggtggatggtcaatatggggtggtcaagtttctaaggtagcggatggacaatctctgcttttgagaacgaatggctcagtttgtgatttagtcaaactgtactcacctttaatacttaatgaacgccatacggaaaattggcggatagccaacgacttaatagagtggttagctagttattcttctaacgatgagcaagcagaacttcttcgtgtaactaacgagcacacaaaactcatggttggtgctgcggacaaagaaaccgctggctataggtttctagatgagagggacgataatgagttacctcattgcctagccactttgcttcttcatgtgattgaccaccctctttggttaaggcgagaaaaagcatctgaaatgctgatttggttatcaagaagctacccagactttgtccggctttttggcgccaaagctttttcaatggatataggcattcaccctgatgtcatttgcggtgctcttgatcaaatgtctataacaaaacaaatttgggagacactggctcaagagctcgactttaactctatacaacagggctgtaaacatgtcggaagatattcagttctaatacgcattgctagggaagctgctatgaaagattttgaatctgcagcagaagctttaagtaaattaagaggtcgactttgcaatacggttgataacagcagattgatggatgttgacttaccttcatgggccgaatgcattaagcctagttggttaagactagagaaactaggtttaacaagcgcctatgtattgactcaagccgagtcggcattgaaagatgtgtgtttaccattatctatagaagtatgcttggagctggaacagttgttggcggagggttattatgaaaatactaaataccctaatcgttggtcggatagagttcgctacgtatttcaagtagcatatacagatgttgcaaatgaatcagaatacaaacatattgaaaatgttttcagaaaatataatcctactcgtttagacaacctgagaattagcagttttgactctccagctttacaatggcttcattctaaggagccaaagccgttacatggaaatagtatttacttagattattttgaaagggtttggtttgaaggtcaactgaggttagtaagattaactgcatacttatcagataacccagaaaatcttcctcttccttcagggcgcttcttgtcacttgataagccttcactagataagacttgcgtgattgacacttgtgctaatgttgaagctttacctgcgtactttggtagctttacccctgcaataccaacaacgcatttcatgcaaatcactggagcaactagctcaaatttaaaacggaattggtggaagtcaggacgactaaaagaaaagtatgagggggcgccatttaatgagggttgctatctgtcgattgatgcaaatgctctcaggttaccacatggcttcaaattgatttgggtatttgagttagatctaaaacctattggactagtttctttcggataa

SEQ ID NO: 200495 - DNA, 261 bp, Klebsiella oxytoca
atgaattttgatacatttgagacaccgcaaactagatcggagttcgaacttcgatttcactgtttacataatataatgaagcaaggcaagtttcatgtggctccccatatatccatggaaggaattctaaaagttaggaaattgccaaatggacgaattgattttctcagtgtcaatgaacaagctagacttaacgcaaatatgatgtataagatgcggaatatgaaggtgcccaataccaccagctctagtgatagctga

SEQ ID NO: 200496 - DNA, 2283 bp, Klebsiella oxytoca
atgatcgaatcaattagtctctccaatatcgctacctaccgtcctgacaaatcagaagttattaatctcaaaaagattaatttcatttatggagcaaatggagcgggcaagaccacaatcagtcgacttattgagaaacctagcctctcaacagactctagtattacctggctcagaaatatggcagtgccagcaatgatctataacaacgacttcatcactgccaacttctcagaatccaaagagtttcagggagtatttacactcggcaaggccgagaaagttcagctcgaccgcctcaaagatcttaaagatgaaagaaagcgccatgaacagttgagggcaaagttaatcatctctcttgatggtgaagatggaaaacctggaaagcatgctgagttgatttctttggaagcaaagttggttggccgatgctgggaacagaaagtgaagcatgatgaatatttcaagggggcatttactggtttaaggaataataaggaagcattcaaagcaagggttcttcaagaacatgagaataacaaatccaccttggttgatttggttgatctcaaggctagagcggcagttttatatggtgaccaaccctcgaaaatagatcttgtttcgaccttggatttatcacggttgatagcattcgaaaaaagcccgattctggttaaaaaggtggtaggcaaagacgatgttagtatatccgcgattattcagcggttaggtaatagcgactgggttaggcagggtatgagatttctggagcatacggatgaacaatgtccgttctgtcagcagactctgccccacgacttcgagaaggaacttactgactacttcgatgagacttttgaggcggattcgaaggcggtttctgccctacgtaataattattttcaaattgctgaggatcttttggctcaggcacatgttctgttagctttggattgcacagaactggacaaggaaaaacttaatcctaagattcaagcactggatgctgttgttcttgtcaataaagggcggatggacaataaagttaccactccaagtgctgaggtgtttcttgaggggctggagggtattgaggctgatattgctgctattgttaatacggcgaatgcgaaaataaccgaacaaaatcgcctagttgcaagcttcactgctgagcagcgcaggctcaccggagaagtgtggaaatatattgtcgatgccgagctaaagaataccttggctgattatacctctgagaagaataagctacagaaatctatttcgggcatcgcattgagccgggataaagccacggaagatattaatgctacagacgtcgatatcgataagattgaggcggagcttaccagtgtaaagcctacagtaattgctataaataagattttaaaaaattttggattcctcagcttttctctagatcctgcatgtgcggataactcctatagaattatccgagcggatgggagagatgccaagcaaacattgagcgagggcgagaagaccttcgtaacgttcctttatttctaccacctgttgagagggagtattacgacatccggtataaccgccgataggattgtggtcatcgatgaccctgtttctagccttgatagtgatgtgttgtttatcgtgagtagtttgatcaaggagcttttcgccgaagttagaaagagtggtagccatcttaaacaagttgtggtgcttacacacaacgtgcatttccataaagaggtcacgtacgatcagcgccggaaggccaatacatctcttgctgatgagacattttggattgtccgcaaaccaaatgagtattcggtaattgagttccattcaagtaatccaatcaggaattcttatcaattactctgggcagagctgaaaaggacaccggtgccagtccttacgttgcagaataccatgcgacggattttggagaactatttcaagattttgggtggtgtcgatacgtaccacttggtcgacaagtttgagggtattgaaaagacacaatgccagtctttgatgagttgggtaaacgatggatcgcattacgctccggatgagctctacgtggccattagtgacaatatggcagcaagctacctgaaaattttcttcaagatattcaaggcggctaagcatgatgcgcattacagaatgatgatgggcgattcatatgttgatctagatccggaagagatctcagagcagcaggcgatgactgatgctaaagaagaggggggcgttgtattttga

SEQ ID NO: 200497 - DNA, 423 bp, Klebsiella oxytoca
atggtggacccaacctctttagctgcaatctctggcacgcttgatcttgtgaacaaatcggtggatttggttcgtaaccttcgcaaaaaaggtgatgaggagctaacatctgctgagatgcgtaatacgctgattgatttactcgatgacttggtggaggttaaaagcgaatttgtgacgttaaaggcagttttacttagtaaagaagaagagattcaggagcttaaggcaaagctacaaggtaaggaatcacttaaatttgatggacttctttactggaaagaaggtgataaaatacctttctgcactaagtgctacgaaaaagataaggaagaactacacttgcgttatgtaggcacaggaaaatataagacatatcctacttggaactgtcgtgtatgccaatctaattatagagcataa

SEQ ID NO: 200498 - DNA, 129 bp, Klebsiella oxytoca; identical to SEQ ID NO: 195981

SEQ ID NO: 200499 - DNA, 129 bp, Klebsiella oxytoca
atgaggaagctgaccgttaagccgctttcttttgggtatagcgtcgtggacagccattcatctgccctgtgtttcaacctgccgtatgaagcaaaaacccccgccatttctgacgagggttttctttga

SEQ ID NO: 200500 - DNA, 384 bp, Klebsiella oxytoca
atgaaaagggctttattcttgattgcgctcattaccttggctggttgcaagcctaacgacgaaaaagctattgaattagcaaaaaaagagattgctgctaacaccagagatcctgatagctcgaagttcagatttgtgagatttgttcagaaaaaagaagcttctgatgggaccgtcagcggttatgtgtgtggtcagataaacggtaaaaacgcgttcggtgcttactctggttttacaccatttatgcttgaaataaagatgaggtctaaaggagcattcagcaactcggttacctattctgttttcagtaagcaaattttctcggaatttggtcgaacgctgccgacttcatacttcagtatctgcggggccaatgagtaa

SEQ ID NO: 200501 - DNA, 252 bp, Klebsiella oxytoca
atgtttgtttgtccatactgcggcgccaatgcccgcacccgtaccagccgccggttaagtgagttcactatccggcaatatcaccagtgtcagaaccttgaatgcagcgagtcattcacaacgctgaataccgtagagcgcaaggtcactaagcgctcgaccagtgcagagcctttgccgcctggctttatcccccgcgacgcttttcctgcttcacattacggtaacgatcaactcagttttgcaatataa

SEQ ID NO: 200502 - DNA, 3027 bp, Klebsiella oxytoca
atgaccgctaattatcccgccagcattctgccgcccaacgctaccgccgtggagcgggccattgacagggccagcgccgccgcactggcgcgcatacctgtgtatcttatccgttgggtgaaggatcctgacagctgcccgctggcgctcttgccgtggctggcgtgggaatatcaggttgatacctggaatattaactggtcagagcaaaagaaacgcgatgcgatcaagcgcgcccactacatccaccggcatcgcgggacggtcgccgccgtccgtcatgccctggtggacagtccttttgggacggatattgttgaatggttcaatcagaacccgaaaggggatccgtatacctttcgcctgaacgtgtatcagaacgatttgccggtgacggaatacgaccagcaggatctgaaactggcggtgctgcgcgccaggaacctgcggagctggttttccgttcatgtatttggccgacttcagggaacctcgtatgcggccggttacatgtacgccacggagaaaatcacaccgcgctttgtcccgttgcaggtggttttatcccgctatgagctgaatctggcccccggtgacgcggaaacggtcacggtgaccatcctccctgaatacgcggaagataaaacctttacagtaaccacgtcggataaaacaatcgcgaccgccagaatagtcaacggcgctattctggttacgggcgtgaagcggggcacctgttcggtcaccgtcacgacgactaacggcgtcagtgcagtgatcagtgtgaaagtggtcgcggtaatgaaattcattacccgcattgacagcgcaaccaggccaatattctttggttatgtcgatgaggatttcactatagattatggcgatggtatagatagccgtgattatcgcatagatctttcaacaccggcttatggttgggtaattcccacccgtgctctgaatgagggtgaggaatatactataacggtaaaaaatactgaaaaggcaagcctgagaagccgtatttctaatacatcatcaaaactaaatacaattgttgaattgatcagtgttactggcgaaagagataacttatcaggttttgcaatagatactgccgggttaatgtcagtccgctctggagcatttgacgatttaccaaatgttactgattgtcaaaatgctttttctggttgctcatcgctgaaaagtattccatccttacttttctcaaagataaaagcagcttctttttcgggcgcatttaagggatgcatatctctaacggaagttcctgacgggctgtttataaatcagtctaatgcgatcgatttctcatcggtatttacagggtgcacaggcctgatcagtatcggcaataatttatttaacggctgtgtatctgccgtgaattttaattatgcatttgatggttgctcagtgcttacaaatatcggtagtggaatatttaagggatgcgtttcagcggcggcattctcttataccttcagagcttgtaaacatcttcttgcattgcccgctgatatgttcgcggatgttccgggcggtgcatttacgggggtattccagaattgcgcagccctcactgaattacctgctaaattatttacgaattgttctgaggcgaatcattttggtggcgcgtttagcggctgtaacgccctgctttctgttcctgatagatttttcgcaaacttatcgaaagttacctatttcgggacggttttctctggatgccatgccttgaaaactgtcggtgcaggggtgtttgccgggtgcgatctggcgcaaacattttcctctgcattttatgcgtgccgctcccttgagactgtggcgaaagatattttcaccggctgtgaaggggcgacaacctttgcaagtgcgttctacggttgcagtagcctgacggctctcccgtcctttgctgactgcgcgaaagtcaccactttctcatacgcttttgctaactgtgaatcgctcacgaaaattgacgcgaatgcctttgctgataaagcgctggtgacaacatttgtctacgcgtttatgaactgcacttcattgatatcggtgggggagggggcattccgggattgcagcgcgttaaccagtctgggctacgcgttttccggttgccgctctcttgtttctctcgcgggagatatgtttgccggttgcgttaaagtgacggccgttaatttcttattcaatcagtgttcttcgctggctaatctaccaaaagcgctgtttagtgacatgatttcccttacgggaatgggatccacattccaggattgcagcgcactgatcgcgctaccgtccggcctgctcgatggttgcgtcaatctcacttcgttaacgctgacattttcgggctgtacctcactggcggtattgcctggcgatttactgaaaaacaacaccctgctgaccagcgccggatcgacgttcctgggatgcgcttcactggttgatatcccgccgatgctgttcgcgtcctgctcgcttattacctcgtttggcgccacattccagaataccggcgtggaggaaataccggaaaacctgttcagcggcaattcgctagtgactgcttacggacagacttttaggggctgtaaaaaattgcgtttagtgcctgccggccttttcgcatcgagtgtaaatgcgactgcattcactaatgtgtttgctgactgcctggcgctggagagcgtcggagcggggctattaaacaccacagcggtcacgacggtgggctatctctttgacggctgcgcgtcattacgcagcgacgttaatacgatatttaatcttgcgagttacccggagattgtcaccacaacggcaatcttcagggggtgtgcattgctgaccggtaaaggcctggtatttatgagcaaggtgccgaacgtcaccgcgcattattacgcgtttcatgcctgtgcaggcctggacgattacgacgatttacccggcaactggataacgaataaattatga

SEQ ID NO: 200503 - DNA, 504 bp, Klebsiella oxytoca
atgacattagacgccaataccctacaaatcatcagtaacgccattgtgcttctgggcgttatcgttgccatctggacgatcatttacaacgtccgcaccgcgaagaaaactcaaacagctaattttctttttgaaagtcgccaggacactcagtacatcgagtcgctacatgttcttaagcaagtgcatcgttcaggaaaatcattccgcgcctacgtcttcccctgcgaaggcaacaagatcaccgaagaagaaatggtcgaacgccgtaagtttcagtacattcttaacttttacgaaagggttgctgtcagtatccgcgaaggtatctataacgagcaaatgatcaaacgaacgtcatacaccactgtgatagaaacctacgatattgccgaacccctgataaaagccatcagagagcacattaattcagaaacgacctaccaggaatttgaatggctggttaagcggtggaaagccaaaccgcttacgagaaacagatga

SEQ ID NO: 200504 - DNA, 429 bp, Klebsiella oxytoca
atgtttaactatgcagtgaaattgactcacgacgtcgaaaccgacgcctacgaggtgtcctgtcgggatctgccgctgctgcattctgtaggtgacacggtagacgaggctttactggaagctgaggacgggataatcaccgcaatctctcttgaaatggatatgcgccgccccgttccggttgccactgcaccgcaggaaggggagcacgtagtgatcattccggtgctggttgctatgaaagcagcgctatataacgcgatgattgagacaggaacgcgtaaagccgatttagcccgccgtctgggcgtgaatgcgccgcaggttgatcgcctgctcgatgtagagcattcgtcaaaggttgaaaaattagagctggcgctcgcgcagctggggcgtaaaactcaggttgagatccgcatctgctaa

SEQ ID NO: 200505 - DNA, 183 bp, Klebsiella oxytoca
atgaagtacagcgagttcaggcgatggctgatacagcagggcgcgattctaaagaaacaccgcagcggtagcagtcatttcaaggtgtacttaggggataagcagtcaatttttcctgaccacggttctaaagaaatgccggagccgacaagaaagaaaataattaaagacctggggctgtaa

SEQ ID NO: 200506 - DNA, 693 bp, Klebsiella oxytoca
atgagttatctgggaagcaaggcagcaagcggcgcttatcaaaaaatcattgccgaaatgccgccgcacgatacttacattgagacccacctgggcggcggcgctgtaatgctgcggaaacctccagcgcggcaaaattgggggatcgatatcgacccattaacggtcgaggcatttaatcagggcaatgctgattttctggatagcctgccagatgctctgtttattgatgtcggggacgctgtcgagtttttgcgctgtttcgattatgccaatgccgggagagtgttgatttattccgatccgccttatctccatgaaacgcgctccagctctgcgcgctatcgccatgaatacacctctgttgatcattgctgtttgctcgcttgcctttgttcaatgccggaaaacgtcagcgtgatcctgtctggctacccgtcgcagctttatgacgaaacgttagtgggctggcgcagcaaggaatttcaggccatgacgcggggcggtgtacgcactgagaaaatatggatgaactacccggagggtgccgcttactcgcatgcattcgctggtaaagactataacgaccgttaccgcataaaacgcaaggcgatacgctggaaagaaaaatttgcagctctaccgcccgccgaacggcttgctattttgtcagcattaagcgaagtgcaataa

SEQ ID NO: 200507 - DNA, 285 bp, Klebsiella oxytoca
atgcttgacggcagagtcctgggtaactaccccttgtcctctgcggatagcacaaaccttgcctgcaacattcctaaattcaacgccaagtaccctgagttaaccaaaaacgttattgaggctgactattcaaaaggcttaagcgaagaggctttaaacctcctgataaaagaaagccgttgcgcggtacttaagggagcaatagagaaagtcacccctccgtcagtgcaggaatgggcagcaaagcccgccatgcctaagcaattttctctggaggggatatga

SEQ ID NO: 200508 - DNA, 150 bp, Klebsiella oxytoca
atgctgctttttctgcgtggaagagaggactggttgtcaattggagtgatttctatctatggctcctcccccattatcaccaccctaaggttaggtttttcgttatccctgatgtcgttgagggcggggagcatgataacgatcagctga

SEQ ID NO: 200509 - DNA, 270 bp, Klebsiella oxytoca
atgaatgagcctgtctggttagctgtagatcccgccgatgaatcaggggatcgcaccacagtgacagcgctggtttaccgcataaccggttgtcagcaataccacacctgcaccctgattgatttcagggcgttcatccttgatgcgggtgtgccgctctctaagtcatgcgtatccggcataggtcacgatgatcagcatatcacgaggggcgggcttgtacgcctgcaactcccttcagaaaggcttaaggaggagttgccatcctga

SEQ ID NO: 200510 - DNA, 954 bp, Klebsiella oxytoca
atgattagatcacccatcaaatgggcgggcggtaaaacccgcgtgatgccggagctgctgaagcacttaccaaaagctgattgtttaatagagccgttcgttggcagcggtaccgtatttatgaatacggaataccgccgctatgtgctctgtgatagcaatttagagctgattaacttttttcgcgttctgaccgcccgtactgatgatctgatagaacttgctcgccgtgcatttgctgacggtaacaacccccgtacatatgcatggcgccggaaagtctacaaccaatacataaaatacgccgcccacaatgacgacaaagcgctaaggattgctgcgttatttctttatctgaatcgccatggatttaatgggctatatcgcgttaatcaaaagggcgaatttaacgttccattcggcaaatatgctgcgccttgctttcctgaaaaggaaatgcgcctgttcgccgaaaaagcgaacgataccaaagcgatttttctccatgcagattttcgtcattccatccctgacgttatgcaactggcatatgacgctgttatttattgcgatcccccgtacatcccggccagcaaaaccgccaatttcactgcctacggtaagccgttcacaccggacgatcaccgcgccctggttgcgacgttgctggaggtaaatcgccagcacggcacgcgctcggttatctccaacagcgacaccccggaaacccgcgagatttattccgctttcaagctccacgcgttaagcgttcgccgctctgtcagcgccaaaagccgcgacatggctggcgaggtgattggtgtgcttagcgtatgcgactgctgcggtcgttctggtggcagctattgcccggactgcggcccggtgatggggaattccacttacggcgcaatggcagcgacgggtgcattcgacggggcggagggattctga

SEQ ID NO: 200511 - DNA, 264 bp, Klebsiella oxytoca
atgaacaggcgctactcacagcatggcaagcgagcgggaagtatttgcatcaccccgcaagataatttgccgaacgtcacttggttaaataaacatgtcgggatttgttgcggcttcgctatccatgtactacctcgcagggttggtaggaagcgttatcaaattatgaaagatggtaattccttcggaattgactttgctttgtcggaagcgcgtaaaacgatagagcggattattaataacaaccgtttcaccattcattga

SEQ ID NO: 200512 - DNA, 303 bp, Klebsiella oxytoca
atgcatatgagtattggcgcaaagcttaagcttatgcgtgaaagtgaacgactgacgagtcgcccagaagtcgcgaagatgttggggattggcaacgatgcgttatggcgttatgaagaagataaaaccgtgccaaacacggaagtgataaccaacattttgaaccacccgcgatttgagaaatacgccttatggtttatcaccggaaaggttgctcctgaggccggtcagatagcaccggccctcgcacactttgggcaagaagaaacaatctcgtcacactcagaccaaaagactggctaa

SEQ ID NO: 200513 - DNA, 795 bp, Klebsiella oxytoca
atggcgcgtcttaaaactgctcagccaaatcactcgctgcgtaaaatcgcagctgtagtagccacggcggttagcggcatgtctgtttatgcacaggcggcagttgaaccgaaagaagaaaccattaccgtaaccgccgctccggctccgcaggagagcgcctggggaccggcagcgaccatcgcggcgaaacattcggctaccgcaacaaaaaccgatacacccatcgaaaaaacgccgcagtctatttccgtggtgacccgccaggaaatggagatgaagcagccgacgacggtcaaagaagcgctggcctatacccctggcgtattctcgacccgcggcagctcaaccacctatgatgtggtgacgattcgtggtttcaccacctcaacgacggtgaataccaaccagtatctggatgggatgaagctgcagggtaataactattctgaagtctcaatggacccttatttcctcgaacgcgtggaagtgatgcgcgggccaacgtcggtgctgtacggcaacagcaaccctggcggcatcgtcagcatggtcagcaagcgtccgacgactgaaccgctgaaagaaatccaatttaaaatgggtaccgataacctgtggcagacgggctttgatttcagcgatgccattgatgaagacggcgtgtggtcatatcgtctgaccggtttaggccgcagccaggatgctcagcagcagatggcaaatcaacccgctatgcggtcgctccttcctttagctggcgtccggatgacaaaacggacttcactttcctga

SEQ ID NO: 200514 - DNA, 1203 bp, Klebsiella oxytoca
atgaaacgatggataataagcctggcgacgttgctttcactgtggtcgccgtggggacaggcgacaataacctgtgaaagaaattacagtaatcgaactgactatgttaattatacagttcctattttgagcagtgggataattatctcagcaatgcgagacctgcccatcggcggaatattgttccgacaggtgatcaaggatcctgatgctgcaacccttggtttcatgaagtgtctaaataattccggtgggattgaggcggcaataagaacgacaaggttcgcccctgatggcgcactccctggcgttgtcagcacctggtctggtcacaatgtctatgacactggagtccctggtattggcatggttctgctgcatggtgcctatggcgctgcatggcaggaggctactcatggtgaaacatttcctcatttgcaaagtgaagaactttacacgtttggcgggtcttatatgggggccggaaatacgatgggggtgtgggtactcgaaatcctgctagttaaaactggagatattccggcgggaacttggactgttccgattaatttgccgcccatggtgatcgatggtcagttaaccggtgatttatcccctgagagcgttaaaaaagactatggcgcccgatttacgatatttggttcggtcaatgttcttgctggtacttgccagaccccagatgtgagtgtacctatggggcaacacgaggtttcgggcagtacggtaaatacaaactgggtagatttcaaaatcagtttgctgaattgtcctccgatgtatggccgctactcaaagaatcatccagaagcatcacaagcaacaaaccaatggatggcatctggaagtatcgaaggtctcccggatcagcccaataccgtggggatctcattaaatccggtcagcggttatgaaacccttgcgtctggtggccaatgcgcaaagcttactccaagtaccgacaccgcaagcggtgcctgccttgaaattcaaaatgtaacgggtaccaatgtgctaaccaattcattcacgaataccgtgaccgatagcggtttgacgttacttgccagcgccgcaagctaccagattccattaaaagcgcgctacggactcattgcaggtagttcgacaatgacggctggcaaggctgattcagctattgagttcaccattaattatcagtga

SEQ ID NO: 200515 - DNA, 336 bp, Klebsiella oxytoca
atgcttgtaaccatgtcagataaagaactcagccggatcaacgtcattcagtcagctgttgaaaaacgcatgcgccgtagtgatgttgctcaccaacttgctctgaccgaacgtcagacacagcgtcggatgaaccgctttagtgagtcaggtgtcgctgacttggcaaaccttcgacgtggacgcctcggtagccgggttactctcattcgcattgatggcgataatttttatggccccttcaatactgcgcagtattgcgagaagttatcttttcggctgagaagatccgttaatcccgtgtgtgaacttacaggaatgtgtcagatacggtaa

SEQ ID NO: 200516 - DNA, 543 bp, Klebsiella oxytoca
atgaaggattgttttcgttacacacactggctaaatctctggaacctcattcctgacggttcacctttcaaaactcatacctcgcttttgcttcctgtcagaacagcaaaggatgatacacaggccatgttgaaaattacccaagattcagatgagaaaagagggagctctcttatggcatggtggggagggaatggtgctgctcaggtgattgcatttgataatgaggctatcttactcgttcgggctacaagctcagcctctttgacaaacatgtcgagagaaggtcaggatacagaggcctgtcgcattttatgtgagagggcaaacaagctccataagtcacctaaaaaacctttgccccagcttacctccctccaggaatggttttatccattaaaatcggcagcttcccgatatggaggtagtctggttatttcctcaggttacgctgacgaactcctcgagacaccacaagatgtggttgcattacatggtgacttgcatcacgacaacgttcttcatttcgggacccctggctag

SEQ ID NO: 200517 - DNA, 318 bp, Klebsiella oxytoca
atgagcaacatcacatggggcctgcagcgagatatcaggccacgcctgggagcccgtctggtgcaggagggcaatcggctgcactatctggctgaccgggccagtatcaccggtaagtttagtgacgaagaatgtcttaagctggatgtggtatttccacattttatcagccagatagagtcgatgctgaccactggtgaactgaatccccgtcatgcccactgcgtcaccctgtaccacaacagtttcatctgcgaagccgatactcttggcagttgcggctacgtacacatcgccatttaccccactcatagttaa

SEQ ID NO: 200518 - DNA, 864 bp, Klebsiella oxytoca
atgaaatattctgaaggcttccagccaatacataactcactttctgagttaccgcactggatatcggatcgtattctgcagcagataaaacagctaacctgctatgaaccggtgatcggcatcatgggtaaaaccggggcgggaaagagtagtctgtgcaatgccctgtttgccggagatatatcaccggtcagtgatgtggtcgcctgcacacgcgaccccttgcggtttagcctgcaagtaggcgagcgcgttatgacccttgttgatctacctggcgtgggggaaagtagcttacgcgatgctgaatacactgcactgtatcacgaacagcttccccaactggacctagtgctgtggttgattaagggtgatgatcgggcgctggcggtggatgaacatttttaccatcaggtgatcggtgagtcttaccggcataaggttctgtttgttatcagtcaggccgataaggctgagcccaccagctgcgggaaacacttatccacggaacagaaacaaaatatcagccgtaaaatctgccagttgcatgaactcttccaacctgtaaaccctgtctgcgcggtgtcggtacgtttgcagtgggggctgcgggtgatggttgaacggatgattcgttgcctgccacgcgaggccagtagtccggtggcggtacagcttagtgctccacttcgtaccgatgccgttaataaaaaagcccgtgacgattttggtgaaacggtcggctcggtactagacgcagtaagttccatgcccctgataccagctccggttcggacagtcatccagtctgtacgcgacatcgtggtatcggtcgctcgtacagtctggaacttcttcttctga

SEQ ID NO: 200519 - DNA, 1110 bp, Klebsiella oxytoca
atgaacaaaaaagagtcagatgaaggaagccatgattgggaaaaagcacgtgttgcgaaagagctgattaggcttgaaaagcaggctgcagaaaaacgtgcgcgattaaaaaacaagctaaaatggttaggtaaagagcctcgggcatcctttttttatttttttttcctcgctctttatttcgaaaaaataagaggtcagttggtagtaccgaaagctgaacatgatattaaccctctatcagcaaaggctctcggtacagaaaggattaccatgaagatcagtcatccgcgagatgactggcctgttattgggggaatgacgaccaacaccgatttagattctcttcaaaaatctgaatcaaagaccacgaaagcagatgaaaaaaacagtttgctgctgtcacattccaacaggcgagaatcccctgagatagacttagatgagcttctaagaaaatttgatatttccactgtaaaaaataaacccgccaacggcgttttttttcctggttttatgtctgattttgctggagtggaagatatccttgaatacattacagagacattattaaaccctaaaatagatgaccccgttgctttaatgaaaaaaataaataaagcctggtctgctgtctatgctgattttcctgaagcgttctcgtggatggatgttaaaaatgaagagcaatgtatttgggtatggaatacgctgaagagcaaaggagtttcccccccactaaatcctcttaacaattatcaacgatggtattttatctgtgcgacttttgatttatggaatggttggacgaatgaacaacttgaagagcttaaaagcaaacgtaaaaaagtaaatcagcactttctgaagttaatggagtctcctcaatcacctcaaggccataagaaaatattaatgactgagcttgagaaagcctgggcccagcaagttagaaggatgcagccgaaaaaggctattgaccttgcgacattgccagcaaaatcaaagaaaaaactggctaagttatcggagggatatggtgagtcagaaatggaaatactagtgagacttattgacaatgaatatgttagaatcgtaaataaagattaa

SEQ ID NO: 200520 - DNA, 534 bp, Klebsiella oxytoca
atgaacaattcgccattactcaaccattaccaggtctggctggatgattttacccgcgtcagtctattacacggtttatgccagcagcacatcacacagtggcacaggctggcgataaccgcctgcccgatgccggagggtagcgtaacagaagtcgtcattccacattgcctgctgccagtcacccgcaccgaccaactagaatcctgttctgccgcccccggtctgacgaaacacaccgattattcccttctgcccggcgtgctgctcagcgaatgttaccggctggggaaaagccgtctggcggaccagttacagatgttattccggctgcatgtacagccaggcatacgccagacgctgacattgctgtgctggtgtgaactggtaacgggcaaggatatgaaggaatggtatgagctgcatctgtcgcttcccgacactctgaagcaatggctggcaataaaacaacggacataccggggccttaagactctcactgatgattacatccgtgtcacccggccagtgtga

SEQ ID NO: 200521 - DNA, 582 bp, Klebsiella oxytoca
atgaaaaatcgcaactggacatcggactggtttttgaaatctgtccttgatatgcatattaacgcaatggtcaatcgctattcctgtctgagggtaatacggctggatcttttctatcaaaaaaatacctttaaatatcgccacccggatcaccgccagttggagcctgacgtccgtcaactcatggatatgatgatgagtatgtccgcagtggtgggttatttctgggtaattgaatggaccgaggatcacctgttccatgcgcatgtggctttctggctggatggtaataagactcagaagccctttttctggatggagaaggccggggcatgctggcgtgaaatcacggaacatgacggctgttactatcgttgtgaacataaaccgaactacgaatccgatatcaatataccggtgcactacagcgatccgggaagcattaccaacatgcgccaggtactggagtacatgaccaagattgaacagaagaatgatttattactgtacgggtgcaacgaagtacccgatcgcccattaaccggacgtccccgaaccggtacagaggaacggattatctga

SEQ ID NO: 200522 - DNA, 390 bp, Klebsiella oxytoca
atgtttgccaaatcttttatcgctctcgacggtaacggtcgcctgaccggtgcccgtactgcgcaaactgcactctacgaccgctacacctgccatttttgcaacagcgcactgcaataccatcctgagtacgaaactgagcgtccgtggtttgagcacatcgaagcgggccttaccgataatggtcagcaacattgcccttatgtgaaacttgatgcgggtgaaagtcaattaaccagacggctacagcgcttcctccccaatgttatccccagagtcagtaaagccgactggcagtgcacacaatgcaagaccaattactatggtgaacgatactgcctgatttgtcgtactggaaacttcagccttccagcaactgtggcaacatga

SEQ ID NO: 200523 - DNA, 2172 bp, Klebsiella oxytoca
atgtgtgcagattggctgaaaaacttttacgctgaagataaacatctggattatgacagggcgatgcagggcggttatagcatccaacaaatgaacacgctgattcagcgggccgctgcgcaacggatgccctgcatcgttccttctacgcgaacgggaaaaacggtgttttatgctctggcagagaatgcgagaagcctggacgaattacggcgcattttgaccgcggcgctgggttccgccgacactaatgcggatatcagatccctctatcacactaacgatccaggggaacagttgcttctggataaatctccggacggaattctgaccttcgactttttaccggtgccggatggatcgccgcaacaggtaaaagaatggcagatagcccgaatgaaacgggtctacgccatgctgcaaatggtgatggatctttatcatcagagacccgtcttacattcgctggtcagtcggcaaactggacgaatcctcagagatttctacacagcatgccacgctcgcgatggcaagattgccgaacagtatctggaagagttacgcggaaatcagatgctttcttctcttaatctcctgtttcttgagctacaggggatggcggcttcggcaaaatgggactcgattctcaaccaccctcggctggaagtattgttgcgcggtcgggtgccggagcgtatccagcgcctgctgttgcgatcctctggccatttaatgcttaacgccatccgcgatgcgcacttcccgctggacaggcgtgaggatgcaaggcgactggtgctgggcttattgccgctgtacaagcataagccccgctttgctcatcaggcgagttttctgcctgactggcaaatgtggaccatgggggccgcgctgctggggatcgacgaatggcaaacggcgtcgcctctattagatcctgactggatacagcaggtcgaggggtgggtgacaggcgcaagttcgctgcccgcgccgatagaagcggaagaacaggcgttgatccaggcgccggttgtcatgctgataagccttgaaaacgcgaccgatttgttacttgaagcgctactggcggacgctgagcgcgaaagtgagatctacgcacaactggcggcgatgcctgaagcaacacgacaggcattgcaaaaaatacccaaactctgggaggcgtggcaggcgctgaaaaaacgctgtgaaccacaagactatggctggagccgctggcttgcagatatacaacaggctacggaatccgaacggtttgaatcactgcgccagcaggcgaccgttcactacatggactggacgccgtcaaccttcaacgaaacgcagtggcaggcgctgctggagcagcagtccaacgcccagttgagcaaagttttacgagacgtactgccaacctttctgaactggctggaagaatatgacgttcaggtatctgcctccttgtggccggactggcttatgctgctggccgttgaggatattcgctcagaggaggatgtgcgtctcggtggaatgattctggataaattcctttccggtaccttcacccgcgaggaatatgcgtccgcaattgaatcggtggcaatgctgtgctctgaaaacctgtcggtaagaaccttgggctactcacttgatattgctgaacttctttatgataaagtcacggctgacgatgccgccagattaggtttctgggtcaccttacaggagttgctcaagcagcgctgggagcgtctggatgtcagcatgcaactttctgcacgcttggtggaaaggctctatctcggcgaacatgcgggacatgctttcccggaagaggataatacgccgggtgtagcgtcttcgcttcatcgcgatctcagtggtaaaacgttggcgatttatagcctgatggaaggggcggcaagacgtgggaaagaggcgttgcttcagctttatccagggctacgagtggaactcaaccacgatcacgtcgctactccggcgctggtgaacctggcggaaaaagctgaatactttatcttcgccagcggcagctcaaagcatcaggcgttctataccgtgacggattatcgcaaagagataatctatccctcaggtaaaggggcgtcgagtatggtcgccgccttcgtcagtgcactggggtaa

SEQ ID NO: 200524 - DNA, 546 bp, Klebsiella oxytoca
atgatcggacgagcaaaacagcggcagatttttttacatggctccgcagggcaacggcagttgcgagaagtcctcagcgcccagcttgttgctctgattatgcagccagagccaatctggctggtttcgccgtgggtgagtaacttcccactactggacaatcgctcaggccattgggacagcattgatcctgcatggggaggccgggagatggatttcattgaactgctagcctgtgcggcgaataacggtgcgccgctttcgctggtgacccgcgacgaccctatgaaccgtatctttgtaaaagcattggaaaagcgcctgagcagctttgcgaattttcgtctggaatggcgtaaccagctgcatacaaaaggttttttgacgcctaacgtcttcctgaagggctctatgaattttacccggagcggcgtcaatcgaaatgaagaatttgtagaactgaactgcgattcgcatatgatcggtgaagcgatggccgaatttgaaagtcagtatctttttagtggatcacaggaagcgttctga

SEQ ID NO: 200525 - DNA, 4539 bp, Klebsiella oxytoca
atgagtgaaatcactactgctgtgctgcatcacgtcctcgacgctcttgaagcagaggaaaatgcattgctggtgtggggagacacaggtggcttcttcagtgaagaagagttactgactcacatcagaagagagttgggcgttgtttttaaacgcactccgaccgatgaggaatgtgataatacacaattggcgatgctagacgccgccatgctgatccaagtgccgcacctcagcggcatgcctgtctggcgaacccgaatgggggagacggtccatctcttgcgtaacttgcgccagtggatgcatgggcaaaagctggaccagagcaaaacgctggtatcggactatcgctttattcgccggccgcgcacttatcccgatcgcatttacgaaccgaccacgctgattactggctggaaaaagcagctgaaattaagcgagcgcgtttgtgacattatgcgccaagcgctggcgtcagataagtccttcctgctggcgggttttcaggtgcgatctaccgaacgcattatgcagtgctggcaggatcacaaggtgaaaagcgacacggccagcggaaccattatttgtgccggtaccggtagcggtaaaacgctgtcgttttacctgcctgcgctgacccgtcttgccgaggagatttgcagcaaccctgagcgcaaggtgcgtatcctcgctatctatccgcgaaaagaactgctaaaggaccagtttgctgaaactttttcacagtgccgcaagcttgacgactatatgctcacggcggccggacgaaaaattcgaatcggcgccttttttggcgatacgccagtgaaagcggaatggtcgaggaaagacgttaagggtaaggttgggctgccgttcgggttgatgaaatgccagcatccccacccgcatcatcctaagcaagcgtgcggaggggcattgatttggcgtcgtgaggacatatttgacgcgcgagaggtgctcacctgtacgcagtgccagcatcaattggatcagagtgaaatcatgatcacccgtgatgcgcagcaaaatcgcggcgatgccccggatattctatttaccacaacggagatgctgaatctccagttgaactccacctggagtaatcatctgtttggcgtcggagagggctatggcccgacgctggtcctgcttgatgaggtccatacctacagcggaaccaccggcgctcaaactgcgctgttgctacggcgctggatgcagcgcaccgattgcctgccgcattttgttggcttgtcggcaacgcttgccgacgcgcggcacttctttgccaaactggtgggcgcacctgaagagcaggttgcgctgatccacccctacgcggaagatatgatcgaagagggggctgagtacctgctggcgctgcgaggcgatcctgtctctgaaacggcattactctccaccaccatccaggccagtatgctgatggcgcgcatgttggatagtgaagcgaataagtcgaaaggcacgtggggtaagaaaaccttcatcttcaccgacactcttgatggtaacaaccgtctgtaccatgacctcagcgatgccgaaggctgggtcacggggccaggggcgtcgcgcattgatcacccaccgttggccgtattacgcagcccctttgatgatactgcacctgagcggtctaaaaccgaactggggcagaactggaaggcggctatggagattggtcacgacctcgcgcaaaacaaatctatttcccgaacgtcgagccaggatgctggtgttgatgcatcagcggatgtcgtggtcgctacctcttcgctcgaggtgggatataacgacccgctggtcggtgctgttgttcagcataaagcgcctaacgatgtcgcctcttatttacagcgtaaaggtcgtgccggacgtccacggggcatgcgtccttggatgctggtagtgctttccgagtttggccgcgatcgcgtcgagttccagcgttatgaagggctgatgagcccggagatcaaacgtcagggcctcccgctgggcaaccagcacgtgcagaaaatgcaggcagctatggcgaccctcgactggatcagcaaagtcgggcagttcaaagacctctggggcatgttgaaaaaagttgaacataatcagctgaaatatgaccgaatgtatggcccgcttatcaagctgattgaggaggttctgagcggcggtagacggctgaacgagttgacgcgctaccttcaggacgccctgcaattatctgacgacgcggtgcagaatatcctctggagcccgccgcgctcggtcatgtttgagtttctcccaaccatactacgtaacctcagaactcgctggtcggttaacggcgtggagtgggccggactgcgcccgaatcagccgaatggcgagggcgaacagcaccggagcaattcacccgccccggaatacatcccgcagaacctgtttagcgagctgaatttgccggaactggacattcgcctgaagcgtggatttgacgatgaagaccactgggaaactctctctttctggcagggaatacgtgaatttgcgcctgggcgactctctaaacgctatgccgtcaaatcgaacaaaagtaccgactggctggtgccacaatcctacgagccgatggctggggaagggcggcaattcgttgatttccagataagcgatgcgttcggtgatagctggcaaaacgagtgtgaagttgactatcagggaaaaaccatcaaggttgttaaaccgtcgaaggtcatgaccacccgggccgacattcgccgtataaatgataaaagtaatgcgcaactgcaatgggtactcaacgtcattaaccccgctattgctacgccagacgaggtgccgaagggaccctggaagcacacgctgagtgatgtcacgttctacaaccaccagcatatgaccccgctggaactggtccgcttttctaccggatcgcaggcgtcgcttcggttcaggaataaggagcgggctcacgttgatttcacctgggttaatggcgaggaacaggttggcgtaggaagtcgtcaatgggtggatgcaatgcgcctgcgttttaacctcacctgtgatgatgtgcttggtctgctgcatcaggaagaaattcagcgaggcatgcgccccgtttattttcaacatcttgtaagacagtcgccggaatttgaatttgacagcttcaacgcggactgggccattgaatgttttatggctcagcttgcggagacactggcaaacggcgctcactcctcggttgagtcggcattacgagaaatggcctccgaaagaggggtagaaaggctggcagagatcccggccagcctgttccagccggataccgacaatgaagcaggcactgaccaggcgctacagattggcctcaacaaacttcttcagcgaccggaaatacagcaactgctgctgaactgcgcgcaggcgctctggaaacccctggctgaaatcgacggttttgttgaatgggcacgccaggtattagcggataccttggctgcgggtgtgcagcaaacgctaagcacgctgcttccagacgttgatgagcgggcggtggtgacagactccttttggatgagcgatcccgacaagggcgcagaatggctggagatctggctctgtgaaatggagtctggcggtagcggtattctgattcgtttacagcagaagtgggcggaagatcctgtctccttcctcaatgtgctggtgcgtaatctttcagccagcgactacgagcagatcgattacgatctgcgaactgtgttgcagatgctgcaaacggatgaggcgcttcgtatggcgatctcagccgtacgtgaagccagcaacatggacgcccggcgggaggctaacaagaatctgcatttgcggctttcacagcgcggtctgcgcctttcccacagctttaccacggtgctgtactcgcggattctgcgggcgggcagcagcgatgacacagacacccagctttatcagttactgtcggactggtcgtcgcttgaagtgagcgcgggtattgagttcagtatgaacaccatggcacacgcgctggcggtgaacgcgcttagtgtggaaaccgatgcttccgtcgtgtttaacgcgcagtgccggaaccaaaacctgctctggccgcgtggctacacgatccgccaggctgagctcggcttttacaatatgttttgctcgcgcaaagtcacaaccgagcgtctgcttgctggcgcgttatttagcgaacaaatcgaaaagattgctcttgaagatgactggcttgggcatttgcatgcggcgctgcgtaaaggcggtcgtgcggagctgatcctcactcgccagcagcgaaatcaattacatcaggtcattaccaccgtgcaaattgaacccatcgatcatttgggactgctgctgtatccgcgtctcggtgaagtccgccgtgagcaggatttgctcatattgcgtattgaactggcggaggcgatgcaatga

SEQ ID NO: 200526 - DNA, 744 bp, Klebsiella oxytoca
atgaacacgcttaagcagcaactcatccaacttcgcaaggattttcaactcaagaagcaggtgaaacaagaagataatgtttacgaaaagtaccggcaaattcgcgacgatttgcacaacgttgcttcatctttaaaggagacggcaactcagcttgatgtcattactcaactgccttcaccgttgtcgcaaatcactcttgatagccatgaaaaagcggcgatttatgacgctgaaatcgctctgaaagaatttgcggaaaaataccagcatatggccgatgaggcgcagcaaaaagggggattaggcgagacgctcaatgcgctgatgaccgtccagtcgaaatttgcagataaaattgatagtaactggcaggcattcatccacaatcttgaaagccaacagatgctggaaactgtcttccttgaacagcaaaagacgttggggctcaatcgtatctacaacgagtaccgaacggctcttgatgggttcaatcatcagaaaatgatggggcccgctaatcccattgtgattaaaaaactacagcagtactgtgatgacatggtcgagttaaaaggcaaaatggattttaaagcgccagcctgcgtccttgattttttccaggcgctcaataatagcaatcgcgcaccgttgactttgctgacgcctgaagtccttagctggctgacggaaaaagaaatgctgaactcattcaatgtgatgcgcaaaggtttactgggatga

SEQ ID NO: 200527 - DNA, 3138 bp, Klebsiella oxytoca
atgaaaatgctggaatattggccgtctttaccgaacatcagacagtgcattcgtaccgaggcggaagagctttcggaccatacgctgctggccgttcatgagccagcccggatcttacgaatgaataccgacggcagtccgttggcgtatgaaacggaagagcagttgctaaaacactttctggaagtgcagcgcccactgccaatcataggcaacacaggggtagggaagtcccatattatccgttggctggatgcgaacctgcgcctgcgccctgaatttaaaaataaacagtggcatattgtccgtatacccaaaagtgcaagcctacgggaagtacttgagcttttactggaagggcttgagggcgaaatttttgatgaagcgcgtgaggatatcaacaaggtcagcgataaacgctcacccaaagagatcgctgaatggcttttgatgttgatggggcaagagcttcgcgatcttcatgcgcgttcaagcgctgattatgagcagcttaagcaggaagcggcggaagcaagcccggagcagcagaatgcactgcgcaagaagtcctctgagttaaagaaaatcaatattcatgccgcagaaaatgccctgccgacgctgatcaacgacgcttatttcaaacagttcttactaaaggaagaacagtgcctgttccgtttcgccagccgtctaatcagtggcgcaaacagcgatgaacttgaagagggtgaacagcaacttaaagccagcgatcttgatttccaaatacacctaagtgatctgagccttccgacgcgttcgtatatcagtcggacgcgactcaatacgcatgaacctggtcggcaggaagccgctgatattctgaacctggtgctcggtaaagcagcacaaaccctttttaatcagctgtttaatttccgggggcgcagcttttccgatctatttctacagattcgaaaagcattgcatgaacggggaatgaccctgatggtgctggtggaagatatgtctctgatcaccgctattgaagatgtgcttatcgacagcctagagcgtgaggggacgcgcgatggtgaagaagtgctttgtccggtgtgctcggcctttgcgacgactgaaggttatcagggatataaccgtcgtcgccagggtatgcgtgaccgtgcgaaaggtgaatggcggatcgaagaggttgtaggtgagcgttcagagacgcggcagcggattgtcgacttttgcagtcgctatatcaatgccgcgcgttttggggataagtctttgctcgagttctggaaaaaacgtaccagcgatacgaactgggtgccaaactgggatcagcatgctgaagccattgagggtattgatgcttttggctacagctctctgggctatgcgctttttccctttaatgaacgcgcaattcatgcgctggcggatgttcactgtggcgatggtaataagggcataaaatttaatcccagaatcatccttaacaaaatcctgttaaacatcttgttcaactatcgggttatggcacaagaaggacggtttccgcctccgcaacttgatggcattaccgcacctcatgggctgcgaacctggctgagtcgaaaaacgttggcggagcaggaccgctctgaaaccgtcgcggctatttggggatatccggcagacaatggtcccgcccttgctaccgcattgcctcctgcggttgtgcgctgctttggcctcaatgatttggcaaacgaactcgcgtcgactgagaaaggcgcgatcaaccccggtaatgctgcaacggttggacgaaaaatcgagcctgtcagtgcgaaaacggtgaagccaaaccctgttccgcaagaatcggttgagcctgttgatcccctcgaagcacgtgtttacaagatggaggccagcgtttccgactggatactgaaagatgtattactcgatcaggatacggcgaaatatatccgtaactcgctggcaatgatttatgaccagcacgccaatgctgactggtatggtgcgaagtctaagcccgatattcgcagtgggaatttcgttaacattaatgtcccaaatgcgcacggtaacaggctgaaacaggtagtgaattttgtctccgaggcggagtataagaaacggtcagtctggataactgaggtatcgatggcccttgcacgtttcgggctctatatggacaaaaaaaatggtccggactggacttattcgaaagctgcggaagattatctggttatacagtcctttgctgaccgttgggtgccctacgctctcactgaactcctgcgcagcaagcgtgaaaatcaggggatgatactgactgaacatctgcagttggcccgggcccttggcattatcaaaccgaatgcgacctccaaagaggtgctgaatcaattgctaatgaacaaagaggcattgatcggccaacataaatctgccgccacagagagcattgccaaagtacgctctgacgctcttgataagtgggaggaggtgaagtcgaaatggctaaatctctatgccccaaacgatcatgcattggaaggcgatattgtgcagaaaatggtgctggaggccctgaaacaaccagcagacagcaggatagagcaggcggcgaacagaacggtaagagagattgcgtcaacgctgaccgaggtcacgtatttctccgattgcgaaaacagtgaggcattcgctcaacttatcgaggatgccgtatcgttgttggaagagttacgtgaagaaggtgactatccggttaatgctgaggtggactgcagtacgctgcaagcagaactaagtgctttaaaagaaggtggcacgtgggcaatgatcctcaaattacgaagcattacgcagaaagaagaaccacttgctttgtggcagttgctttgcgatttagatggaaaattactcaagcgttttacagatactctgcagcggtggcaaaagatttgtaagcaaacctttagtgcgattacggggtacaaccaggataaaggtggtcaccgaatcagtgagtgtcgcgcgcaaattgacagagtcctgatggagatgatgcaggatcttcagatcctcaaagagaatgcaggaggtagcgatgaacacgcttaa

SEQ ID NO: 200528 - DNA, 903 bp, Klebsiella oxytoca
gtggcaatcattaataacgcccatccgggtagccagattcgcttgatctgcacaattgatagggtcctcaatcgccgtggaggaaaaccgattttgcatgaagatttggttgaactgctgcgtccccaggcgctgccgcaatccgatattggtgcggagcgttttcggaagaacctggatttctggttggaagaagggctatggcagcagactgaggcgggtatttcccgacatactccactcgcgaatgagcgcaatctgccgagccgcgtattacgcacattgataacaaacgagccaaaagagtcattgttggaaggcacccgtggacagcctttcctactcagtatcaccgcgttgcttgcgcaggataattttgccttcatcggcaagagcacgctgacaaaagagagtgtcacgggaggcgttggaccgctgctcaaggattcgaacaacgaaggcgtacgtcgccagatcaacttatcaaatgaagcgacaacgttccttgaatttgcttttttcctcggttttgttgagccatttatggatggatatctggttgatccgacgcgagctattgagggcgtactggaccgtgtgctggagaaccacagcaaccttcccgcaattgacttcatatcccggcttgcagaagtcttaccgatgatcgatggcggaagctatcgtcagcaggttgaaccaatgattacggcagataactggacaccgaaagatccattacatttgagcgcctctctgagtcaggcgctggtgcgtcttgagctggcactgaagataaagtttgagattagggctgatgatcatcaggcgctattgttaaccgggccggacggtaatacccaacggataagcgccattagccctggggagcttttaaaatga

SEQ ID NO: 200529 - DNA, 2481 bp, Klebsiella oxytoca
atggaattccaatggaggcaactccgtgagctactcgcgatggacgagtgtcaggacaataattttgtaatccatcaggatgacggtcagtttttctatcgtctctggcgatgtctgaacgatgcaggcgcggggatctcagaccgattacatggctattatgacgctttacaatgtgcccgagctcatgggcttctgccgttgcggctgccgctcaaagagcgcatcttatcagaggatttactgcgtgctggcctacgacgcagccgggattatcctggtgaggttctgttagacgagaacgcattacagatcgcgccagagttattggcagtgtggcgaaaggagaaaagacgtctgctccagaccccgccgctggatacgttgttaccgattctgttgaatgacactaaatacactcattacacatctgttgggcagcagcttgctgtacgcacggtgttgacgagtgataaagaccgttttttgtttattaacctgccaacgggggctggtaagacgctcattatccattctctgatgctggcaactcccgcaagtcaactgacactggtgattgttccgactatcagccttgctattgagcaggctcagcgcgctcagtccatgttactgcaggcaaacgccgaccatggtggcgaatacacttggcactctgggcaaacaccagaggcacgcgaggcgattaaggcccgtatcaaagccggtaaacaaaggttactgttttgttcaccggaggcggcatccagtggttcgctgctattgcttctattttcactggccaagcggaaaatgattggcgccctggtcgtggacgaagcccatcttatcgatcaatggggtgcggaattccggccggaattccaactgcttgcgccgttggtaaaatcattggtggaagtgagtaaggcgagcattcgcacggtacttctttccgcgacgtggagtcaggcaacgctcaatacccttaaagagctctttgccggtgataaccctcaggcgatcgttgaagttaacggcagtttcctgcgaccagagcctatgtggtacgtcagcaaagcggacgatcgtgaagatcatcgtcggcaggtggaagatgcgatttcaacgctaccgcggccgttgatcctttacgttacgacggtcgaggacgccatcgactggcaccagtatttgctcaaagccggctataagcgctgcggattggtccacggtaaagtatctccacgccagagagaaaagcagatagccgactgggctgaggataacgttgatatcatggttgcgacctctgcatttggcgtcgggatggataaaaacaacgtacgcgcggtgctgcatgttaccgtcccggaaaacatcgaccgtctctatcaggagagcgggcgtggagggcgtgacggctatgcttcagtagcacaactcatttatagggacgatcagatctctttggctcgtcaccttaaccgcgataaccttatcggtgcaaaaaaagggtttctacgttggcaaaaaatgcatcagaaccgggaatcggaatcacccggttatttctcagtttatctggataccaagcacgacagcatcaaaattgattctcgtgcaaatgtcgcgtggaactggcgcacactcctcatgctccaacgtgccggcttcttgagtctgcattttgctgcaccggatctcgaacagtttgcctcagataatgtggacgatgcgaaggtagaacagtactttaaccattatttcagccatattggcgtcaaactccatcgtgaaggtcatcttgatgtgcaggagtggaatggcacgttaaaagaactgcgttccagagagttgcgtgcccggcaaaaagggtttcaggtgcttgaagattggttgaatcatcaggaaaatccgctatgtagtgtccttgaatcgttctacacgcttgatggttacgccccagaactggcttgtggtggttgcccaggttgtcgctctcaggcgttgtcagcatatacgcctacgctgggcttgaatgcatatttgatttctggcgaagaacgcgagcgcatcggtagcgatatgcgtatttattaccctccggcccgatcctccgctttgctgcttcgccagtggatcgactggatcgcacgtttgctagtcacacgtgagattcaggccatccgcgcaagctcgaccgtactatcccaattaagccaacaactttataagagcgtgccattctggtgcgcgctttcacatgacgatccctcgacaaactggaatgaactggtacttgtcctgcccggagagagcctgccagaacttgacccgtttagtgatatcaaacgaatcattgtggccccagagacgctccctgaaaaaaacgttcggggaaggctgtggtgggagagtgatcccagagctcgtacgctggaccaatttataaggagtttaagcagtggcaatcattaa

SEQ ID NO: 200530 - DNA, 2913 bp, Klebsiella oxytoca
atggcagagatttgtacgctggcgccagcaaaactttatgacgaaagtaccgtctactttcgatcggcggaaagtgggttatggtgccgcggacgctatggcggaccaaggcctggtaataagcatctgataattatccgttctggccagaatgtcgttgtggatctggcagacatattttatcccaactatgggcagggcttagcaatgaacccagcccattttcttgctgcccgttcaaacgatgctccgtttttttaccctctgcgcgagcgatttgtcagcgcgtggattaagcagcgtgcagcatgccgatctatgtcttcgttgatcagcagtcgcgttgaggtcgagcctcatcagattgctgttgttcgtcgaattctccaggaccaaaaccccaaatacctgttggcagacgaagtaggactgggcaaaaccatcgaagcggggctggtcatccgcgagcatattctggaatgtaatcgcgacgccagggttttggtagtcgtgccgcaagcgttaaaaggccagtggagtgaggagttgatcggacgctttgcattaggtgaagtgatgatgggaggagggcggacgcggcaaatccggctttgcaaccatgatgagattaccgactccttgatgcaaacatgggggccgacgttgattgtggtggacgaagctcaccaactcgcacgtcacgcttgggctgaagacgttgctaaacgcgctcaatataccgcgttgacaacactttgccatcaaacgggcattgtgttgttactctcagggacgccgatgcatggcaacgaactgaactttcttgcgatgttgcattgcctcaatgaagaagcctggccactggacccggcaggttgtgagcattttatccaacgcgtggcagagcgtgagagccttggcgggatctataccgcgctccagcctgaaaacgacaacgggattatcgaaagctgtcttgaggagttgtccgcaaagtttcctgatgatgaggaacttcagggtttaattgatgaggtgcggccgcttgttgattttatcgccgatgaagaaggcgaagagcgtagcgagaaaattttggcgcttcgcaattggttaggtgagcattaccgtctgtttcatcgactgttacgtaaccgccgcgaagatccttctcttgcctggcttttccctgggttagcggggctgaatatcgcgcactgggccgtcaagcctgaagatgtcaccttagacgaacttcttgaagactggcgttctagtgccaaaaattctcctgagaagcatcgccatatcaccacggagaatctgagcgattgggtggatgcgctgttcaccagtcccctgacattttcacgtcgggcacgtttagcgctggaacagggacccgccagcatagatgaacaaaattaccttgaacaagcgctggcaattgcgaagcaagagcaacgccaaaaagacgagcaattgatgatcgcccttaacgcatggtttgcgaatcacaaagaagggaaagcggtcatattctgtagtgaagaagcggaatccgctcatcttttcacaaagctggatctacagtccacttggaaaatcgtccgccacgcgccggataagtacgcgcttaacaaccactggcaggtgctgatatgcgacaggcgtggggaagatggccttaatcttcatgggaaaaatcgtctggccgttcattacagcctgagtcgcgatttcaaccgttttgagcaacgtcttgggcgcttcaaccgctactcaggcaacttaaggggcatcaagccggtagaaagcctcgtcatcctgcctggaagagatggcctgtcatcggagtggaccaggcttttagatcagggcattaacctgttcagacaaagcgtagccagcctgcagtttgtgttggatgagcaaatagaggctatgtggcggcgttattttgagggcggtcttgccgtcatcagtactaccatcgatgccctggggggagaaaaagggttcgtagctgttgagcgtaaaaaagtgtttgagcaggagaacctgctttctatggagcaagaggtcattgcttcacaggcattttctgaggcattgctggagtcggaagatgatgcggaacagcgagcgctggacatgctgcaatggatcaccaaagcactccagtttaatcaacaaattgaggaagataaaaccgggttcaggttacgctttgaacgagatgaatataaggggcgcacgctcgttgatgtgcaaactttcatcgacaactgtttgcttggactggatttttcagagggctatcctccttctacagcaatcatgaccctctcgcgtacccaggctagtttgcacaaaaatacttatcctctccgctacgggcaacctttcgtggataccgtctggcaacttatgcagagtgatcctcgcggtacgacgatggcgatcctacgcatgatgaaaacgattaaactcccgtcgccacagttttatttccattttcaatggttaagcagcgctagcctggatggcgataataagctggtagctcaacgtcagggagatgagcgttttgccccgcggctggaaaccttctggctcgatgctaatggtcgcgaagttgatgaaaagattatcgctgttttggaaaaaccgtacgataaaaaagggactgtgctctacgaagatatgaacctgcgaaccgatgtatggccacagatgacgcgttggtttgatcccgaagcctggaaaaatacggtgctggagttaacagaaaaagcgaagcagcgtcagcaaattcgctacccttcgagtgacgtattgcctattgggcaccagttgatggcggtgaaggcgataattttgtgcagcaaagagactttccagatggagtaa

SEQ ID NO: 200531 - DNA, 1128 bp, Klebsiella oxytoca
atgagtgaatatcgtgttcccgccctgagaatccgacagggtgaggagaggcaactctatagccttgcgatagaaggtaaacagatcagcaaaattgcagcgatttcgcgtattcgtcgcggcgaagagagtttggttggttatcagcgtccagaagtacgtaaccatattcgcgaaattcagcgctacattgagagcgcaaatccgatgataccaaacccggtgattatcgcttttgataagcgtgtgcgttttgaaccgcttacagataatggcgacatggggcatctggtgatacctttctccgaagataaggattttgagaagccagggtttattgtggatggtcaacaacgtaccgctgctttgcgggatgcggaaatcgactcgtttatgatgccggtctccgcttttatcgctaatgacgcagaagaacagcgtgaacagtttatgctggttaactccacaaaaccgttgcccaaaacgttgttatacgaactggcaccgcatacccacggccgtctgccatccgatctgcaaatgcgtaagtttccttcactgctgactcaacgactgaacttcggcgaaggtccacttgcggggcgcatcaaaacggcgaccaatcctgatggggttattgctgacaactcgatgatcaaaatgattgatgccagtcttcgtgagggagcattgtatcgcttccgtgatccggcgacagggttgggggatgaagggaagatggtgaagctgctgaacaacttctggtcagctgtggaaaccgtgtttactgatgactgggataaaaagcctcgctattcccgcttgttacatggcgttggtattcttgcgcttggaagcttgatggatgaaatcgatcatgtacatcaggactataaaggtgaacctggttggactgagatcccttcctatactcgttttgtcgaagagttaaaccgaattaagccgctttgcgcatggagtagcggggtatggaactttggaacagacattgatggccagcccgttattcgtaaatggaatgaactgcaaaatctttcaaaagatatatctttggtcactgattacttagtaaccagctatatgaaaaccgtaaatgcagatatttaa

SEQ ID NO: 200532 - DNA, 894 bp, Klebsiella oxytoca
ttgagcctgagtcaattttcatcaggtcgaatttcttcaagtgtgctcgtaaattcttggtgtaatgctctgaatgaagctatatctacatctgcaacagtatgtgtagaggatctttataaaggtgggcactgggcgacggctaaagtgattttaaatgattatcctattgatttatgggtgctttctgctggcttgggcctccttcaccacaaagacaatgtagtaccgtataaagcgacctttgctgttggatatgatgaatcaataccattatattctcaagaatatgtagggaaaagttttcatagaacatggtggaaagaaataaccaataggtctatttttaaatctaagcatcctacatctattgtagagttaatgaaaaaaagaaaaaaagactattatattatctgtggttctccagattatattaatgcaattgaactggatattattaatggtcttgagtatctggttgatgcaaaaaaacaactgcttattatcacttccaaaaaaatcaatggcaggttgactgcatatcttttcaaaaccaaccaaaatatggctcagtggttaagatgcaatatgctcatgcttaatatcagtgtggcaaaatacattgtgaaggaatttacgtcaaaacaacttaatgatttaaatgagttatctcaaaagttagtagaagaactcaaggagttacctgagcgtgaagtaaaaaaaggaattcgccgcagcccagcggaagttaagtctttcattttaaagcttatgcaacaaaaacctggtatcagtgcaacacatgcgttgcgagagtttcgcgacgcgggaaattcatttgaggaaaaacgtttccgggctgagtttaaggccctgatggaagctaaaccttaa

SEQ ID NO: 200533 - DNA, 234 bp, Klebsiella oxytoca
atgaaaactttcgatgcccaacttgcgatgagcattgtatcgcactcaactggaggttttagttatgacactcttgctagagcgttgatttctaaagataaaaatgaaagccctgacgtccttcttgagtcatgtcgaagcttttgtttatcgcttgaggaaaaaggcattttgagacgatgccacagatgttctcattctcaagatgagtatttcgagtatattccccactaa

SEQ ID NO: 200534 - DNA, 432 bp, Klebsiella oxytoca
gtggtgccggaaccgctggtggcgcagtttcgccaacaggcggcgctgatgagctgtagcgtgccgacgttgtggcagcagacgctggctgattttatccgcgaaggccatttctggcgccatctgaagaaaatgcgcgccagctatgctcagcgtcgtcagtggcttgaatcggcgctgcgggagcacggtatcgcggtggttccgcaagcgggcggcattcagatggtcgtcagggtaagcggcgacgatcgtcaactggccctgcgcggcagacaggccggtctggccatccaggcgttaagcgactggcgaatggatagccggggagaaggggcgctgctgatgagcttcaccaatttaacctcagcggagatggcgggcgaggtggtacgaaagctgactcgggctctcgcttctcaggacaaataa

SEQ ID NO: 200535 - DNA, 1548 bp, Klebsiella oxytoca
atgggtacaaacgggctactagctgtctttgctataatacttgcttggtatactcttcttaccgatgagaaaagaactgatttcaaattgcgcataacttatttatactcagcatttatttgttcgttgttactaataataatgataattgtttattcgcctatactcattaacattctacctgttaatcccataccttggtattttggtttcaccgaagatacaatggcatttacttgtttatgtttgattgttatattttttggagctaaactgttaggaaaaaccatcccaaaagccaattacaaaaaatgggttcattactccgaaaaatatttacgcgctaagaaattcgaacaactaggttttctgctagataaatatcatgagcagctattcaaagtcctaaacaataaagcatggtctgttcggttacgcaacaaattgtaccccaaccgtttcctaaggttaaaagcaaaaaaaacaaattcttttcttgataatcctagcattatgaagatcagaaagtatttagcttctctattacctaaaaatgacaaagagcaagaacttatccagttaaatatttcacgactacttaaatcaaaagcattcttagtttatctttccgatacatatccgcatattgcaatgaaagcaacaagcctacatctcagagatcatgaagagtatgtgacttcatatttcactcatctaatttcactgcctggtagcgatctgtacagggagttgcgtgacaatcaaaaccgctctcatactggtgagtatttccttgatgaaagtaatcctcttttaaactattatttcgatgatatgaatgttgcaatcgaagtgaaaatctggaaaccaattggtgattacttggaggtatttataaaagaacaaaaaggaaagaataactactacaataaacacgacattcatttttcaagtaatgatgaacgctggaattgccccatttttgtcggcgtgtttttctttgatgttatggtaactctttcaatcttcaaacgctctaaataccacatgtggttaatgtactataaatattttttaacagctattcttgaaaatcgcgaatgccacgaggacgttgaccaaaataaagaattcccggtcagatttgattatttaatttaccaaattatatcaaattgcagtaaatgggttggagccattgaatatttagattacacaaattggtctcaagacaacataaaaatatcacctgagcattttgcatctaaatgtctaggagagatgatgcatttaattattacatcaagtaaaattgagatgcaacaaaaatcatatcttttggaaattgtaataagggtaatgcataacctcgatcagagacagcataattatttttccaaatgtattttcgataacattataagatcctatgagggtagtccagtaaacgaagcgactattgttatgctccgtgaagtatattccgatgttgatcatgttattaaacatgaaaattcaacttttgaaagagaattgtcaaagttataa

SEQ ID NO: 200536 - DNA, 1344 bp, Klebsiella oxytoca
atgaaatttattgatgagctggatttagctatatctctgtggatgcaggatggagttgctcaatccattgaaaaatcaacaccagatagcttgtttatgcttgttgaaactttatactttataacaagaaaccaaaccccttgcccatcaacaaacaatgaaaacttttctttcatcgctaactcatccttaagtggaggagtatctaactgtgctaatttacagtgccgccttaataaattagatgagttggtttctttcgcttctttgtacgctgatgttatatatataaacaacccatttgaaccactttatatttcatgggaagatttgcgcttcaactatataaaaacagaattactaacagcaatatgccagtacttctacttaaaaccctatctttcattaggagttataaaatattcaagtgggtacatgtcactttgctcccatcatcatgaaacattagctaaaccactttctgaaagaataaataaaaaggagcaggaattaactgcgatttttaacgagcactttttatcaaactgcactatttcgttagacaaatttgaaaatggagaaatattcatcgaagtgcttgataaaaccaatattcttgagcatggaagatcatatctccattttgatggaaaaccaaagtcaaaacacctaaggaagttatcccaaaagaatactaaacatgtattctctcgcaaggaaattgaagaagaaaacatacttccctcacttgtgtttccgttagtaaatgacattatagaacaagagtggatttcgtatttttataactcatcacttttacttgataacaaagataaaatcaaaactgcaagtcagttaaacactgaaacaatgtccattaattctaccaccttcactgagtctgtaaatcattacctacctaccattcattgtcgagatccattagaaataattaaattaagagagcgagaggaagaatcgtttaaagtttatagagataaactgcatagactattgctcgacgcaccgaagcaaaagccagagatatttcctgaaatattcagagatacagtcctgcctgaaataaacctaattaataaaaagcttaaagactatcaaataaaaaagagaaacagtcttcgtgataaattaatttttggttctggagcagttgcctttgggctgtactcaggcgttttgccttcaaatataggcagtatattagcggctataggtggcggtagtgccatcgtaagttcaatgatagattacaaatcagcttttctcagcaaagatgagatacgatccagtgactattattttttgtggcaactttcaaggtaa

SEQ ID NO: 200537 - DNA, 495 bp, Klebsiella oxytoca
gtgactggggtgagcgggtgcagtcaacgcatcagcaacttgaagtatgacgagtatacccgccccaaatttcagaggagggatgacggtttcgcggtaatgcacgaccccaaccgggcattaccgccgtcgccctcagctgaaaaagtaaggcaaatgccactgctatcctcaactggaccctacataaattctatttgtgactgttggtcagcggccctggaggccgcttttttttattcgcgtttcaggtacccgacgtctcgcaatgaaactcccccttgcgcgaaagtccagaagttcgcaggcaaagtgctgagcgttagccacccgcagcgccttgatgcagcggcacccacccaccaacgtctcttccgaagagagatagtctgccactcttttaaagaaatttattatgttattttgcatttaggttacgattattttcttttgcgcgattcatcactgcaatttcatttaccgctgttcttttaa

SEQ ID NO: 200538 - DNA, 375 bp, Klebsiella oxytoca
atggttgtcttcctttgtgaggtgtgggatttgaacagatatagtaagcttctaaacaattcaatcatatttgcattagggaatttaggtagtaaattagtagttatcttacttgtcccgctttatacgttctatttaacggcacaagattatggtgttgtagatcttatttcttccacccaagctctaatgatgccttttataactttaactatagagcaggcactgttacgttatataatcagtaatcaaaataaagacgagacaaattcactattttcaacgtccttatttatttgtatttgtactcttattgtattattgatactatgcctgtctcttatacacatctccgagcccacgagaccgtactag

SEQ ID NO: 200539 - DNA, 522 bp, Klebsiella oxytoca
atgaaaaattttatagctataattatgttactgttgttgtcattgagagtgatggcaggtgatcccggaggaatatccttacttgtaaaggcattgccttctgcaagtgcttataaatatgtccttgatggcttttttagaaattattacggtgtggacaatcctcacactccttcgtgcgatcaaaatgattataccccttatattgacaacgtatatttgaacacgctcccaaaaggtattgacgacaatatactaataaaatccataacagacttatcaaccagaactcagattgccaaaatattatcatcttactctgatgatcaagtttctggatttgatggagttcttttttatgcagtgaaagataataagttatttatttatacgttcgactcaaatgcccctgggcatatctttacgaatgagttgaatgttgatgaaattatcaactataagcttttgggaaggttcatttgccagtctataagatcaaagatactcccttccagtccttaa

SEQ ID NO: 200540 - DNA, 516 bp, Klebsiella oxytoca
atgatattgaggtcagtacctttgtttagatacttttcattaatcatatgtatgctgtgtttttcaagtgccattgctggggaaagaggatattacctgtttgtaagcggcaataaggatgggaaggaattgtaccaaagctataggggcgaaaataagacatacgaagaaaatcaatcgtgttggcagaaaagatctgggtcagagatctccatctcttatgttaaaactgttcctgcaggtattacacctcaattaattgatagtgctatgaatggtaaaagctcaagcctcaatattttaagatacaaactttcatcatttcatgatgaccagatagcacatgggtttgatgcaatgataaatatagaaaagcataatgataatgcgattttaaccttagtaccacttgagggtaaaatagtgactgagaaagtgatttcaagtgattttcagtcattggacttagggttgtgcaaggtcctgtttgccgttgataattattttgctccatga

SEQ ID NO: 200541 - DNA, 558 bp, Klebsiella oxytoca
atgaaactttattcagaacctaagctgatttttaggttggcatgcatattgatgattttttcggttaatcctacttgtgctaaagaaattatcttcaatacaacgtggatagataattctggcgaacataagttggtgatggagaaggaagtcaataaagataatactggagagcatttatctgtaaaacagatgacgaagggaaaggatgattggattctaaatgattatgttaatgactgtgaagtggatattaatctgaatttgataaaaaaatcaattgaagtaaacaatagttttgccgatggcgaaggtactgttttatttgcttataaaattggatgtattggtgggatagacccagttactgtaaagtatttcgcgtataaaaatggagtaaaatattctctacgaggggaagagcatatcatagtagaaaacggtgggtatggtggagaaagccctccggttccagattataatctaaaaaacgataagccactgctaaattacatgctgaagaaatggaagtctatctcaacgacaaaaataaattaa

SEQ ID NO: 200542 - DNA, 1209 bp, Klebsiella oxytoca
atgttatatacacttaaacatttgccagaatgctaccccagacctaaacctctgaaactttctcgttggcttatttctctggttgccatgctttcggtcagtgttatattaatgcgtatatttgggcgttatgttgaaaatctgtatttttggaagattgctttaggtgtgcctattgttttgtggagtgttccgtttacttcttgtctgcttctgtgggcattgcaggatagcaaagcaaatgctttcgataaacggcgagaacaatggattcttcgagaaacccgtaaggcacgtcgtgcactgcaggtgctgaatgcaacattcattaccggccactcatcagttgctcagaaagatacagctattgcgatgcaaaataacaatagcattattgtttcgcaggtcgaccgggatggtaatgaaagctccaggatgagccaaatttcttctagcccgcaggactcgctaaaattcgtgataacgaatattttttcgcagttgattgctggcattcctttcgcacatatccctaacaaagtaccactggtcatattttttgatataacaacatcgctgcctctggagagtattcgccattactgggatgaaacctggcaaaaaagcaatattactcttcctgttgaatatggtgaggggagtgggctcagtgtaatcgaccgttggttgaatgaacgtattaaagataaagcaatgctattgattgtgggtctccagttaaagcctgccgaatctgacaacacagctgaagccggtgtagcactacttcttggcaaccgcatgacccaggaagcactcgaacctctcgcgttgctccaccggccagatgctgctccacccggtgagctgagggaggggatgaacatggctgcctggaacgtcccgctcaaagaaaacatcgtcaaaaatttatggcttgccgggctgacgggtgagcagcgtgcagaagttatcgcgtgccagaatgcgcaccctgcgcaatctgtagaggacgaagccgtcatttcgctcgatacatctatgggacatgccggtgccgcggccccctggctggctatcgctgccgccaccgaaatcgcccgacaaactcagttaccacagatgattatctgcggtgataccacacagaatgtgctgtggagcacgctcattaccccgattgcttcccgacaggagatggatccgtga

SEQ ID NO: 200543 - DNA, 1602 bp, Klebsiella oxytoca
gtggatattttgcagaatctggttgccgcctgtcaggcggatgaaactctgcttcgccagcaggcgcaggcacgcatggaaaactggcagccctggcttgccccggtcagcgtgacctgtccggcgggtgaagacccgggatatgacgatgatttccagcgtatccgggaagaggtcaataagctttccggcattgataccgggctgatatgcacgcttgctgaaaaactgctgaccaccacagccaaagatatccggattgccacctgttactgctgggcacgtctgcaccaggacggcgaaaccggctttgccgaagggcttgaactgctggcgggattgctgcagcgccatggtgttcagcttcatccacagcgcgggcggagccgtaaactggcgctgaagtggctcgcaggctcccgcgttctggacagcctgtcactctggccggaagtagtacgcgacgatgccctacgcactgccggtgcgctgctgcttattcgcgatagtctggagaccgagccggaagcgtcacggccagaattgaataccctgtacaacgcgttggagtctcgcctgatgaaggccggtggcgtggatgccgtggtaccgcagaacgccggtaataaagctcagacacagacctccacacatacgaccgagtcagacgcgccagtgctgagccgcattacgtccggtcaggatttgctttcccaagcccgaaccctgacggagtatctgcgtgaacaacccgatggctggcttgccgcacaccggctgatgaaaatcctgcgccatgacacgctgagaacgatccccgcgccggatgccgaaggaaaaacgcgcatcgcgccgccgcgggcagacgagcgggccatgctcaaacgtctgtacctgcagcagagctggccggagatactggaccaggcggacagcactttctcgcgtggcgccaatcacctctggttggatttgcagtggtatatccatcaggccctggtgaagtcagggcagggcgtgctggccgacatcatcagcgccgatctgaaagggctgctgagccgcctcaccgggcttgaaacactggcctttaatgacggtacgccgtttgccgatgaggtcacgctgaactggataaaccagagcgtgctggacgatatagctggctggcgggatgagccggtcagtgccgacagtggggataataacgatattctggctcttgagccggaagcgctggagaaggcggacacagacggcctggatgccacactccactggctgcagacgcgtccgggcactgacaccacaaaagacaaatggttgctgcgtctgctgatggcccgggtggcggagcagaagggcaggaatgaactggcgctgcatctgctggctgagctcgatggtacagcgcagacaatcacactcatgcagtggacaccggcactgctgtttgaagtgaaatcgcgtcgcctcagactgctgcgcatgaaagccacacgcagtgaaaccgataaatcacgacttcagcccgagatggatttgcttctgtccggtctgattgcgctcgatccggcaagcagtgcagtgctttgcggataa

SEQ ID NO: 200544 - DNA, 471 bp, Klebsiella oxytoca
gtgaaaaagaaaaaacttctgggttacattgtattcttttcgggattgttggtgcttattgttcacgccttcccgatacgacctttcgttacgattacaaataatactaacaaacctcttttcatatatgctggtgagagtatctatgacgtcgaccccgaacctgaagaagttgagcgaattgtaaggtcaaaacctaaaatcatagctccaggtgagataagtcaatttactgcttcatttatatctctgattagaagagacgcagcaatcgatattggttggagaatcggtggtcaatatgaatataattcaactggtggtggaggtcagaatttcattctttcctcaacagcaggtgcgtgttctgtgtcgatcaaagtaaacgatgggtttaataatgagattctggagaatgcttctggtgatttgtgttttaaaaaaataaaagcattcaagtacaaatattga

SEQ ID NO: 200545 - DNA, 1086 bp, Klebsiella oxytoca
atgggaagagaagcacaaccgccgcattcccggctgagcccgcggctggcagccgacctgcaccgcatgaatttttatcgcttctgtcagttgctggagaggagggagccgggcagaccgctgatgggctcgaccagccatccggcggatgacccggtgcggtttgcgccgcacccggggatgggtttcccggcgaccgagctgaaggctgtcgaatatgacgaggatgatgacagcagaccaccgcttatccgcacgacctttatggggatgtacggtgttgattcccccttaccaacggcgtacctcgatgacatcacccagcgtcgggaaggacatgaggcgctgcagggatttctggatatcttcagccaccgcatcctgacgcagttttatcgcatctggcggaaatactcttacccggccacctttgagcacggcggcaccgacagcatttcgcagtcattgctgggtctggtggggctgggtattccgggcaccgcagagcacatcgccactccggtatcgcgctttctgtcgctgctgggcgtactccagcagccaggcaaaactcaggaggggatgcaggcgctggtgagcctgctggcacctgacacgacggtgcaggtgagcccgtattgcctgcggccggtggatgtcagtcagccgctgggcttttacggtgatgacgattttcttctggatggcaacacgccgctgggtgaagaagctatagatgctaacagtcagttgctgattgccctgtccaccgataacgaacaggaatcgcagggctggaaaccggatggtctgctgtatcaggactttctggtgatgctgcgggtgtatctgggctggcgctttaaggcaaaaatcaccctgaccaccgccacccgtctgctggccgcaccgccgctcggcgaaggccccttctggctggggatgaatggcgttctgggcgcggatggcgaagacctcccggatgatatcccgcagacctttacgacggaactgggctattacaccggcctgcagcccgcaacaccacaacaaggaaaccgacgtgttacgtacaagtttgattaa

SEQ ID NO: 200546 - DNA, 546 bp, Klebsiella oxytoca
gtgttacgtacaagtttgattaaacccgcgtgctggctgcctgcactgctgtcgttcagcctgacgggctgtggggtgacgcagggcgtcgcagagggtaccaaatcggtctataccgcggtgttttacaagaaaattaaagtgctccatctggattttacagcccgtgaagcactgaacaccgatgcgcgcgagagtaactcactctccgagccggtggtggtccgaatttaccagctgaaagaccgcaaagcattcgacaaaacggtctaccagcagctcctcaaggatggcgacacgatcctgaaagccgacctgttggcgacccgggatgtcgtgatgaaacctggcggcgatgcgaacctcgatatgccaatggaagcgggcgcgaaatttgtcgcggtggtcggtctcttccgccatcccgatatggttaacaacacctggaaacaggttcttagacgtgaagatctcgagccggataaaccccgcattctggaagccggaaataactacctgacgttacagccactgaaggatgactga

SEQ ID NO: 200547 - DNA, 456 bp, Klebsiella oxytoca
atgccacaaggacacaacacgccatcgctgtatgacatgctgagcggtaatttctctggtggcctaagcctcagccaagtcagtgagcagaaccaggtgattttatctgtactcgataacatgcagcgggtgctcaactgtcgcgccggtacgctggcgcatctgcctgattatggcctgccggacatgaccaaaattctgcaggggatgccgggtacagcccatgaattgatggagaccctgtcgtctgtactgctgaagtatgagccgcgtcttaagaaaatcgatgtggttctgcttgagcaggacattcctggtgaactgcgctatgccatagatgccgagctgaaaggcatcggcctggtacgctatggcacggaatttatgcctgaaggtcgcgtgctgatacgtcacctcaagcagcaacagtatcttgacgcacagacccgcctctaa

SEQ ID NO: 200548 - DNA, 375 bp, Klebsiella oxytoca
atgcatgacgaacaaccccgccaggtgagaaccggcggcgatccgcgatcactgcctcagtttacggcgctgcgcgatgagatgagcaaactgacgcacccggcacgtccggacgtcgactggaagcaggtggaaaacctgtcgcactccctgtttgaaatcaacggtgttgagctgcagaccggtgcctggtatacccttgcccgcagccagctggcgcaggtcagagggcttaacgaagggctcgccatcctgacctcgatgctgagctaccagtgggctcagttctggccgcagccggtgcaggtccgggctgacattctgagtggactttttcagcgcctgcagaaacttttccgcacctggtcactgtag

SEQ ID NO: 200549 - DNA, 849 bp, Klebsiella oxytoca
ttgcctgagcaggcattgctgagacgtgatgacgcggcgccaccggccagccagctggtctatgtcatccataaggagcctgaggtcagggggcgggtgcaggaaatgccacgggtcaaacccaaacgatggcccgtctttgtggctggcatggcgacctcactggtgctgggcgcagctactgcctttggatggcaggttctgcatcagccggatgacgccacaaataccctggccgcctccgttgccccgctgcctgaacccatgactaccccgcaaatcgatgccttcaggaagacggataacagccggacagactctgccatgtggcttgagcgaataacgcaccaggtcaacgggatcatgaaccagtcgccgggatggcggcttcattatgggcaggggctggtttcgcaggcaaaagccctgtggccagacgacccggcaacccgtgagctggtaaaacgctgggagcagtatcagcaggcacgcacgctgcccgccagcaagctcaagggctggaatgaggacatggcgcaactttgggcgctgtcggcaaggctcgatgcgctggatcatcagaaaggtaaatatctgacgggcagcgagctgaagacgatggtctggcaaattacccgttcgtttgccagtgcagtgccggctgaagagcagctgcggcaactggttagcgaaccgggggtggttaacgccccaggagtcagtattgaggaagcctcacgtcatctggattcgttgagccacatgctgggacaggtgtcgaaccaaggtggggatgctcattcagaaacagacccgggtgccagtgatcccggcacattccgtcgttaa

SEQ ID NO: 200550 - DNA, 339 bp, Klebsiella oxytoca
atggtttatgacatgaagctggggaaaaaagcgagaaggcctgcgaaacactggaccggacaggaaatggcaatactgcgcgcgcactcgaatcaggaagcatggattgtccgtgcccagcctttgttgccggggagaacggcagccgccattaagctccaggcggccaggctggtgctcagatttcgcaaccgcccatcccgtaagacaccgcctcagccctggagtgagggagagctcagcctgttaaaaaagcatcagaatgcgtcgattagcgaattgcttgaattattcccggggtgcacgaaatacgccattgaacacaggcgattagtttaa

SEQ ID NO: 200551 - DNA, 216 bp, Klebsiella oxytoca
atgaggcatcattcggtcagcagcccattcattactatcgccattgtaaaccattcgggcattaatatgagctatgtattagtgatgaaattcgctatgcttcccggactttggttcagaactatgctttcacgaggccaggcaatgattgcgttaatgacggaagctctgcgtattatggtcatgggggggcggcagaaggtgggcgaggtctaa

SEQ ID NO: 200552 - DNA, 189 bp, Klebsiella oxytoca
atggttgtttttaaggttgcatatgttaacaatggtttccagtttgttatcatttatctctgttgtgtgaataaaatatttttaattaataatacaaaggaggtagtgatgttattgctggtattaaatagttttttaactaacgtaattactttggtaactaaaaatagcgctatattatgggcatga

SEQ ID NO: 200553 - DNA, 501 bp, Klebsiella oxytoca
atgcgtggtgatcgacagtcgttactgaatgcgcaggctcatccagcctcacgccggcgccctgataatttcctccgtagtgttttgccaggaacgcaccaactacggcatgtttcccgccaccagccacaacggttcccagcggcttatccagtcctgcacgcgaggtgcctggcctggccgttctccgtatcctatttgaatgagcgtcggtacaacccgctgcgatttaccgccaccgcccgcggtgattgttgcgcttggttcgtcggcacggtgtccgatgctggcgccgaactgcctggcgataaccggagcgacgacacaggcgcgcgactctttcaggattgtgtgggcgggcttatcgatcgggcgcggtttagcctggtactcgctgccgccattgccagccaggaacggcgccagctctgcctcaacaatacccagagcgtgaccattcccgcccgggcgcctggacgtgccgacggtcactgtcggtag

SEQ ID NO: 200554 - DNA, 306 bp, Klebsiella oxytoca
gtgcgcggggttaatttccgcagcctgactgacagcatcgataccagcacagccgccggccgctttttcttccacgtaatgagcgctctggcggaaatggaaagagagctgatcgtcgagcgtacccgggcaggattagccgcggcgagggagctggggcgtattggcggccgccggcaggtgatgaccccggaggttgtcgatcgtgcgcatcgaatgctggagaacggagctacacgccaacagatagctgatgtgatcggcgtaggggtgaagactatttataaatattttcctgctggctaa

SEQ ID NO: 200555 - DNA, 420 bp, Klebsiella oxytoca
atgcagttctacacgcccgttgagttacgtaggattatcctgatcccattgtacagcgaccttgttcagtgtggttttccaagtcccgcccaggattatgttgagcaacgcatcgacctgaacgagttattagttaaccaccccagcgcgacgtattttgtcaaagctgccggcgatagcatgaaagatgccgggatcagcgagggggatcttctggttgtggatagttcaaggaccgcagtccatggcgatattgtgattgccgcagtggacggggggttcactgttaagaagttgcaactacatccacgcgttcagcttaacccaatgaatcctgcatattcgccgatagttgtcggaagcgaggatactctcgacgtgttcggggtcgttacttacatcattaaatcagcgggctaa

SEQ ID NO: 200556 - DNA, 453 bp, Klebsiella oxytoca
atgacagaaatacgtattggctatgcccgatgttcaactgaccgccaggatctggctgcacagcaggaagccctcgtcggtctgggcgtttccccggaccggatttataccgataagggactgaccggttcaaatcgccagcgtcccggtctggctcaggctctggcggcagttcgccagggagacacgctggtcgtaccgaaaatgttctttaatgtgctggcgacgtttgccgagtttgaaggcgacctgatacgtcttcgcacgcgcgaagagatggccatcgcctgggctaaaggaaaactgcgggggaagcagtcgaagctgtcagataaacagcagaaagagctttgcaggatgcacggaagcggcgagtactctatcagcgatctggctgaattattctccgtctcccgccccacggtctatcggacgctttcccgtggggaataa

SEQ ID NO: 200557 - DNA, 204 bp, Klebsiella oxytoca
atgtcactttataagtacttaaaggatgaggattattttttcattatttacaatgcatccggtgaggtggtttttaaaccatcaccgtattatggcatttccaacatgggagcatatgacggtatagaattccagtacggtgatagccattctttactttacccaggaccagaaggctatgaatcatacgaattcactaagtga

SEQ ID NO: 200558 - DNA, 273 bp, Klebsiella oxytoca
atgcagagcagaaccgtttaccactggcagagccggcgggatgatcgggcgataaccctgcgtatccgggaaatagcggaaacccggatccgctacggttgcccgcgtattcatatccagctgcggcgggaaggctggcctgttaaccacaagaaaacacaccggatttactgtctggaaggcctcaacctgcgcagaaagcgcccgcgcaggcatgtcattgcagcacatcgtcagcaacgtccggtcctgaccggtgtcgatcagtgctga

SEQ ID NO: 200559 - DNA, 249 bp, Klebsiella oxytoca
atggccctgaccagcggtgaagatatgcagctgaccgctggccggaacctggcggttaacgccgggggcgatatcagcgtcggaataatgggcaatgcgaccacttcgaccggggagaagctggggctctttgcccgcaccggtcaactgggcctgaaatccggggaagggccaatagatgtccaggcacaaaacgccagtatgcggttgttcgctgagaagaagctgacgctgagctcagcgagttga

SEQ ID NO: 200560 - DNA, 732 bp, Klebsiella oxytoca
atgaagataaacgctgaccagctcgcattgctagattcgtactcatctaattcttatgctagtgagctagtgaagcattgcaaatctatctttccgttgatatatgattcactgcatgaaaaaacattaagaactaatattgcaaaactaattgagacggcagggaggtcaaaggttactcaacgtggtccccttcagctttacttcgatatggctgttacgctaggttctgagtttgaaactgatccaatgtactcagattttagttttgagtcagaccaatccccgatgaaaaatcaattggaaatatctttatctcttcatgaaaaatttagcacctatatcgagaatgtcattggggaagatagcaaacatgcaaaaaactttcttaccagcttagaagttgagatgttctcaaacatacataaaattaattttatagaaagtatgcataaattattatgtgatatttaccctcagaagtacgaattcttggggcgagataaaataaatgccctgatagagctgggcactaaaaaattcaaatatgataatgctagtgcaaagatacaagccatatatattatgttaatgtttgttatcgggcatggctttgaaaaagatttattccatcagaatgagaatattttcaatagtaatgcccatgatgatttttacatattaaaatccaaaggatttattgtacggttcattaatgcactggttttatag

SEQ ID NO: 200561 - DNA, 528 bp, Klebsiella oxytoca
atgcgatatagtataattctaagcttattaacttctttatatacatcaatttctttagcagaggccccaaaaatgaaagataacaattttttcactattagtgttagttgcagcggtcagaaagaatgtatatacaaaaatcagagtgaaattcctgtcattgtgagtattcagaatatatattccaaaggttactatattcctttggaatatattaagaaaactggacctagtatcaaattaactgatcgcggaaataaaagtagcatgccactcaagccaaatctagttagttgggatttaaagaaaaaaatgacttacatccctgagggggggtatgttgaatttacgtggactcttttggatagagatatttcatcatttgtaaatgatggaaaccttaatgttgatgctgatttcaagatcagaacaaaaatatatgacgataaagaaatggaaattggtgattttatttccctgtcaaaattatttataaaaggaagtaacctaaatgaagataaacgctga

SEQ ID NO: 200562 - DNA, 810 bp, Klebsiella oxytoca
atgggaataagtggaggcattcaaagtccatctgaggtggctaggtgcgaagatcctgcaataagtgcgacgctaccatgcgcttcttgctggagtaaggactataccaaggagattcaagtatacacaggaaaaaggtattcggatcagttgaacgtggctggcgaatcgtatgattataattttggaacagtccagtataaattaaaaattctctgtaaaactaaaaaaatagttgttgtagaaatcagattcaaaattgaatctgatgatgctgtaaatgattcggctgtagcgcaagctaaaaaatcattaacagaaggagtcaagaaatattggggtaatcagtttttattaaaaatctccgaccctaaatgtgggacacaaatactaccgatcgagtttaaagtactatttgtgaattctgatgaacactatatattcaaaatacacgataaatatgatcgtgaaggtgtcacgggaaatgtcctcgatgtatcgaaagatactggtccatggacatatgcccacgaattcggtcattgctatgggttacctgatgaatatggatacaatcctgacgcagaagaaaatgatcaagtagtttactataaaccggatcggtctcttgattcaccaatttctgttccttataatggaggagatccgagtgatccagcttcaacgattatggctgcatatgggaatactattattctgaaaagacatggatggattatagctattgaagcgaatgagatttttaatgaacgtggtttaggaaggaggataatatgcgatatagtataa

SEQ ID NO: 200563 - DNA, 486 bp, Klebsiella oxytoca
atgattaatgatatgactgaacatatgttctcgttgcaacgagaagaaaattcacgaaagctatatgttcttgttgatggtgctcaatatgagcgattttattcagatgaattatatgaaagcaagagtgttaagtcgctattcgaacattctgaagatagaaaaattgcatttgcaggcccttggctgcttgatattacaatcttaggtagtgactggctgaaaaaaataaacgctcttgagctgaaatatccttcagtttcttggatgttaagttcattggctattaatgatttggtgcttcatttaaatggaaatttaaaaattgttctgccaaataatgaaattgccatgctgcgatattatgatccgcgagtacttatttacttgcctgacgtattgactaaagaacagtttcagtcatttacaactggaatagttgcgtggggatttctctatgaagatgaataccattacattatataa

SEQ ID NO: 200564 - DNA, 195 bp, Klebsiella oxytoca
atggacgaaggtgattattataaagtatatggatatacatatgataaaaaagggaatattcataccaatgcgattttagacaataatttaaatttatctgattataatgcaaaaaataattcatttaagtataaaaacgcgatctctgtaaaaaatacatacttgagaatcattgttcctagcaggaaaacataa

SEQ ID NO: 200565 - DNA, 153 bp, Klebsiella oxytoca
atgatattcactcctgaattaatatcaataaaaataacaaattacctcattaataaaaccaaacaccaggcgtttttttgtgacacgactaagataactaatattgtgtatccgattcgattactacgtcagcactattatttttatacttaa

SEQ ID NO: 200566 - DNA, 837 bp, Klebsiella oxytoca
gtgaataaaaagctattatggatttacatcctctttgttttatcatttagcgctcgtatccaggtgagtgaggcaaaggatgtatgggtttttgataaagtctccagttctactgtcttaggaatgacggatgcggacagggttcgcaatctgacaacgcagtttcgacaggttgagatcgtcactgattcaaacattctcaccattcagaattccctactagaaaaaggaaatatctgctctatcaatttcgtgagaataaataaaacattgctttcttatttttactctaaagatacggtggcaatgtataaggcactattttcacaggaaggaatgcctctgacggatgatattattgtcctgacatctctcaggcccggtgaagaatgtcccgaaccgtacagtgaactcatagaggctaaggggaatttgtttttctctgaacaagactatgtggtgttcatgaagaaaaaaactgggaatgtaacatcggggaataaagataaaattgatttttggcaatactgtaaagacgctgcggtaggcgcggcctacgatggaagaagtaaatatagctgtcagtttagtcataaatccatagctgaagtgtattccaatattcgtgcgctcagtcattatcaacatgcgttaaaggaaaagttgccgagtaaaaatattaaataccctgttgatggaggatataccatttatcaatggactgatcgcaacacgctagagataataattgaacaagaaaatgagtctatccgctattccattaagtataaaaataatagtgctgacgtagtaatcgaatcggatacacaatattag

SEQ ID NO: 200567 - DNA, 534 bp, Klebsiella oxytoca
ttgcgcgaaggttacgagaacactttcagtgaaaatgtcaaaaatggaaaccggattgatataaaccagttacaggtttcagatgaaggaaaagcgtttatcaaaggatgggagtcatttaagtcaaaaccttataatgattcagagggctattgcaccattggttatggtcacttaattgcaaggcgcaagtgtgaggatatcgttctgtcagacgaatttaaagacggcatcacgtgtgcccgcgccgatgaactttttgaagaaagactgcccacatatgtaaatgaacttaagagttcagtaacggtgaatctctatcagtacgagtttgatgcgttggtaagccttttgttcaatctcggttccttacgcaaagcacctttactcaaatcgaaacttaatagcggagattatgctggtgcagcggacgaattcctcgatattaccaatgatggtaccactggcctggtgacgcgccgtaggaaagagtgggatttattcaataacaatgtttatgattcttctcattga

SEQ ID NO: 200568 - DNA, 2400 bp, Klebsiella oxytoca
atgactgcaaagctacccaaaatcagttaccccgtaccgtcaaacaaaaatggtcatcccttttcctctgtggaagagttgttatcgatggtcggaggagaaagctcaggactgtatctggtgggaagtcagggaatgtggcatggcggtatccatattactgataccactattccatggtgcgctctgagtactgacagcgaagctgagaatgagtattgtcgtgagctttataaaggggagcaatttattcgttgtatggcggatggtgagatagttgcctggcgcgtcagtaaggactatgagagtgctgcgattgaatggcgcggtgaaaaactgttcctttcgacctcttttgtgctggtgaaacattatatccagccgggtgatacagcagagagcggactgacatttttcacgctgtatatgaatctggcgccttatgctgcttataaacgacagggcagcctggcggacagaaaagtagctggcgttcagcgctattactccagtgcggaagatttgcaggcagggcgcgcagccggaaaactggggaaagacaccgtagtcacgctgagtgacactattgtgacccgcagcagcgaccagcgtcagtttaccaaagtaaccattacccgtgagacgaagaatacagaaggagaaacacttgccgcaggcacccgaatctggacggtatcagaccaggggtatctgaaagcaacagaatcggtgcctgttccgtcctggtgggcaaaatgttctctggcttacactaatgagtcagaaggcgttgtgaactgcacttcgcgtacaaactgggcgtactatctgagcagtgacgatgttctccaatataaaaatgcaggcagcctggtagccgatttcccgctttcatacgagcccggtaataccgcacagcaggtcatccgtccaggtaaaaatccaggcgatgtagcaaaaacattcagtctggtcactctgggccgggataaggataagctgaaaaagggcgatcgggtatgggtagtatcagacggcgacagtctgacaccggttgcaccggcagcatccggtagtgaacccgtttttaatgatgtgtatgtcccttcagcgcctgtagcggtcaatgccggagacagtcttgggcatatgggcttttatcagctaccggaagaaaacggcaaacgctcgcgctaccaggtacatatagagtgcctgagcatggatgatatggagaagttcatcactaatcccggaagagcaggagaggatgcgccggtgtatctgacctggaaagctgatgcaccattgtttgaaaagggtgagcggggaatggttgcgggcagtcgtaaaacaaagatatcgggtattctgacactggcaaaagtccctggcgttgatgctgaggggaatacgctgagcagtaacaaggatgcggcatattatcagatacgtcctgaaggtggctggctggccgcagccagtgttcagaaagtatcgcagtatgcgcttggtgagctcggatttgtcacactgaataaggctccggaaagttttgacctgattgatggaataaaacaaccgaataacgtggtgaagggtattctggagcagttgtataaagcggcacaggatgaaacgcgcaccaatcatgccctgaacaaatataactaccagcgattgctggcgttgatagacgataaccatgacgggtattactcggagcaggagtatcttcaggcggtgcataatgtctcctatcgtgaccgcttataccgtgtgattgcgaagcacgccagtgaatggtattacggcaaggatgacccgctgtggaagacatacctggataccttaaccacagatgcgccgttgtggaaaacgtatctggaagcgtttctggataaaatgacgtggatgaaggcggtgtcggaaaagggcgtgtcgctggggccggagccgtggcatatgcatccggtagtgtttttagatgctgtctcaaacgatcagaaattgattatatttccgcttaaagtcaaaccgaagaatgatattaatggagtctggaaaaattattactgggctgcatctttaagtgacagcaatgcctctcaggccatatttggtcgaaatcgaagcggagggagtcgtaaacatgctgctcgtgatttgtatacagaaccttcgacagaagttgtcgctgtttgtgacggaacagtcaaaagcattacagcttattatatgggaacatcacaaataacaatcgagcataaaacgaatgataacagacgtttttttgcacgttatggagaggttgatcctaatagtattactgttaatgtaggggataacgtgagtcaaggtagtataatagctaaaacaggtttaatgatttctccataa

SEQ ID NO: 200569 - DNA, 879 bp, Klebsiella oxytoca
atgcttagttttgcggatagctcggtaagttatgggtatgataaattaaataatttaatttatgcacaaaaagacggtaaaaaacatgcattgaaatttaatgaggattatgcgggtaatccatcctatttatttgattttttctcaggttctcctgcaattatagctgatagcagatctcttcatgactctaccgtttatgctacattgaaatatagcgaaaataaattcatcattgattgcttgtatttaagtgtaaaaagtaaaaagaatgggatcttagctaaagagggtgtttgtagtttagatatgtcgccagcgaaaaattacgctaattttattgagggcaaagtaggtaaaactgaaagtgacatagattctatagatacaggcttaatcttaagcggcaaggaaaaatatctacctattgttatgtataatagcaaaaataaactgatataccaattgtatagtaataagcaagcattattggatggcgattattcaattttttctttaagtagcgacggtgcgtgtgaggtttttgtgaattctccatgggttatatacaacaaggaattagagggggttgacattatgagtgagagagttttagatggtaagattgaattaaataaagcagtcccaaagaaaactgatgctaatcaatgctcatcgtacccagcgataagtgtcataaaacctaaatcctatttttatgactcctcgtacagaattaaaaaatcttaccttgttaaaggagataaggttaacttgttatctattagtgaggatggtaaatggtgtaaggtaagatatattagtattaaaaatatagctactgatgacatcatgttgtgtgcggatctaagtatttag

SEQ ID NO: 200570 - DNA, 981 bp, Klebsiella oxytoca
atggcgagaagatcgaagaagagcgaaccggaagcgctgcgtaaacagcttctggcgttaattactgactttgagcataagctcacggacgactcccttagggaacaagtgctgatgcttgttcctgccaatcatttattacgtgatttaggtagctcattacttaatgaagagggctgtaattctgcccgggatcggatcttggcgtatttgctcaagtatcccggcattgtcatccatggggatgagctcatggttgtcgcgggcatcagtgagtacgcccgtaggattagggagctacgtgttcagttcggttggtctgtcctgagtggaaccacgctccgggaaatgatagaacagcatgaaattacgttggaagaacttaaggctgactctcttaatgccctcaaaacagacgtgtatgcgctgatggccacggaacaggacagagaggccgcattgcgttggaatgaagctaatgttctcaggcgcagtaaaatctccacaaaggataaaatactctcatacttgcgtaagaacgttggtcgtcctgttactggtgaagagttacgctatttagcaaacgacagtaaagaatgggctcggcgtactcgtgagctacgtactgaggatggctggccaattgcaaccaagaactcaggaagaccggagctggaagtcggagcctatctgctggaggaagaccgtcaggcggaggtgcatgaccgaaaaattcctgatccggtccgtgtggccgtcctcgagcgcgatcatcatgcctgtagaaattgtggatggtctcatgcgcgtaaaacaataaatgatccaagaaccttcctcgaactacatcatattgaacatcatgctgatggcggtgaaaataccttggaaaacttaataaccctctgcaatgtgtgtcacgatgaggtccatcgtcgccatatttccagtgagtatctgctaaatctgctaagaaaatga

SEQ ID NO: 200571 - DNA, 1131 bp, Klebsiella oxytoca
atgagcagaatcagtaaattaaaagtcattgacttgttttgtggtgctggcgggttatcctgcggtttcatgaaaggtgaaaatggcgctcattttgaaagcgtcttggctctggataatgataaggctgccatcagaacgtacaatgcgaactttggtgaacatggtaccgtagctaatattgaggaatggattgctgagaacccagttcctcaggcggatgtggtcatcggtggaccgccatgtcagggattcagcttactcaataagaatcgggaaggtgatcaccggcgtgcgctgtgggagccgtatatggatattattgagcgatcttctgcatcagtattcgtgatggaaaacgtaccaggtctcttatcaagtgatgaatttcaggatatacgcaatcgtgctgaggatatgggttttcttcttctgaatccctccgtcctgaatacggcagattatggcgcccctcaaacacgcaagcgagccattgctattggtatcaaaaaggaccgcttcctgttggatgatattcccgcattccctcctgagccgtcacatcggaatccggacaaggaaggaacgttgccagcatggctgactgttcgggatttcattggtgatttacctgatccggtaggaacggaagttagagaccttccaccaccactggatctccactttggtcggaatcctacagccctttcccaggaacgttatttggcggtaccggtgggagggaatcggtttgatttgcaaaagaacagaccagatatcacacctgcatgctggattaaaaagacgtcaggcgggacagatctgtttggccggctatggtgggagcgtccttcggtcactatccgtaccgaattctttaaaccggaaaagggacgttatctccatccagaaaaacatcgccccatcacccatcgtgaagcagcccggctgatgagttttgccgatgattttacttttttgggtacaaaaaccgaaatcgctaggcagataggtaacgccgtacccccggtgtttgcacaaaaaattgcatcctatgttcttaatttaatggaatatttgattaaaaatggcgagaagatcgaagaagagcgaaccggaagcgctgcgtaa

SEQ ID NO: 200572 - DNA, 1059 bp, Klebsiella oxytoca
atgaaagaagatgatttcgagatgtggattgatgataccttacctaaatttaagctattggggaaatacatcgcatttataattgaaaacctcttgcaacaagaaaaaataaattatctctcagttagctacagaactaaaagcaaagaaggtattttagaaaaagtggggcgtaaaaattataaaaaacccagagatgagttaacggacatatcaggcgtaagggtaatcttatatttagattctgatgtatctaaagttgggcatataattgaatctacttttaatgtggattctaaaaatagcatgaataatgaatacagactttcatcagataaaatgggatatagatctatacattatgtatgtgatattggcgttgaaaggaatgctcttaaagaaaatgaaaatatttcagggcttagatgtgagattcaagtaagaactatgctccaacatgcatgggcggaattagcgcacgatagaaactataaattgggcgcccagttacctctaccaatacaaagaaaaataaatttattttccagtatgcttgaaatagcagatgaaggattcacggaaattgtcaatgccattgaagaatatagagaatccattgacaataataatctagatcaattatccgctcaggaaataaactctgtcagtttatataaatttgttcaggagctaagtgagaaaattggattggaattaaacccagtcaatgactggggagggcaaaccactaggaatgttatagatgaattaaatcacctaggctttcatgacttcaactcaatcactagatccatacccgataattatgttgaggcctgtaagaaatacctatcagaaaataatatatatggattccttagagatatcatgctaataaaagactttgaagccttaagcaaaaaggatcacctgaactgggcaatagttggtaatgaagaggatagtgaagctgaaaaaatgcgtcttttctattcacaatttatgcctgaggaaaaagcgacgcaattagttcatacctttgccaatgataaccaataa

SEQ ID NO: 200573 - DNA, 609 bp, Klebsiella oxytoca
atgagcaataaaataaatatactatgtatagttaaagctcattttaatacgttaaaaaataccggttgtaaaaacatgtctaaagtggactgttttacttttattgtttttccagttttgctatcaatcgtatcggcttacaataactttaatttaaataaagaccttgactctttattagttaactttggtgctatatttacagcattgttattatcagtaatagtgttgatatatgaccaagaaaacaggacgcttgaaaaagtaagggggaattcagatgtagtgggcgctgtaactaataataaattgcttttgctaaaggaattatatcataatatctcctttgctatattatgctcgttgattctagtggttttgacattcatacattcaacactcgaaccaataacccctaaaaaaattgaagaaagtgttgttatcgttaattttaatatctggaagttacatttaaattttaattttgtcttcacttgggcaactaaagttgtcacgccactaataatactggttggtgtgaatattattttaactattgtgatgattgttaaaagattatatctcattctcattaataattctaactga

SEQ ID NO: 200574 - DNA, 909 bp, Klebsiella oxytoca
atgtattcactggcaccatattttattcgttgttatgatgggaataataaatcaaagaatgttgaagaacgatacgatttcttaaatagaatcgggcagtatgatatttatcaattaatagcagaattcattgctaaacataaagattttgagaaaataccggacagcaaagaaacatataaatttcataatgtaagttctaaacctaaagaaagagttatttcaggatggatgagccttggccattatggtatcaaaaatgacataataaatacagatgataatgcgttggcattttctaaagaagaaaatcatgcggatgtgcgaaattactattttcaattttattttcctttagaatcaaggaaaggtatttgcctcttatatgcatataagaaagacggtataaaatctatctttcaaagagagttctctaaattcttcacggagcacacaggtaaacatatacaaataaatcctcttacctatgataaagctgtaattccgtggttagatgcagaagctaaagaaatcagagtcattggttttacacctccaaaatcgcttgaagatagtatttcttctcttggtgatatcgagggtgaatatgttttaaaacctaaaaaaaacagctcatttggtaagttttggaagtttaaaaataagcaaacagaacaatcaaagttagtagagcttttaagtgaacaggctacccaagttaaagtcaaagttgtcatggatagcggcactaaaacatttagcgttggcaaatccgaaagaagcacaatgtgtcaaattgagattgatttagatgttgtaaatgtagttgcaggtaatcctgattttgtttctttggatgtttgggcaactagtataatagctgacctaaaaaaagaagttggaatatag

SEQ ID NO: 200575 - DNA, 633 bp, Klebsiella oxytoca
atgaacaggccaaacggcgaggccatgccttgttcacctcgacctatcgtaccagcgcgccggatttcttcgatttgcgtcttaattcccacagccgctgcattagattcagacgctattgccggtgcagatgaagcgctgatgatggaccctcatggtttcgtcgccagctgccattccaccaattttttctcgtatgccggggcaaactgtggacctcacacggcctgtactgctttaacggtattacccaccgcacgatcttgtcgctggcgcgccggcagggcatcggcgtgcaggaaagatcctttagccttgtcgaagcattcactgctgacgaagctttgtcaccggaacgctggcaggtattaccccggtgagcaggctcgacggcaggcgcttcgacctcaacgaaaatcccgtgacccaatgcatcagcggctggtatcaggattatttacagcaggtggagtcgccgcccaccgacaatcgccggacgaaaaaaaacccgcagagatagcgcgggtcgatttaaattcaaatccattgactgcaagtaacatcacaataaccgagcgttattttatgacttgtgtcacaaaaacatcaccccctgttcgggggggatgctaa

SEQ ID NO: 200576 - DNA, 789 bp, Klebsiella oxytoca
atgaaacacctgaaatggcgcttgtttatttttattgcttttttctcttcgtcctattcaatagccgagactctggcgctacaggccacggatattatacgtttggccgatgatattcgttcgcctaatgtacctttccgctatacggtaacggttcttgaatataaagagggtggcgaacaaccggagagtaaacaaattctcgatgtgtcaatgcgttttatgaaacctgaaaatggctcgcgggcagatgcacgttctttagttcgatttgtttatcctccacgggataaagggaagattatgctctctgattggtacgaactctggttttatacgcctgatctgcgaaaacctatacctatttcaccggcacaaagactgagtggccaaatttcaaatgcagacgttatcgtaactaattttgagtacgcctacgattctataatcgaaggcactgaatcttgcggacagaaagtctgttacagactatcactgaagcgtaaatcggataaggtaacttatccaaaggtgatatatctggtcgaaaaaggagaggatttcaggccctatcaagcatcttattactcccttgacaaccaattgctcaaaaaagtcttatataggaattatcagcagattttagggaaatatcgaccatctgaaattgttgtacagagtactagatatgctaaaggctattcagtgatgaaatatagtaacgtcagacttgaaacattacctgagtatttcttcacgaaagaggcgatgttaaggggggggcaatga

SEQ ID NO: 200577 - DNA, 5577 bp, Klebsiella oxytoca
atgaatgataacgaagactcactgtttaagaataataatctttctcttcagcaaaaactagagcgagctcgtacagagcttcttgacttatctgcgcgcaataaactcctcaatattcctcgctctaaaacaaccaaactcttagaaattatcgatgagaggtctactgagatttatcgtttactggttaaagaaggaaaagtatttacttttctaccgggacgggaaggcaagaagggggagctaattgatgatgagggcattgtatcggattcggatgatgctcttgttgatgatcggctgcttgtttttgatgatgatgttgatccaaaagcaatcagtgctgagcatcaggatacaaaactacaaacaaggctaactccgcaaggtttgcaaaagagattgttggatctttaccacgattctaaaacgttagaagaagaacagggtgtaaacatactctatctgacgctcggtaccttaaaatggattgatcccaataataaagaaaatgttagatatgcccctttaatcttgatccccgcgtctcttgagcgtggaactgctggtgagaggtttaaactacgggcaaggcaggatgagattattgaaaacctttctctggaggcatatctacagcgaacacatgagattttattgcctaagatcaacactgatgaggagctggatctttctggatatatcgatgaggttgctcaggctgtgcagacaaagtctgactggagcgttcaagaaaacgatattactctggggttcttctccttcgctaaattcctcatgtaccgggatttagatccagaaaactggccagagaatgacaatatcacagaacaacctcttatccagtcacttatggttgatgggtttgatgagagggatgaaaggatttcagatgatgcacctatagatccttttatttcgccgagggatatgctccatatcatggatagcgatacttctcaaactcttgctatccatgatgtacggaaaggaaaaaaccttatcattcaaggtcctcctgggacagggaaatctcagacgattgcgaatgtcattgcttctgcagtggcagatggcaaaactgtcttatttgttgcagaaaaaatggctgctcttgaagtagtgaaacgtcgccttgaccatgcgggtgtgggcgacgcctgtttagagttgcatagtaacaagacgaataaaagggtcttcctggaggaattgaaaagggtctgggagctgggatcgcctagaggtgagtttccagacacactggtaggaaacctaacggaggcgagggataaacttaacgagcatccagcaaggctgcacaagatatatcatccttcaactttctctccctatcaggtcatggggcatcttgttcgattacgtcagttaggccaggccccgaccgattttcatctcgaagaatttgaacattggaatgccagcgatcttgagaaacgtcttgagctcgtgaaagagattgttgatcgcatccgagatattggtttgcccgctcagcatccgtggagtggcgttggtcttgagcagatattacctatagatgtagaaaaattacttccacgtctgcaagagcttgaaagagatgtcgtacgtcttaaaaacgttgttgcaaatctgtctgctgagctttccgttacacccgtaccggaaacattctcttcaatttataaattagttgaggttgctgaatgtatcaataaagcaccagacctgtcagcggaagcctttatttctgctgtttggcatgataaagcgcctgcaatcaaacgacttgttgcggtgggtaagcagtatcagcaagcccgcttagatcttgaggtagatatagtaactgaagaaattgaaactccagttactgagctggaagatgcgctggcaaggtttcctcgtgattttcaggttaatggcttttccgccgctcttgctctggttaaacctttatctaagttgcgtcttgatgctgctcgtttgcatgaagaactcggtactcaggaagggtattacaccgttcaggaaatagaacgtcttatcaccttgggtgaaagaattgctgctgcccctaatgctagtccagacgcctttatcgcatcagtttgggatcatggtattgagaaagctgctgaactggttgagtcgattgcctccttcagaaccgttagcgaagctcttgattcccaaattaatgaggtagcttggaatacggatgttcaggaggccaggaatcttctggctagccatactggtattttccgatacctcaatggaaactggagaaaagcgaggggacttgttggttctttactgcgagatcgttcgttgcccgttgagcagcagatcttattgttggacaagttgattagggcgcaggcagagaggaaaaaaattcaggaaggcaatgattttggtcactctgccttcggtagcgattggcgtggcgaaagaagtgacagctcttctttaatggcattagttgaatggatgagaacgctccgtggtgtaggcgctgaggctcggctgttggccagccgacttatcgaccgggaaggtgtgaagctccgtgcgcaacaactaagtcagttactactgcaagttcggactcagttggacatcctatggagcgcgttcggtttatcacctgaggaatatttttccaatcaggtatctatcacccgcgtcccattagttttcattgaagagaaaatccaaaatctcatagcgattgatgaacaatgctttcgtgtaatgattaaccctcctgttcgtattgatgagcgtagccagctaattaaccgaatggttgagttgcagaaactgattgcagaaatacgtgcagaagccccgcttgcaaaaagcgcttttgacggacagtggaaagagctgtcatctgattgggattatctgagtcaggcttgttcctggttagaggagaacggtgcgttacgtttcgtagcggcaaaactgacagacaaaattgaaactgcccatattgcacgagaaactcacctgttcagccaaaagatagtcaatgaactggaacaaatcgcgacggaattaaaaggaactatcggaacccttttgggctcatcatctgataaattaatgatagcgcttgtgtgcgagaaacttcaaacatgggctgagaattcagaacaactttctaaatgggttgcgtatcagcatcgtattacgcaggctcgaaaatatggattatctgaggtagtaaaaaaactcgctagtggagatctttcgctagattctgctatttctgccgtagagcgaacctattttgagtcgctacttaaaattatggctctcgaagaacccgatttagtgcgttttgatggagagcttcattctcgtcaggttgcaggatttgcagagcttgaccttaaacgtatcaaagccgccagtcttgaggttgtgcgtgcccatcatagacaaatcccttccaggagcggcggtattggcccagtgggggttctgcgttcggaaatggtgaaaaagagggggcatctaccaattcgtcagttaatgctgaaggctggagtggcgattcaagcactcaagccggtcatgatgatgagcccgttatctgttgctcaattcctcatcccgggaaaacaaaagttcgatcttctggtcatggacgaagcgagtcagatacaacctgttgatgcgattggtgcaattgctcgctgtaagcaggttgtggtcgtcggggatgaacgccaacttccacctacacgattcttcgctaagatgacagaatctgctgctaatgatgatggtgatgaagtatctcaggttgcggatatagagagtgtattgggcctgtttgttgccaggggattacctcaacgtatgttgcgttggcactatcgcagccgtcatcaatccttgattgctgtatccaatagtcagttctatgagaataaactcttcatcgtgccgagtccgtacactcaggaagcaggcatgggtctacaattccaccacatcccggatggtgtgttcgaatcaggtggtaagggaaccaatacggtagaagctaaagctgtcgctaaagcaatcatggagcatgcccgtaaatatccggaacagtcgctcggcgttgcaacattttctgtttcccagcgtaaggctattcaggacgagcttgaattactacgccgtctgaatcccgatttagaagagttcttcaatgcgcatccgagtgagcctttcttcgttaaaaaccttgagaacgtacaaggtgatgagcgtgatgtaattatgatctccgtcggctatgccagaaatacgcaaggatacatggcgatgcgttttggtcctctgggatcagagggaggggaaagaaggttgaacgtattaatcagtcgagccaaacgtcgatgtgaggttttcgcttcgatcacagacgaagatattgatttggaaagagcaaagggcaaaggtgtatttgcctttaaactcttcctacaatatgcccgtaccggtcggatatcgttagctcaacggactgaaagagaaatggatagtgtatttgaagagcaggttgctgatgcgcttcagaaagctggttatcaagtccatccccaggtaggtattgctggattctttatagatttagctattgctgatccagatatgccagggcgatacttgattggtattgagtgcgatggccgtgcttatcattcatcacgttctgcgcgagaacgagatcgcttgcgtcaggctgtacttgaagatcatgggtggattatccatcgtatctggagtacggattggttccaccggcctgaagaacagttggaacgaacacttcaggctatagagtctgccaaaaaagagctctcagaacggactgaacaattgaagcaaaggactcgtgcggtacctgttgaaattgtgactgtcgatagaggacctgtagtcgagattggtcttgtcgattcggatattgcaaaagaatctgagattgcctatgtggaggctaccccatccgctaatatggggtatgaactgcatgaaaccccattgggtattctcagcgaaattattgagcagatagttgaggttgaatctcctgttcatgtaagcgaggttatcaccaggttgcgaactgcctggggattacaacgtgcaggggccagaattgaggccgttgtgaacagggctgttaatctggtctgcaacaaaggtgatatccttcaggatggacaatttttaatacatcagaaatcaaagattgtcttacgaaaccgacaaaatgttcagtcgttgggactgcgtaaatccgaaatgttgccacctcaagagattgctgtcggtgtttcacaggtagtaaaaaataaccttggtgcgacagaagaagaaatagttatgtctatctctagatctcttgggtttaaagcaacaagtgggaccttacgtaaagttatttcagaggtaattgaacaacttctctttaaaggcgttcttctaaaagaagattctctgattattgagagtggaaaaacagttatagtgtga

SEQ ID NO: 200578 - DNA, 252 bp, Klebsiella oxytoca
atgtcccttactgacagcaaaatccgcgctactaaaccttcagcaatcccctttaaactgaccgattctcatggtctgttctgctcatcaatcctggtggctcgtgtctctggtatctcaaatatcgttttaacggcaaagaatcccgcattgcactggatgtctattctgtcgtctctctgtcagaggctggctactaaacgcagctcacgcacgccggaaatagcgtttaaaactgtggtgctggcttag

SEQ ID NO: 200579 - DNA, 909 bp, Klebsiella oxytoca
atgaaaaataaatcaataaataaaaaaagatctcagagaactaatgtgagagttccggaagcatattttgatatacaaagtgctgccgaaaaaagttggctttcatttagacaggcgcattccaatggcgatggatttatatctatagatgagcttgattctattgctactcatctctatacagttattcataaatatgggtttaatggtattggaacattagatactgttagatctttattggatcaggccagttccgatggtagggatatcttatctttttttgattttattcaacgtattgttagttatgaactagaaaataaaattgatactactcttaatgaaatcaatgtgtatctgaaagacctttttaaaagaaaaatacttgttgagcatgagatgttatcgtcttccattaggaaggttctagatcaaaatgaattttgtctatttgatgaaagagatataagaatcattagtaactgctgtgatatttttggcgagaatttctcatgtgagtatgctgcttattctttagtcaaagagtctgttctaaatcgagtcattttattaccatataaaaatatattgattgagttttttagagatgcaagtcatatatattctgagagcatgcgacaagatgttgaaagtaaatcatctttaaaaaaaggagcaagaaataaagaattatattcatatgttatcagaattgtagttgctactttgcataagcatccaaatgcttcaacttacgctcttacaagagagcttgataaacatctagcaaaagagaaacgtaaggtctcgcctcaaacgctaacaagatggatcgaagcgcatcggaaagaaacggggcaagagtctcaagggaaacatgaagggtatttaaagcttgagttgtaa

SEQ ID NO: 200580 - DNA, 192 bp, Klebsiella oxytoca
atggatattaataatcgtatgactcgtaaagaagccgctaattatattggtgtttcaactgctactatggctaattgggcctgcacaggaaaagtaaaactcccttattataaagcaggcttaaaaaaagttatttaccttaaaagtgacctcgatgagtatatcaagtccactcgccgcgaacaggcgtaa

SEQ ID NO: 200581 - DNA, 207 bp, Klebsiella oxytoca
atgtttaaactgcttatcaccctgattaatcacgaagctggtgaccggcgcgagctggttcacaatggcggatataaaacccgcgaagctgcatggaaagaagcgcagaaaatggcatatatccgtaagaattccatcggcaccattacgcatgaatgcattgtggaaattgcggaggcgggaaataactacgccattaatcagtaa

SEQ ID NO: 200582 - DNA, 372 bp, Klebsiella oxytoca
atgtctcgtaatgaagtcaacaacaatgatatttctcgattagggcagctatcttttaggcgcgatttcataggttttatgaaagaggatgataatgatcgtcttgtaagtgtcgtcaacatcatgaaattaatggaggagcttattcactccaaagcatattccggtgaacgagataatgatttatccagtgaaggattagccggattcttctttctcataacagaagaattaacacggattagaaatggaatacattttcatgaaaagattttctccgagtacgaggcagtagcaggagtggaactggtgaatctttatggtactgaatcgattataaaaatgatggaaaaggaaaaagaccagcaataa

SEQ ID NO: 200583 - DNA, 1089 bp, Klebsiella oxytoca
atggcaattaagaaactcgatgatggtcgatatgaagtggacatcaggcctgctggtcgcaatggaaagcgtatccgcaggaagtttgataagaaaagtgaagcggtagctttcgagaagcatacccagttcaaccaccacactaaagagtggttatcaaaaccgacggataagcggcatctgtctgaactgatacagatttggtggaatttgaaaggcaagcacgaggaacacggtcggataaaccgcaacaagttagacctgttttgcaggattacctacgatccttgtgcttttcagataacgaaagccctgatcagtcagtattacgcgacaagaagaagtcagggtattaaagcttctactattaaccgtgacctcaatagtatcagtggcatgttcacagtgcttatcgaggctgagttgttctcgggtgaacatccgattaggggcaggaagaagttgaaagaagaagtacccgaaacgggttatctgacagagaacgaaatcaagcacctgctctttagactggatggcgacaacaagaagatagccgttctctgtttaagtacaggtgctcgttggggcgaagcagctcgactcaaggctgaaaacatcattcagaaccgtgtgacgttcgttaaaaccaagagtaacaagcagcggactgttcctgtatcagcggaagtggcaaaactcatagcggaaggtaggcgagggttgttatttggtaaggcgtcgtattctgacttcaggcagacactgagggaggtaaaacctgaccttcctaccggccaggctacgcatgcactacgccacagctttgcgactcatttcatgattaacggagggagcattatcacgcttcagcggattctcgggcactcgcgaatagagcaaacaatggcctatgcacactttgcgcccgagtttttacaggacgcgatccggtttaatccgctgacggctatggtcgataaggacaacggaagtcctttactggttgacctggcgtgttggtctgcttgttcacatgcagcactgtcagaactggctgtgcccgataccggcagacatggttatttatga

SEQ ID NO: 200584 - DNA, 1572 bp, Klebsiella oxytoca
atggcatcactaagtaaaataacaccatctagtccacgtcttgcttcattattgtctgatgttgaacgaggtaatataaaaataccggtgtttcaacgagagtatatttggacagatgaacagatcattagtctgttggattctatatacagaggatatcctgttggttcactcttaatgtggtctacaagagaagagttaaagcatgaaagaaatgttggagggtttactttaccaaatacccctgaagactatccggtgaattatatactcgacgggcaacaacgtcttacaacattatacggagtttttcactctgatgggaacacttctgatgcagagttagctgatcgattcaatatttgttttttgcctgatgaagatatatttgttcaccatacaggctcaagtggaaaaaataaaattcatttaaatacaattttagatacaactaagcttctcattgaattgccaaaatttaatgatgaacaaaaaaataaaattgcgaagttgacggaagcatttaaagattatgaatttccgattgttaccattcgtgaacgaagcaataaggaagtatgtagcatatttcaaagaattaactcatccggaactcctctgagcaatcttgagctattaactgcttggacatggtcagatcagtttgatttgaggcgggaaattgaatcattactagatcgtttgagagataaaggatatgaagagatagatcaatcgatgctaatgcggatgttgtcatcattagtatgcaagtcaattgattctgatgatcttgttgatgttgagccagataaactagttgatggaatgaaaactctcaaaagatcaatagcttcagcagttgattttttagaagggcagcttaaggtaaagaatattgtttttttaccttttccaataatgatgattcccattgtcaacttttacgctctaatcgagaagccaaactcaactcaattaacacagattagaaaatggttttggcaatgtgctctgactttaagatacaaagctggcacaaatcggttggttttagaggatttagataagataaaacgagtttcattaggagaaacgccatttgataataatcaccccactgtaaaatctgatctgttcagtagttcttggagaataaattctacagcagcaaaagcagctttgtgtttgatggctcaattaagaccgaggtcgtttttgactggggcagaagtggatttaggaacagtgttatcatcctacaatgcgagacagtttcatcatatatatccaaaagcgtatttggcttcaattggtgttacgtttcatgaagcaaacatcatagctaacatttgttttctttctgcctcagagaataattctatcagtgataaagcacctgtagattattttaaagaaatcccagatgaacataaaaaagaaatttttgaagttgcgttaatacctaatgaggcttggggtggattgttatcattcagggagtttataggattacgtacgaataaattacttgaaaaaggacaggttttaattgaaaaaggctatctatag

SEQ ID NO: 200585 - DNA, 195 bp, Klebsiella oxytoca
atgtttcgttgtcctttctgcggcgcaatggcccgcacccgtaccagtcgccgtctgagtgagcacacaatacgccagtatcatcagtgtcagaatctggaatgcagtgagagtttcaccaccctgaatgcttttgaacaccgggtcagtcgtcgtaactccccggccacgcctccgccagcagcgggaagttga

SEQ ID NO: 200586 - DNA, 234 bp, Klebsiella oxytoca
atgtacagcccggcaagaaacggtaaatcggttttgcgtgcagtcaggatcccccacgaactggatgagcagatccgcagactgtgcgagcaacatacactcacctattcggggtgtgtgataaagctggcccggcagggtatggagtattccttcaacgacagccccggtcgctaccgaagcctagataatctgataagtgatgtgctgatgcgtggagggaggaaaggctag

SEQ ID NO: 200587 - DNA, 723 bp, Klebsiella oxytoca
atgaaaatgacacccgagcttacccggctggcagagagcgccacgacgctgcgccgcgaatttgacgaggcgaacggcccgctgaaagataagctggacacggtgcagaatttgcttgatacccgtaaaaaactggaagaagaagcaggccgacagtctgacggatgggagcagagcctgctggcgtccggtggcgttgaaagtgagaactctgacaaagcctcgttacttgccagcctggcaaaagagaagctggggcgtatctctcccctgattgaggccgcccgtgtggaggcgcttacgctgcgttatagcactgctgaaaaggcccggcgttatgatttcgcctggcatgaactgtgttctgcactcatccggcctgagtgtgaagccctgattaatgatctccgtgaatcgcttgaaattgttcgagggttgcttgtcctgtcccgtgtaccgacccatgagcttgataatttgctgactgcgttgatgggagacattgcccgggagaacaatcttgacccggcacaggaatatctggcgatggccgagggtgatacgggaaatccccttcatctctggccgggagcttttccggctgaggcgagcgccgccattcgcctttcgccatctgccggacaaatggcgctggcccggaaagatacagcattaatgcaggcgctggccgaagggcgtgaaccctgcaaagggctgaactga

SEQ ID NO: 200588 - DNA, 1263 bp, Klebsiella oxytoca
atgaactttaatgagaaaatccggcgcctgattaaccgtaaccgacaggccgcgcagaacgcctcaccccgaatgaaacaggcgctggaagaggaaaatgtaaagctggaaaaagagatatcattgcataaacagcacccgggcgcacccgctgacggcgcgaaatattttgtgaacgcggaacccgcagcacgggatatttttgcaggcctgcctgtgcaggatgtgaaaacaaacgaccctgcgacggtgatggatcgtgttatcagggaactgaccggcatggagtcacaggcgctgaacttttcagccacttcgggcagagtgtcattttcagatgtcggagcgtcgcctgttcaacacggagaactggcggccagctatggggctgatttcctttcgcggattaacgtcattccggttacggaatcctccgcaacagtggtgagaatgggatcgcgcggcccgcttgccagcacaaacaacggcggcatacgtagaaatccggtagacagcacatccagaaagcctcatcagtatcattgcaggaaggtcaaccttgacgcacagatctcctacgatgaacttgatgcgtggagccatctggataattacccggaactggtgcgcgccgcggtagagcggcagagaaatctggatcggcttatgattgggtttaacgggacgcattatgccccagtttcagatcctgcactctgtccaaatcgggaggattgtggggttggctggctggaaaaataccgtcaggaagcgccggaaagggtcatggacgggctttcagtggccggacgtgatgaggataaccggatcatagcttatggcgactacggcacgattgacgcgcttgtacttgatggctggcagtcaggcatcagtaagcaataccggaatggactggtggcgatttgcagcatgagtacgctgtttcgtaaagagttcccttttgtcaatgcggtctctcccaatcagcccaatatggagcatctggtgaatgagctgcttctgaagaatccaacgctgggaaatcttcccgccgtgcccgtcccgttctttcctgataatgcggtgtgggtcacatcactgagtaacatcgcactatactggcaaaaaggcagtataagaaaacgggctgtaaatgagcctcatttaaaccgtctggcggtttacgagtcgtggaacgaagcctatatggtggaaagatacgaggcgggatgcctgattgatggcatcgactggcgctga

SEQ ID NO: 200589 - DNA, 1839 bp, Klebsiella oxytoca
atgactatcaaacaaactgaggaaatattagattctaatatacataattacttaacgggcactcaaaagcatagtttccttctttatgctggagctggctctggtaaaaccaggactttagttaatattctggaaatgattttgaagagtcactcagaagagttcaggctaagaggaaaaaaaatagccgtgataacatacaccaatgcggcttgtgatgaaataaaaagaagagttaaattcaacaaattaatagatgtgtctacaattcatagtttcctatgggagctaattaggcatcactccagtgatataaaatcttggttaatggaaaacattgctgcggagatagctgatttaagggacaaacaaagcagaacaactagagtttcacaagcttctttagaaagagaaagaaaaatagtttccaaagaaaaacgtctgcaaaacttatcagatgtatataaattcacatacaaccctaccggggataatagaactaaagactctctaaatcattcagaagtcattaaactcggttcttattttctagacagaaaatatacaatgcagaaaatattggttaatcgccatccaattcttttaattgatgaaagccaagatactaacaaactgctaatgaatgcattactcgaagttgagaaaaataacagagatacattctcggtgggtctgttaggggacatgatgcaaaggatatactctgatggtaaaagtgatttagaggcatgccttgacgaacactggaaaaaacctgaaaaaagtattaactatcgttctccaaaaagagtggttgctttaattaatttaattagaagtcaagtggataatcataagcaaaaggccagagaagatgccgaggaaggatatgtaagaatttttataaaagaatgtcattctgataataaagatagagatgaatcgtttgtaaaaaaaagaatgagagaaattactttagatgatgattgggaaaaccatgattcattagtaaacaccctaatattagaacatcatatggccgcaacacgtatgggttttatagacatgttcactcctctctatcaaattgagcgattaaaaactgggcttttagagggctctctgggtaatataaatttcatttgtggaattgtttcaccattaatatccgcctgtattaaaaatgatacttttactatcactaacattttacgaacaaatgcacccttattaaaaagagaacatcttttaaaaaacacaaataatacctcgccacttacacagatcagaaactctcttgatatgttaaagagttttatttctacaaaccccgaacttatcacaattaatttactacataagataaatgaaataaaattacttgacgtcccagattctatacaagaaatcctagaaagtaacaataactcacaagatgatatcattgaagcttggcagaaagcgtttagctctcctttatgtcaatttgataaatattataattatgtcaaagggaagacaaacatcgatactcatcagggagttaaaggtctagaatttcctcgtgttctagttttaattgatgattctgaggctaaaggttttatgtttagttatgacaaacttttcggtgttaaagaaaaaaccaaaactgatttagataatgagaaagaaggtaaagatactagtgaagacagaactagaagactattttacgtcacatgtagtcgagcacaaaaaagcctcgccattcttgcttatacagataatacagaaatgctaagaaaaaacctactacataaaggatggtttgattcgagtgaaatagaaataatttaa

SEQ ID NO: 200590 - DNA, 2265 bp, Klebsiella oxytoca
atgaaaataaatttcattgaaattaagaatttcagaaagttgaagtctgtccgcatagatattgcagaaaaaaccactctctttgttggtgctaacaatagcggtaaaacggctgcaatggaggccttaggacatttcctcgttgatgcctcgcggtttagcgtaaatgatttgacactttgcaattgggcaaaaataaaagatatcactgaacaatggttaactgaggaaaatatagaccttgctaaatcacaggaagctttctcagatctttttccttgcatggatatttggatcgaagcgaaagaaaatgagctccaatatgtcaatcatatactaccaacgttagagtggaatggaggtttaattggagtaagactgagatatgaacccaagaaatttgatgttttctttgaggacttcatatcttcccgccaaaattcattagatatacacgaccgaatttctgagcggattgataaagaaaattacacaatagcattgtggcctaaagatatttatgaatatctttcaagaaagttgaactcaatgtttacaattaagtgttatagcttagatccttcgaaattagaatcatctgataatggaatagccaaaccccaaagaatagacagtcagcaaacattacttgatggcatacctctcaaagatctaataagaattgatgagatcaatgcacaacgtggctttggaagcccctctgctgccgacaaagagaatagcaaattaaacacacagttgagagattattattcgaaacatcttaacccaatagaaagccctgaactatcagatatcgaagctctacaagccattcgtgatgctcaggatacatttgatgaaagattaaaaaactgtttctcccaagccataaaagaagttgaaggcctcaactatccaggagtaactgatcctaaactaaaaatctctacaaaaatagaaccaattgatggcttaaatcacgactcagcagttcaatatgagttaactaatgctttaagcaatgtatctttagactatttaagattgccagagagttataatggactaggttatcaaaacttaatctcaattgcatttagactaatggggttcagagatagttggatgaaagttggcaaagctacaaataaaaaattagcagacgacaatcaagaggattttccagctcccctgcatttggttttgattgaagaacctgaagctcacttgcatgcacaagtgcaacaaatcttcattaggaaagcatatgatatattgaggaatcataataatttaggcgataaagaagagcttcatacacaactcattataagcacacattcgagccatattgcccacgagtgtaaattttcttctttacgatactttagaagaattcctgcttgtaaagaacatgagatccctgtatcaacagtaatcaatctttccaatgtttttggtgtaaatgatgatacggaaaaatttgtaataagatacctaaaggcaacacattgtgatttattctttgcagatgcagtaattcttgttgaaggcccagccgagaggattttagttcctcacttaattagaagacactaccctttcttaaatcaaagctacattaccttattagagattggtggtagccatgcccatcgactaaagaatctgattgttagtttgaatcttttaactctaattattacggatttagaccctaaggattcacaagatggcaaggttaagccctctaagaaaggcagcggtttcgttacaagtaatacaacgcttgcaagttgggttccagaagttaccggtgtcgatgaattgtataaactcacggaagataagaaagaaaagaaatataatgatttcttttatgtttactcagcttttcagattcctgttttggctgcattcaaaggtgttaaccaagaatttttaccaaacacgttcgaagactcattagtctacaataatctagattttttcagtaatcttactggtaatggtttagtgaagaaattcaaagcatcaattactaattgcaaaaatgcagaggaatttggagaggaatcatttttacacttatctaaaggtaataaagctgaatttgcattagatatactttaccatgacgaaagcgataaattaaacacacctaattatataagtaatggtctaaagtggctcgaagaaaagataaaaataaaacaattagagcttgtttctgatttagccagtgatggagaaaacaaatga

SEQ ID NO: 200591 - DNA, 1398 bp, Klebsiella oxytoca
atgtcaactcaggccattgcttcagattacgccgttgccagcggaacggcgtcaaccccggacgcgctgctggcaagactggaacgtctgcccatcacccggcggctgaaggcgatccgcgttatcgtcggcttatcaacgtttttcgatgcctataccattattgctatcgcttttgcgcttccccagcttactcaagagtggggcctcacgccgacgtttgtcggtcttattattgcggccagctacgtgggtcagctgtgcggcgccctatttttcggctcgctggcggaaaaaataggccgtatcggcgtattgcgtatcaccatcatcatgttcgtcctgatggatgcggcgtgcctttttgcctggaacggctggtcaattcttgttattcgctttttacagggggtgggtatcggtgcggaagttcccgttgccagcgcctatatcaatgaatttgtcggagcaaagaagcgcgggcgtttctttttgttgtatgaggtgattttccctatcggcatgatgtttgccggtctggtcgggtattttcttgtgcctatctatggatggaaggtcatgtttttaattggcttagttccctcagcgctgaccgttccactgcgctggctgatgcctgaatcaccgcgctggctggcttcaaaaggtcggctgaaggaagcggacaacgtcgtatcgacgctggaatctgaagtcatcaggcgtggaatgacgttgcccgaacctgaaataaaagcccccgcggtgcaaaaagcggctccggaaggggttaaggccctcttcggcggtatttataaatcccgcacctttatgctgtgggggctgtggctgacggtttacagcgtcaacaatggaatgatcacctggttcccgactctgtacaaaacctggtttaacctctccctcgataccagtctggcctacggctggatcacctcttcctgcggcgtcgtggcttcggtgatctgcgccttgatgatcgaccgcgtcgggcgcaagcgctggtacacatgggcctttttactggccgtcgttccgctgattacgctctccgttctgggcgcgaaatccgccgttgaaattctgattctgggcagcctgacctacgccattctgcagaccatcgctttctcgctttatctgtacgcggctgagctttatcccacccggctgcgcgctattggcaccgcgtactccagcgcatggctccgcgcggggtcatccattggcccattaatggtcgggtttatcgtcagcggcttcgggatccgttttgtgtttgtcacgttcgcggtcatcgcactgattggcggcttgattacgtggatttttgccattgaaaccaaagggaaatcattagaagagctgtcgccatag

SEQ ID NO: 200592 - DNA, 198 bp, Klebsiella oxytoca
gtgaaagacagatcgcatgatgcggcgatggccgagcacttccgcgccgatccgacctatgcagcggagctgctggccgaagtccgccgcgacggcaacccggccgaactggccattctgttgcgtcagatggccacggcgtcggcaggggatgagaggtcggatgactccgattcagagcgcgctctacctctctga

SEQ ID NO: 200593 - DNA, 1548 bp, Klebsiella oxytoca
atgggtgataagtacgctcttgccggcttcgcgaacagtgtatggaatgtttttctaagacaacggttaaaaccagatcggacaattatttttgatgatttagaacgcagctccttatgggcaaatcaaaagagtgaattactgggtgcaattaatcactatgtagaacatcgcggcttccgcgttatagttatttgtcacgatgagcgcatagctgatcaactagccgagcttaaggaaaaaacatttggccatactgttatggtcgaaccacaaattcatgcggctttcgaagcgtttctaactgatattcaagataaaattgcacaagattttgtcaccaaaagaaaatcaattatcgaagaagtttggtcgcaatccgagcagtcttctttgagaattctgaaacacgttatcaacgatgttgctagacttcgtttaataatgaaagacaggcatctagaaaataaagaagctatagagcacattataaaatttttctgcgccttggatatagaggtgcgtgcgggaaatttaacgcgagatctactccttgaccggatgaaactacatatcgcggagaggatggatcgcaacaatcaagacaatattcggccattaagtaaaataatttcaaaatattcatcatctgatattacaggctcagttctgagcgatgaaattttagagtcaaccctcatagagggtagatttgattctgaaatgcttgcagcatggctcgatcaaacaccttattttatccaagcctcagatacccctccgtggctcatagtaatgaaattcgatgagctcgatgatgaaattattaaagaaggcatctctcggatgcaacagcagttcgatgagcgtgccgtaactgaaatcggagagtttcttcacatcgcggcacttcggctaatgatggttgaacagggcgttattgcccactccatggaagaagaaacatcactctgcaccgcgtatattgacgaccttttagcgaccaaaagaatgcctccaaaacctttggaatactcatttgagaggctatttgaggcttatggtggttatggttattgggtttcagaggttgcgagaccacatttcagggccatttgtgagcacgtggaccaagcgcggcatcaagcgctggaggccacttatccaagtcatgccgcagaaattttgcgtcagctcaaagaagatcaagcgtctatttttaagacaatttcaccaacaaactctggaagcaacaccctcgcgcatgttcctatcctcaatcatatacctgtaaattctttcttggacgcttggcttagcggtccgcgcagtggatggcgacaaacaactatggcactcgacaatcgatatgaacatggtcaactcgatcggaacttgagtaccgaaaggccttggttaattgacctagagcgggaaatgaatgcgcgaatagataaggagactggtctcgacgcatttcgattgaagcgaataaagccaaaaatatttagtgagttacaagaaatagaggcgccagatcaaagatag

SEQ ID NO: 200594 - DNA, 210 bp, Klebsiella oxytoca; identical to SEQ ID NO: 85389

SEQ ID NO: 200595 - DNA, 225 bp, Klebsiella oxytoca
atgaagacagctcaccgcatcagcgcattggccaatcaactcaacgaactgcaagcctgcctcggtcgagccagtgggcggcctagcaagagcgttatggaagcccagcgcatagcggccgagctggcttctttactcgaagattggcaccttgaaacgctacacatccctgaaccggagcgtgacctctatcgcgtacagaatccctattacacggcccactga

SEQ ID NO: 200596 - DNA, 792 bp, Klebsiella oxytoca
atggaaatggaatcgcaaaaaacgtcgacttatgccgcccgaaaattcggtcgaggcacggcgctcgctctggcaatggcaagcgcaggccttggtgtaagtctctacatggcaccggctccggcctatgccatctactgctcgaactgctcgacgttctatcagcagatgtacgagtacgccgaagcggtcaacacgcaactaaacaccgcgcagcagttgcagacgcagatccagcagtacgacaacatgattaagcagggcatgtcactgcccagccgcatgttcaacaccatcactggcgaccttcagcgtgtagtgagcgtctatagctcggcgcaatcgctcggccgtaacattagcaatctagatgaacagttccgccaacagttcaagggctatgacagctatctgaactcgattggccaaggacagaacaacattccgcagcgctatcgggattggtcgaaatccggcttcgataacgcccgcacggccttgcaggccgcaggcgtaaataccagcactttcggcgatgaaaacgcaatgctggatcagttggtaaaccgttcgcagtcggccgttggtcggcagcaggccattcaagcagggaacgagattgcggcgcagaatgtgcagcagctccagaagctgcgcgatctggtggccacacaaatcaccctgcaaggcaactacatggcgcagcaaaacgaacgacagtccgttagcgatgcctccgaacagcaattccgcagccgtgaaaatacacgcggcccgtctgaggggttctaa

SEQ ID NO: 200597 - DNA, 183 bp, Klebsiella oxytoca
atgatgatttctaaggcgcttattgccgccctctgcctcgtctcggcccttggtgggtcggcaatgacggccgtagtcgtcacgaacaccgccgcgccggaatgcgcagcggtcggcaatggccatcaggatgaccaattccgcagccgcccaaacactcgcggcccgtctgaggggttctga

SEQ ID NO: 200598 - DNA, 1644 bp, Klebsiella oxytoca
atgcgatgttcaaccgttttcgcacttgtcggcgcggcgctcttgctatctgcaactagtgcgatggctgccggggtcgatttggcgcagagcaacacgtctatgaacagccttctgcggctgattcagaacgcttcaaaccaatgggcaccgcgcctgcatgactacgccttgtggctcttgggatgccttgccgtcatccagttagtttggacttttgctcctttggtcatacgcggagctgaactgggagacatcctccatgagctggtgaaattcatcctcgtgatagggttcttctatgcgatgctcgagcacgcgaccgagtggggcggggccatcgtcaacagcttccggcaggccggggcgcacgcggcagggttgggtagtgcggagctgatgccgggggatatgttctcaactgctgtggacttttcacggcaggtgctgacggccggtgtgtcgatgtttagcccaatcacatcggttgtagtggccgtgtctgcattgatcgttctaatgtgctttacgttcatagcggctctggtgttcgtgacgctcgtagaggcctacgtcattatcaatgccgccgtcctgttcatgggtttcggtggctctcaatggacacgcgaatatgcactggctcccattcgctatgccgttgcggtaggtgccaagctgtttgtcctgactctgattgtgggtctgatcatgcaggtttccgcagaatggtcggcagcctacaccaacgacgaagcgtcgttgatgaccttggtcggcctgtctttggtgtgcgcttacctgaccaaaaccatccctgaactgatcggcggcatgattagcggcacgtcgatgggcggcggctctgcaattgggggcatggccgcagccggtgcagccggtgcggcggccgcaatcgctactgttgcaacagctggggcagcagccccgactgctggagcactaggggccgcgggaactggcggaggcgctgccagtgccgcgggtggtggactggcctccgcattgaacgccagcatggcaggcggcagtaccgcagggggcatcggtggtgcgacgggcgtcggcagcgctggaattggcgcaagcacaggagggggcagcggtgcgaccgcaaaggccgcaggttctcgcgtcgggggtggtgccgcgtcaggatcggtaaatccagtgtcggcggccgcttcgcctgctagccaagaatcaggcagcagcttgaagcaagccgccaaacaggccggaaaagctgcgaagggtggtgacgacgatatggatcagcaagccgtcgcgcagcaacggcagatgacaccaaaagaagggactggcggcaacggcaaggctgttgcgcagggcgccgaggtggccacacgggcgcttggcgtgctgggcgctatcagcgtacccggcatggaaagctcccacgggctttcgcttgggggcaccggttctccccctccagtccccggcggtgacagtccaacgcctgatgacggcgcggagccgactgcacaagcggaatccaacattattcgtccggcatcggacaccactagcaccggagacgtcggcgcgctcaatgtgcccggcatggcttctagcgttaactctcaatcggagacgtaa

SEQ ID NO: 200599 - DNA, 327 bp, Klebsiella oxytoca
atgatgaacgatatattttttggcctgatgatgctcggcggcttttttgttctcggtattggtatgtgggcgcttggtcaatggctgcgacgcaaaggcttcggcccgcagctcgatgcactggataagcagtacacggcactacagcatcgtgtgaaccgattggctctgcctgccgctgcgcatttctacggcggcatgggtatgcttaatcgcatgccacttttcggcagcaagaatcaggtggtactggtagagcgtgtgagaatggccatccttcagatggaagaggaagaacggcagcgaggcagggtcatcaatcgctga

SEQ ID NO: 200600 - DNA, 297 bp, Klebsiella oxytoca
atgatcgagctaataaaaaccgacctattcgaccgctggcttgtcggccttcgtgatcgtcaggcccgagcgaggatcgagacgcgcattcggcgtttgagccttggcaaccccggcgacgtgaagccggtaggcgaaggcttgtcggaaatgaggatcgaccacggccccggctatcgcgtctatttcatgcggcgcggccccttggtggtgctgctgctttgtggaggcgacaagagcagtcaggaacgggacattgccctagccaagaccattgcagcgcagtggaaggagtga

SEQ ID NO: 200601 - DNA, 315 bp, Klebsiella oxytoca
atggaagtcaaattcagccgctacgatacagcggactatctcaagaccgaggacgatattgcggcctatctcgatgccgtgatggaggacggcgaccccgcactgatcgcggcggcacttggagacgtggcccgtgcccgcaaccttagccagcttgcccgcgacgtgggaatgagccgccaagggctggacaaggccctttcaggcgatggcaatccgagcctcgcaaccgttgtgaaagtcgctcaggcgcttggcctgcggctcactttcaaaccaacccacggcggccccgcaccggccgcaggagcctag

SEQ ID NO: 200602 - DNA, 753 bp, Klebsiella oxytoca
atgagcggtggtaatgctgtgacccccaccagtactagcgcacaggcgcgggtaatgctctatcagcctagccagcgcccgcgattgcgcgagggtgattggacagacacatcatttggccgctgccgcgtggcaggcaggctaggccagaggcacgccgatattgtggaagcggtcctgtactgcgcagaacgtcggcgccctgtctctgacggcggcgtagagctgctggtagaccccgctcgggtgagaaagacgctttccgacagccgctacagctttacacagattgaaaagctgttggccgagctgcgagcggcgacgatcacaattgagacgccacaattcgatttcccaataatcgggggattgattgatcacgttatcccatcgcccatgacacggcctgatcccctaactgggggagagcggaatctgtggagagtgcgccttggcgtagcgctggtgatgctgcttgagcatgacttgagtctgtactacgacccagctcccattgcccgcctacagcatggcatcagccaagcagtcgcaagacacgtcttgagccacaaaatagagccgacaggcggttggtatcttgatactgttatcgtggccgttgctgggatcgtgccgagcaaagcaatgcgagatgctcgattcaggctgagagaagatgccggcgaattgaaggcgctcggcctgattctagatggcgaccgggtgaggaaaaaaggtactggcgacgcctaa

SEQ ID NO: 200603 - DNA, 210 bp, Klebsiella oxytoca
atgcaccaaaaaaacataacgctcatcgacaagaaagcattgctggcaatgattccgctggcagagcgggcgatcgacagacttgaaaaagaaggccaattccctcgccgcatggcgcttaccaactacaaggtcgcttgggatttggccgaggtcgaggcgtggattgaatcgcgccgaggtggcaaagctcatcgaccgggggcctga

SEQ ID NO: 200604 - DNA, 999 bp, Klebsiella oxytoca
ttggttataatggttgacatgaaaaaaagatcaaccattaccgtctgggaaggatgtgatccaaccattgcagacgccatcaagcaatttgagagtcgctgggagtcctactccgagtcagccaagcgttaccccatcgtgcggctgattgaagaactcattgatcccgccgtagccgcttattcggcaatgcttccctcgcgctatcttgggcacatacctggagccggaacaggcgtccgctttagcgagatcatgcaattggtggggaccgatgcgatggttcggttacagcgccagttgatacgagcgtttgttctgacggaggataaacagaccgaaagagaccaacaatttatcgcaacgctcgaaacgatgatggagttggtatgggcaagtaagcgcaaacaaccgaaaaaaagagacgtgcgcggactgaatagtcaacgcgtacaaggcttctgccgattttgcggcgagcttgcggagctggcttcattcgcgggtgggaacgggcagcgcggtccagatgaacaactgcgactgagcaacctgtactgtgctgcccatcgacccaaattgccggatggcgcgtggaaccccgcatacagtcaagcgaaacgatccgtggcgcagttcgatctcgaactaagcaggcttagccttcaatccgcgaatctccgaacgcctttggcaacttccggcgacccactcatagacagctacgtctatcactatgtccgcaaatacggccttcaaccagctgacgaaccagaattgcggcatcacgcaaggcggatggcggacatgaaattcacagatcagaaaaagagaatcgtgatgcttcagcggtatagcgtgagtcagtccgagatttctaggatgctgcggatcagtcgccaagccgtatccaaggctcttacctcgatccccgcgctgttccgcgaacttccgacattaagcggctttccatcctatttcttgcgtcaactagaatga

SEQ ID NO: 200605 - DNA, 1707 bp, Klebsiella oxytoca
atgagtcctgtacaacagcgcggactggcgctatgggccgccctgctgagtgccgtggtctgcctgggttttctgccgatcacccggctggttgcagtgctcgttctgctggggatgctggggcttatcctggcgttctggactgtcgccagccgtcgtgtgcggcacgatcttactctacttctggatgacctcccggaagccacttaccgacagcccgtggtgctggtctgtggcgatctgtcgcggggatgtatgccgcagtcaccggtgctcactgtcgcgcagggatgctggatccgcgtggaggatcaccagagcctggagcaggtagcccgtcaggtactgtggctgcgccctgactggggacgtcagctgtcggtgatggtcagtgtctgtccgcagcaacatccggacagcgaagccctcaccagtcgcctgcttgccctgcgctggcaaatcagccagctgcgtaaagcaaccggtcattctgtgccgctggtgctgaaggggcaggttggcagcgcgatgatgaatgacatgatctggcaggccgcggtcccgggagaaggggtgagaatctggcgggagtcttcagccccggggtcagtcgctgcatgggtcaccgccggcggaacgccagcgatgcagccgcaggtgctgatgaactgtctgatgaactggttccatcagcacgtccaggctgtctttatggataacaatcccgatattccggtcatcacacctgccaaggtgctgtggggaatggggccgatcctggccggaagtctggccacttcggcctggacggtgtggctttcccgtcacacggcgatgcagcaggtgaccggctggcagccggtgggaacggacagtacggtgatttcccagttcccggattttattctgccgctgctgccggaagggcgaggcctgacaccgcgtgggcgaacctggcggtatgcgcacgggctcttcacgctggcggccattgctgcgctgctcagcagtggctggaacaatcgccagctgctgcaacgtgtgagtttcgatatcgcccgttatgaccgtatttcgatggatgatttcggagcaaaagctgatgccgttgctgtcctgcgtgacgatgcggcagagctggatggtctggcgcgcaatggcgtaccggtccggatgagcctcggtctgtatcagggggcgcgtctgcgcatgccggtactggatgcgatccgctcgtatgtgcccccgccaccgcccccgaaactgcagccgaatccggtaccgaaaattgtgcgcctcgacagcatgtcgctgttcgacaccggcagatacgaccttaaaccgggttcgacgaagctgctggtgaactccctggttggcatcaaggcgaagccgggctggctaatcgtggtggcgggtcacaccgacagtaccggcgatgaacaggccaaccaggcgctgtcgctgaagcgtgcggagtccgtccgcaactggatgcgtgacaccggcgatgtgccggaaagctgttttgcggtgcagggctatggtgaaagccgccctgtcgcctctaacgacacgattcaggggcgtgcccttaaccgccgtgtcgaaatcagtctggtaccgcaggccaatgcctgtcagataccgggccacacccaggcgtcatcgcaggatgatggcgcatcacaacacaaaggagagtaa

SEQ ID NO: 200606 - DNA, 300 bp, Klebsiella oxytoca
atgaaagaagaattattttacggcccccccaattggggggaagatagggagcatgacgaaaaattactctactggatcctgcatttaaatagtccgctaaagtgcgtggttgatgctaatactgagccaaaaggttgggacagcaatgttcagctcattgttagcggtgacgattataaaactaaacgcaatttacttaatcaccatgtcactgtagatggaaaaattatgcttgctatcacaggttatcatatgacttcagttttattaaacgacaccagctttaaatcaacagaataa

SEQ ID NO: 200607 - DNA, 1599 bp, Klebsiella oxytoca
ttgaaatttgcacaagctctcagcattctctcaaagtcttcaccgtatgcggtcagtaccgagagagagcactatcaagatcacctcgttggattcaagagatacatatacatcacgacagatatagaagcggattttaaaaaagcactcctatctgctaagtccaatcaagtcatcttcctatgcggaagtagtggtgatggcaagtctgagatcttgacgcagtacagccaaaagcacaaagtgactcatgacttccatttggatgcgactcacagcttcaatccaagccagacagccattcaagctcttgatcaaagattcacccagttcaagcaaagtcataaaccacttgttgtgggtattaacgttggtatgctcggcaattatgcagaagaaggttccaaagagcatagcgacatcaaaaaggtgctcagagactttctctctcgtaagcgatcagcaattccaaagcagtacgtattcttggattttgaagactatccaaaattcaccttcaatgctgagggctgtgcatcagactttgcagaaaaatttctaaaaagattgacagcacaaacgcttgagaatcctttctatgcgctttatgacaaagagctcaaatctctaggtcatactcgcctgacggcaaactatgcgctgctgagtcgcccttcagttcaggaatctctgatcggcttattactcaaagcccgtcttatcaaagatcagttcctcacggcccgagcgttactggatttcattttccagttgctcgctgcggatggctacttgttcgacaacttgtttgcaggcagtgataacgagctgttatcccgtatacagggttttgacccaagtaatctgcacacgcgcaccgtcgatgagtttgtgcttcagcatgagctgggcattgaagatgagcgtttcaatgcgtttagatctaaaattaacgagcttggtttttacgaggtaaccaaagcaacgtcttttcttcgccttttctatttgcttcggggtgacaaagagctcagcaatgagtttgtaacgcctatccaaaacgagttcacaaacaatctggtagaaacctatgcatctgtctggatgcgacatcgtgatttcgatggttcaggaaagatgcgcaaactgcttggcagtttctacaaagaaacgctgatcgcagcgcttcaccgctattgtaatcgtcatgccccaacactcgacaaagacgagtatttagtttctgagcttaatggctacaaaacggcggtgtctcttgaagttaaggccgatttttcagcaatacaaaacagtacactcgaaaaaataggcaccttcaatgtgtatctgaaagtcgatgaacaatcgcttaagccaatgccaattagcgtcaaactacttgagcttttggtcaagattgggcaggggtatcgccctaacaagcacgacaaaaatgctgttttgttacttgatgaagcattggaacagatgctgacagtagctaagcaaaaagagaccttttttattctcaagggtgataagcgctacaaaatcgtgaaagaagaaagtgactattttgaagtgagtggtatgcactaa

SEQ ID NO: 200608 - DNA, 1356 bp, Klebsiella oxytoca
atgacgaccgataatttcacattaccgataaaggccggtttgccacaaacggtagctgataagttccaaaataagaatacgttgagcagttacattcccattcgtacgcaaggcaatgattttgactggtcatcagtcgtgggcttagtcctgcgtggattactttgtaaaaaaatagaaaagtacaattaccaagattttactgcggattgcaaaaacaacttacaaaacaaattgggtgaagaggcattttggagtgtacttgaagatatgtatttcactaatgaaaatatattctcggtaacccctgagtttctgttgtttaagagccagaagagtcaagataacaagtacacgcgcgacatgcgaatggcatccttgtttattaacttacttcaaggacagcaaattgaacgatttgaatctaacttgaacttcctcgaagaggagtttcttaaaacgcttttagacaaaacaaagtcagatcgtgacaaggacttccaagtgaccgagtcaccatatttgccctatatagcagaggcgtttaaacgtgacctcgagtttttaactggttatccgaaatacctgttggatgagttcgagcgtttcttggcattctatggctttgcttacacggctcaattaagcctatcgttgtcggattggaaaacaggtgaagccccaaccgcgaaaccgctgtatttcatcatggatcatgagcgcgccagcagtgaacgtatccatatcaaaaagcacggttacaagctttttagcgaatcgtctttcaagctgtttcccttcctctctatgctggaaaatcttcaaccaaacccagaaaaattaaaaaaacctttgtggcaattggcaaaggatattaagagttcagagcggagtgatctagctgggtatattgaaaattacgcaaaaatgtttcgccacaacagaaaacttgaaacagcaatacctgaaaaagcagaaaccgcaattgattggttggaatatgctttgaagcttgctgaagaacagttcagagaccctaaaaccgaccgtccggggactatcaaaaaatatattaaagcggttgaagaaaacatggctactggcttcgtgcaagctcgtggtcgctctggtcgggtgttagtactcactcaagaccacattattttgcttactaacctggtggtgggtaaggaagaaaagcttcgcttccatgagctgataattggcttacagcaaagggggatttttgttgataagcagacagaacaagagcttattaagttctatgagcgaattggcaacgttgaacgcatgagtgatagtggagatgcagtgtatgtgcgcaaaacaatttga

SEQ ID NO: 200609 - DNA, 5049 bp, Klebsiella oxytoca
atgtgcgcaaaacaatttgaatcgtttctggttgagcagtttttactgcacgcgaaaggaaacatccgcgcaggctatcgctaccagtttaactctcctgaccatgctaatagtcagcgacttttcgatgcgctcttagcgcgaaaaggaggagagagggaagatcgcaatggtgtagcgctgagctatttagacctagaagactgcaaagtggtgccagtgcttcatagcgaagatgcgtgtgaaacgggctttaccgaaaactacatctctaatttgcgtgacgaaatagcaagccaggaaggtccgttgaagggctgtgcactggtggtgattcacaatagtcgcctagatactctcatcaactcggcggaagatctgggccagtctggccaggtgtggagtccagggaacatcaaattcgctcttagtggctttattgagcaatctgacaaatctcgagacgtttcgctttgccttttggacgaccaatttgacgcgattttggaagatggtgcgaccatgttcggtttcgagtctttatacaaggcagttgaggatggcgagctgtgtttcagcgagctaggcatgtttgaggatccttttgttgctgagttatcgggcaataaaaaacagatcaaacagcgcctagaagaaaaccgtacgctttaccaagagttgtcgtttgaagtagagcattttggtcagcaactcgaagaaaggctgaaaggctttagtagtaggtttatcaaagaacatttttctgacgatggttggaaagatgtggagtttgaaacttatcgagaagagatcaaaaggaataagattcagaaccttaagcatgaaggtgaagacgagaccaataatgcgcaagtgattggtcgctacccaaaagaaactaaagcaggattgcgtgaccgtcacttgattattgcactggaagaagggcaaagtgagtttgaacttaaactgagcttttctggcatcagcgatttaagaaaagagcagtttaaagtctcgccagcgaatgcacttggcaaacaagaagtcatcagcacgcgcctaactagtaaaggggcaaacgctactctagctgctagttatgccaatgagcctttgtttttcacgctagcattgaagcgtgacaatacctcagaacaccataacttccgttgcttggttgtcagaaaaggcgagtttcacctcgaggcattcaaaaacattttcgccgttgagccttcaaaaaaacgccttaccttgaaaacggtagacaacagcttggttattaacccggcgctaactgcaaaccgaagcctagatgatgtcggtgaagtggttgacctcgcagaatttggtgttgtcgattttgaatctttggccaacgagtcagaagaaatcagctttgtggtgaaatcaggtgataattccctgacattttatattgagggtgaacaggtagaaagcagcctgtccttcccattgctgcttaaccaatctcgcttccacaaattgtttgacgatcacgtgtttggcgagctttatccgagtaaagacgttgtcgcgatcgatcatagtgaatttcgcgtcatggagccgcgcattagcctacttcgttgggaagagtgtttcgttcagcaaaagcaagtctacctagcggaatccaacagcatggcgttggaacagttaaggtctattgatgacggtcttcactcagcataccaagcactgtttgactatctagcgagccgacgaacaactatttcgttggtttcgtgggggcctatatttacggcactcgtgaaagcgaccgtggatgcattccttgattatttcaacgcgatcccaactggtggcatgcttaccaaagagcaaaagcttgtgatgcaaatcggtttggttcgcgagaatggtgaagaatattactcgccattccacccaatggtgttggcttactacttaaatctttgtaatgaaatgcaaaaagatgacagctttgctgacttgccaactgtcacgttcaatcgcttggggccaagtggactgcttccgtatgtctatcatcccaagcatgggtttgcctacaaccagcaagtaacagaaaacgggttttgggttaaaagtgtcccttaccagaaaagttgtctgaagttcgttcgcaagctggttaaagaaaagatcaacgagttccaaaaagcgtttctccacttgtttaccggctcagagaagagtgtgttggtgaatgccgtgaatcaagatcgtgcagaagagttattcctcggtttggttgactatgtaaaagataacctcgataaagcggcatcaattcatgtcaacctctacgatgatgagctggttttcaatgcatttgaccagtttgcagaaacgttcaattacgaagaattaaagtcttggttggaattggaccgagagaaagtgcgagaaaatgccgacaccattatcgatattctgcgaacccggctaacttacagcaagtttaccaatgctcaaagtgaacgcgaagggcaagcctactcgcacctgtcttttttcagaaacaacgacaacgtgaagttaacgaccttgagcgttgacgacatgcctagtggtattgcgtgtgatggtctgctgacgggcgacgcttctaaaagtgatgaaggctcatacttcactgcatttggtttgcaaaacgttcaatatagtaaccaaccacacttggaaatagcgaagtatgttggctcgttaatagaaccagcatttaagcccagcacacaatacacgggggccaatgctcctgctcttgcggtcagtgaagactttaaatctctgctagcgcgctcttatgacagctcgatttggaccaccatcatcgacccgaaagtgacgctagacttcttccacgccaatcaatgtatcgtgcttattcattattctgatcagtacaccagctcagccagctacgatgcgataaccgtgacggcgcagcgtggtttgttcgaaagggtggttgcacaaagtggcggcaagcagattaacgagttcaatgccttcaatggtgattggctactgaagatgttgacttgcaacgacaccattcgcaaagagcgaactggcattatcggcgcctataaatttgcgacgtgtctggtgcaccaatctgatatcacctgggttccgctctcagttggtgaaatgatccgcgtgtcgggtaacatcggcctgaaaatgaccgacagtgacttctcacgcaatgtgcagagatataaaaaaggcgcgatttcagatgatatactgctggtgggctttaaagagggtaacctttatttgcttcctgtcgaagtgaaaacaggctccacgccagactacaagaaagcagtacagcaagcgaatgagcttcgccgctatctaacagagcttttgagcgacgagacactggcgtcgaagctataccgaggcttgtttatccgccaagtgttgatgcaaatcgacaaataccgtttgtacaacgtattcagcaatgactatttcgaagccctgctggcagagaaagaagagtggctacgcggtaactacgcgattgcggagcttgagaactatccagcaggtctagtggttagccaccttgaaagcggaagctgtttcgaacctggctataacatgcaggatggcgtgttgaaggttgaccttcctatgtctttgctgccttcactggtgcaacacccgcttcaagtattaatgaacgaaaaggacatcgcacagatctgccatgtgccggcggagtatatgttggtggggcagacagctttgaaaaaaagagagtcgctcgttccattagacgttgtggtcgataagccagaggatttaaaaccgaacctccaaacagaggagccgtcaaagttagctgcagagccaaccccagattatgcgagtgaatgccgagttgaaattggtcagaatacgcttaccggcgaaaaagttttctgggagtacgggcacaaggatttagcaaaccgtcacctgatcatttttggtagctcagggcagggtaagacctactgtatacaaggtttgttgatgagcttggccgatgctcaaattcggtcgctggtgattgattatacaaacggattcttgccgaatcaccttgagccggagtttattgaacgaacaaatcctaaatccaatattctttgtaatgagccatttggtatgtcgccatttagagctcaaaagcaagattttggcgggatttttctcgaagagaagcctcatatggtggctggaagggtagcctctgtttttaacaaggtatattcgacaattggcgagcgccagatcgcagtgctcaatgaagtgattgaatctggtgtccaacgatatggtagtgcttatagcttacagaatatgttggatgacctaaacgaggaagaaacagcaggaccagcacttgcaagcaagctggctcctcttgttaagtctaacttgttttcatctgacagtgataaaagttggaatgatgtgtttgagagtgaacatcaccgctcaacaattatgcaacttgcgtcgcttaaccacgatatttcaatgctttgtactgagtttttactttgggatctatactcctacgcatgtagttacggtagtaaggaaaaaccgattcctattgtattggatgaagtgcagaacctcgatcatcgcttggagagcccattgggcaaaatgttaacggaaggacgcaagtttggggtatccctaattctggcgactcaaacgctaagtatgctgcgtaaagatgagcaagatcgtttattccaagcgtgtcacaagctgatttttgcaccagcaaaaacagagacaaagacgtacgcgaaaattcttgaactgagcatgccaggtacaaagcaggctgagtgggaaaagcaactaggagacctatccaaaggacagtgtttatcagttggctaccatttggataacggtcagttgaagatgagtgttaagaaagtgaaggtttcctccatgttatcccgcctgaacaattctaagggttga

SEQ ID NO: 200610 - DNA, 2001 bp, Klebsiella oxytoca
gtgctcattaaacaactagtgttacataattttcgggtatttaacggtactcataccattgatctggcccccagaaagcgcccacacgatttgaatccacgacctattgtactgtttggtggtttaaacggtgcagggaaaacgtcgatcctatcagcgatccgtctagcactatatggtcggctggcgtttggctttgccactcaacaacaggaatatgtcgagcaacttagttcgttaattcacaacggtgcgtacgatattgaacaacctgaggaagccgctgtcgaattgacctttacctataataagggcggccatgaagcggaatttaccgttacgcgaacctggaaaaaaggtaagaaagatcgcctatctctgcaacaggatggacagccactcagtgagctggattacgatcagtgccagggatttcttaatgaattaatcccgcatggcattgccgatctgttcttttttgatggcgagaaaattgcggagctggcggaagatgaatccggcaatattttgcgtaccgcagtgcgccgtttattaggtctggatctgatatccaaactgcgtaatgacttaatgatttttgttaagcgccagcaatccagccagttggtgggttctcaacaacagcagattgcagagcttgaaaaacaaagtaaagaattggcctgccagactgaagagatactggaaagagccgattttgccaaatcgcggattgagtttatttctaaagatattatccgttatgaaggtttgctaaatgctcaggggggggcttttgcccagacaaaagcgcaggaaaagcagaaagttgatgcgttattgaaagataaggaacgtctggaaaaagcactgcgtcaggaatgtgatgggccgctaccttatgcgcttgcgcccactattttgtctcgtttactgcaacaaattactgatgaaacgcagattaaacgggcaaaaagctttgaaaaagagctgagccagtttttaacgcaactcagaaatgatattgcatttcgttctgagggaactggcaaaatagcagctgaagcgattaccgataatctaaaagagtatatggcaactaagcctaaaggcgatttgctgtttgatatctctgaacgtgaagccggtatgctccaacagtcgattgaacaagacagcaaaaaggcatggcaacgcttcgatctttaccgtacccagttatcagagactgaacagcagttagagcaggctgctgcaaatattgcccgcgccccggaagacgaccagttaatggagctctttgagaagctacgcgaactggataagcaacgtgaaaaacagcggcaaaaatatctttcattgctggaagatgctaaacgaattaagcaacagcaactggattgcgttcgtcaggtacaaaaaatgcatgatgttgcccgaagtcagtatggcttgagttgcgcctttaaaaacgctcaagaaacgattaatttactcgatcgatacagtgatgtattaacgcaggcaagagtgaaaacactgtcagcgaatttcgaaatagcctatcgcaaactggcccgtaaagaagatttacaacttagtgcgcacattaacccagagacgtttgacgtagagctgattgatgaacaaggatccgtcataaaacgtaagctgctttctgccggtgaaaagcaaatttatgcaattgctattcttgaggctttagcaaaaacctcaggccgtgatttaccggtgattatcgatacgccattaggacgtctggattctcagcatcgggataaactgattaaccactatttcccgtttgccagccatcaggtagtgctgctatctactgatacggaagtggatgagcgttattttgttgatcaattgcgtgatgatatctctcatgcttatgagattgtgtttaatgcacataccaaatcgtctgcactgaaacctggctatttctgggaattaactaaggaggcgatctga

SEQ ID NO: 200611 - DNA, 741 bp, Klebsiella oxytoca
atgttgaaggctacaataacgatactgcaaattctcgttggggtatattttctgggtaatgcaatacgtcaaaacccaaaatttgatgcttttcttcttattgtggaaaacggttatggcggaattaacgataagctcaaggatactcgtatccgtgaaggcgtttacaagcttggtttaatgtacggttttttaagttttttagcatttttaatgttatttttgacaccttatgttgcatcgcagtccgagccatactttcttatgtgttctgctggttttattattgggttaatcggctggagttcaatttcttggtgtctgcaacatcgtaaaatgttattggaaaatacatggttttggtggctcatgccgatctttccattttttctagcctttcttgagaaacaaactggtatttctatattgtggtgccccttagactctttatttaagctgttaaattctatgggggtttatatagaactgccgactagtgtttggagtcaggcgtttatattttgtgctattcttatagtttttatgttagtacaatatttagtgatgtggtgtatatctataccagtattgataataaccatcttaatggtgttgttgattgtttcttttgcaaggctggttaatctaattgctccaaaaactgcattttacggctttatggtaatattatttgttgcattaatactagtgcaaaattatattcttccatgcatgggctaa

SEQ ID NO: 200612 - DNA, 852 bp, Klebsiella oxytoca
atgatcggaaataacgtaactgagtccgaagtgttaaccggacacaccggtgtgatttgctccaccagtattgagcgtatcgttacgggccgtaatgctgcgctggcacagattgaaagccttattcaacagcttaatgagatctcaattctcacccgcgacatcggcggtggaacagcacaggagtggggaatgcgggagggccatcgctacgattgctggtttaccgaaagaccggataaggcgatgaaggccattacccgcaatatagatcgcagcatctggcgagatctgatgctgaagtctggcatgctggcgctgatggatgctgaggcccgcagtcagtggtgtaaaaatctggaggaaggtgagctgccgactgtcagtgaggccaatatcctgagcacctttgaccagcttcatcaggataaacatgccgtatttgagcgcggtgttatcaacgtttttagagggctatcttgggattataaaacaaactcaccctgtaagtttggtaagaagatcattgtggatggtcttgtttctttcaaccgttgggggtttagcttcacccatggataccggcgtgaccagctggtcgatctggagcgtatgctgactctgcttgacggcaagccgctaccggataaccgggctgatattgcctgtcggctaagtgaccatatcggacggcagcgtacttcggcagtgtatgacgatgagctattcagcattaattattttcagaaggggagtgcgcacatagtgttcaaacgtcccgagttgattgaccgactgaacgatataatcgcgaagcactatccaggggtgttgtcggagcatacaaggtga

SEQ ID NO: 200613 - DNA, 384 bp, Klebsiella oxytoca
atgcaaactaaacccctcacgcaggcggcaccgtcgcgcccgtcccccgttgccgtctggcaaaccctgctgacccgactactggagcagcactatggcctcacgcttatcgatacgccgttcagcgatgagggcgtgataaagcggcacattgatgcgggtataccgctggctgacgccctgaattttattgttgaaaagtacgagctggttcgcaccgaccggcccggcttcagcaccgtcgagcagtccccgtttgtgacgtccattgatatcctccgggccagaaaagccgtgggcctgatgcgccgtggcaattataaagaagtaacagccatcaccagaggactgcattcgcaggtcagtatttctgatatacggtga

SEQ ID NO: 200614 - DNA, 360 bp, Klebsiella oxytoca
ttgtcgaagaacatcccgattgcaacgcacgatatcagtgacccctggtgggggctcaggcggaatatctccccgtgcttcggtgcccgcctggtgcaggagggcagccgactgcactacctggccgaccgggcgaacatcaccggccggttcagcgaggcggacctgcgccatctcgaccaggccttcccgctgctgatgaagcagctggagctgatgctctccaccggcgagctgaacccccgttacccgcactgcgtcacgttatatgtcaaagggctgacctgtgaggcggacacgttaggctctcacggctacctttatattaccatttaccccacgtcgggcgcgcccgcctaa

SEQ ID NO: 200615 - DNA, 222 bp, Klebsiella oxytoca
atgaaaatcatcagcaagcgccgggccatggcgatataccgccagcacccgcaggcccggctgtttcgcttctgcagcggaaaatatacatggtacggcagcgtctgccactacgccggtcgcgaggtggcggatatcagcggcgtgctggccgtgtttgccgaacgtcgtcaggaccgccgcggcccgtatgtcgtattgcgcagcgtaagcctgaattaa

SEQ ID NO: 200616 - DNA, 981 bp, Klebsiella oxytoca
atggctggaaaaaatcgaatgatcgttaacttttcctcgaaaagactgagggatctgattgttgaaatcgctaagaaaaaccatatgagtcaatcgaaagtcattgagaaacttgttgcattcaggcttttcgaaagcaatggtgagccggttatcgatgctttttgtgaagccagcaaggccgtcattgaacagcagcagaaagacgatagcgagttcagtatggctttgcgcactccctatttaagacataacgtccgtctttataaagtctatggcgacttgtcttgggagaaatctttttacgttaaaaataatgaaaagttaaatgactcggtttttgaaagtgaattaagaaaagtaatctataatggaataaacgaaatgactcaccacgaatgggagaatgtgttcagcagtgcagtgattatattcgccgatttgtggttgatatttttcaacaaaataaatgttgagtataaaattgaaaggcaggatgaaaaatctagtagggttagagttaaattcaaagccagaaatatatgttgtattccttttagttttcataaacattcttccatgaaagaaaagtattgtaatgcaatgagctatcttgattttagctccgtcagataccactccttcaaaagtgtagcgacaaaaggttggagcaggaataaatactcgcatcttctttttattcatgaggcttcatcatccgatcggggtggattctttattggagtacagtacgaggaaaatgaacaatccttttctaaaaaatcgccctcgtcaccctatgagccaccggaggggattgttctggatactaaaaaaatcaacacggagagttcatgttcacttaaccagtatgcgcgatacaacgatgttaatcctgaactcaaaatcagcatttatcatgagcccgcgaatatcaaaatccggaatctcaaccctgaattaaaaagtaaaatcacataa

SEQ ID NO: 200617 - DNA, 648 bp, Klebsiella oxytoca
atgaacatcaaacgccataagcactatggcctgctgaactcagtctacgctaagcgcatcaccagtaccgttgacaacgccctcaatcaataccctcgcacgctggctatccggattgaccttcgcttcccggatgaagaagaacgcacagactgccctacacagtgttatacaggccccgatgttatttcgaggttcatcaactcagtaaaagctcagataagggcagatatataccgcaaacgaaaagcagggaagaaatcactgacctgcaatgtgagatttgtgtgggtaagagaatttaatcaggaagggagcaagaagcattaccacgttctgctgctgttgaacaaagacgcttatgcctggccaggaagaatcgaacaacaccctaataacgcctttaactacagtgtgttcaatatggtaacgcaggcatggatacgggcaattaaacgcgattatgcagacagtaaatacgcaggattgattcacatcccccctagcagtttttaccagttaaatcgtaacagtagttattttaaggatgattatgaggccgctatagcaagagcaatgtacctggctaaggagcgtagcaaggatacgtcagatggctatcgcagctttggctgttctcagagctaa

SEQ ID NO: 200618 - DNA, 216 bp, Klebsiella oxytoca
atgaccactcagaataacaacaccagcctgcttaacgacaagatggtcgatatggcattcatcacccactttacgggattaaccgacaaatggttctacaagatgattaaagacggggtatttccaaagccaatcaagctgggccgcagttcccgttggatgcaaagcgaagtagaggcgtgggttcaacagcgcattaaccagtctcgccagtga

SEQ ID NO: 200619 - DNA, 300 bp, Klebsiella oxytoca
atgaatcacaaaaaagaacacaccgtaatggtcaatacggtgctcagggagcttgccagccagcagggccaaactgtcgattatgttttaaaacaactattctggcgggcgagcatcgtcaatacgggggttctcaatgaggcttttcgtgaagattttcagaagcgttatcccggcgagtcattcaaccacgttatatggtgccctttctgcgagtgcttcgaccttatgttgcgtacaggcccaatgatacaaggagaggttccctggacattcagttccacacagttagacaattga

SEQ ID NO: 200620 - DNA, 432 bp, Klebsiella oxytoca
atggaaagttatcataataagacgggctggggagcaacatcgctacccacaggacctgagcattttggtgagcgcctgaaaactgttatcgggaaacagtctgttgcctcttttgcccgtgattgcgggctttcagagccctctgtgagaaaataccttaaagctggtacggtgccgggtatcgacagcgtggctatgattgcagcctatacggggcgttctttgacctggctgattacgggggaaggtgaccccttcacggacaaggctaagaaggaaggcctttctgaagaagatatcaaaaagtggtggggtctgatttttgaagctctggatacggaggataaatccaatgttatcatgacctttcagcaaggcggtttgaatgcggtattcaagcccgagattattaccggcaaaaggaagggataa

SEQ ID NO: 200621 - DNA, 318 bp, Klebsiella oxytoca
ttgcagcgacggtggacagactacgaagagttgtctgttcgggtcagcagcagtagtactatcaacgtcctacacgttgtgtacagcgtgctatccagacttatcggccagatgctgaaggttcgtctgtgggatgacagactgagttgttacgctggcagcgacgaagtcatgagctgtcagcgagtccgggctccgaaaggtaaacggcgggcccgcagcatcaacttcaggcacatgctcggtagtcttgccataaaacccagggcgttttaccacgccacactgtgtaacgacattctgccggataatgaatag

SEQ ID NO: 200622 - DNA, 369 bp, Klebsiella oxytoca
gtgaccgatatccatacacttgtaaggttgctcaggaggttacgtctggcgcgcataaccaccaagtggcactcgttggccgaagggtgggcgccctcgcgttatctgctgtcactctgcagtgaagaggcgacacacaggaaaagcgaacagctgcggcggtatataaagaacgcgcggttgcctgtggggaaaacgctggccgaatatgacttcggccaagttcgggagctgaatgccgcacaggtgcatcagttgtgtgaaacgacggactgggtggataacggggagagcgtcctgctgttcagtgccagcggtctgggcaagagccaccttactgcagcgatcgcgaacggcgtagtgagctag

SEQ ID NO: 200623 - DNA, 657 bp, Klebsiella oxytoca
atgggcggtgaaactcgcggacggggaagaccaagaaaaacagaaagtacctatgctgatacccgtaatgacttgatccgcagtggacttgaattgctgacgcaaaatggcttcctttcgacgggagtcgatgccattgttaaaaatgccaatgttcctaaaggctcattttattattattttaagagtaaagaagaatatgcgcagaccgtactggaagcctacgacagtttcttcaagcataaactcaagaaacatctgcaaaccacgagcggcacgccaatgggccgtatggaaaattttatccttgatgcctgctccggaattgaaaagtataacttcacccgcggttgcctggttggaaatatgatgcaggagagccctggccttccccactcttttattaaacagctacgggatattcttgaaagctggcaggctattgttgctacctgcctgtccgaagcgttgtcttccggagaaatttgctcagagatgaatgatatgcagctgtcagccattttctggagtggttgggaaggtgctgtaatgcgcgccaagctatattgttcgactcagcccgtatacgatttttggcgttactttaaaagctctttaggttatcaggtacggcaggaagaaataacagtagaataa

SEQ ID NO: 200624 - DNA, 1278 bp, Klebsiella oxytoca
atgaaacgcgcaggattatttacattcgctgtttgtacattaaatgcactgtcggcatctgccgccccgctactcatcgataccgcatcactcaaaaacgccactttcacatgccggaatgcccctcaacactattcggcttcagagcagcagcatgtcgataagctgtgggccgatacgctggtcttccttcagggatttgccgacacgctcacctcgcccgacaacacgggaagctgccgtttctctggtaatgccattacggaaacaaatacccccgcactgtcaggccccaaaaggcaatgtattactgagaatcaggacgttcaggatttgctgaaggaaatctatagtgttttaaataataaagatgaagccttcaagtgttttaccccccagaaagatactgacggactgtattctcccggtggtgcattaactcaaaactcacctgtagctacttggttgaacagaaaaacactcggtgattattttcgaaatcagcaagatcctacgctcagaaaagaagggcttattttttctgacaatatcaatgaaatgctcatgagcaaggaaataaaaaaacctgcaggtattcagcgtgatattacagccaatggattaccagaactctgggccagcgttggttgggtaccgatgtattctcatgacagcgaacgaaatattcatgcaggtgctcattcattccgcagcggttatgcctatgctgaagttatgggccactgggggttattacagatagataaaataaatggtcagccagtcggggcagaaattggaatgaccgtgcagcggatgggaacattttatccttatcattttcataatatcccggaaatttactacacgcttcgccagcctgcctgcctcaactccattaatcagtttatcgttgggcagaacaatagcgtgctaaccccggcagggatcaccgaacaaaccacaaccctgcagttttccggcgagcatgtgaaaaacctcgatcattactggatgtcgacaacacctgaatcggatcccctgatttatattccacgcaactccctgcatgccttcgatcttaaagatcagtgtgaacccgatcccgacagagatgcccatgttacgctctgggcaaggactaaggcccacgatcagaatgactatggagataccaatgtttgtactttggtcgataaaacattagcgaaagatcagattaataaaagaacagccaatgtatcttgcgaacaaaataaactgattcttggtcattaa

SEQ ID NO: 200625 - DNA, 984 bp, Klebsiella oxytoca
gtgtttaaatccttactaatcaataagacagaagaacgctatagcgcgcagctcgcagacattgctgaaagtgaactccctgaaggagatgtaacagtcgatattgactactcctccatcaactacaaagatgctctcgccattaccggacgtggcccaatagtgcgcaagttcccaatggtgcccggtattgactttgctggcaccgtatccgccagctcgcatcctgactatcaggctggcgatagggtgctgctcaccggctggggcgtaggggaaaaacactggggaggattggcagaaaaagcccgggtgaagggagactggctgacacctgttccggcgggagcgagcagcaaacacgttatggcgatcggaaccgctggctttactgcaatgctgtgcgttgacgcgctgctgaatcatggcgtgaagcctgaagatggtccggtactggtcaccggcgccagcggtggggtaggcagtatcgcagcgatgatcctggcgtcgatgggctatcaggtgacggcgtctaccggacgggcggaagaagctgcgtggctttataaaacggtaggcgtgcatgacattattaatcgttcagaactctccagcccgggtaaaccgttacagaaagagcgctgggccgctgccgttgatactgtcggcagccacacgctctgcaacgcctgcgccagcgttcgttgcggcagcattgttgccgcctgcggcatggcgcaaggtatggagctgatgggcaacgtagcgccgtttatcctgcgtggcgtcaccctgaaggggattgacagcgtcatgtacgccaaagagaagcgtgcggctatctggcagcaggcgctacagtatttaccagaagcaaaactggatagtttaaccagcgaatatcccctcagtgaggccatcaatgtcgcagaaaaactcatgctcggtggcattcggggacgggctgtcattaaatgtagttaa

SEQ ID NO: 200626 - DNA, 933 bp, Klebsiella oxytoca
atgatgggcactttcatcgacctggtcatttaccatcaggatggagaacagctcatcgaagatgcttacaaccagctcgaccaatatgcccggcgattcacagtgaatcagccacactctgaattgatggatgtaaatcataacgctggtattgcgcccgttatcgtacagcccgatctttttcatttaataaaaatagctaaggcgatcagtgtagatcctgaaaacccctttaatattgccattggcccgctggtcaaaatgtggcgcattggtttcaaaaatgccagagtaccaacgcccgaagagattgatcaaaagctttctttagttgatccaaaaaatattttcctgaatgaaggcgattgttctgtctatcttagccaggcaaatatggaaatcgatttaggcgcaattgctaaaggctactttgcagatgaagtaaaaaagaagctaacggatgcaggtgttaaacagggctttattagcttaggaggcaatgtgctgaccatcgggcatgcgcctgataaccctaaccaggcgtggaatgttggtatccagaaccctttagcccagcgcggctcagttattcgcgtgatgcctcttacggggagatcaatggtcacttcgggcatcaatgagcgtttcttcgaagtcaatagcgcgcgctaccatcatctgcttgatacccggacgggaaggcccatttcaacagatattgccagcattactattgtctcaactcattctgttgcgggtgaaatctggagcaccgcaggatttttgtcagacattcgcgacgccattttttacttgaatcagcaggctgatattgaagctatcgtgatttctaagtacggcaaaatctacgtgacagagggtttaattgatgatggatcgcatatttttcttaggaataaaacatctgcatag

SEQ ID NO: 200627 - DNA, 3015 bp, Klebsiella oxytoca
atgagtcagttaattagagaagtcacatttcagtctggcaataagttaaaaaatcgtattgtcatggcaccgatgacgattcaatccgctttttttgatggcggggtgacgcaggagatgatcgcctattacgaatcccgttcaggtgatgcaggtgcggtgattgttgagagtgcttttgttgaaaattatggtcgtgcgtttccaggggcactcggcattgacacggatagcaaagtcgctggtttaaaaaaactcgctgatgcaattaaagcaaagggttcaaaagcaatcctgcagatttatcacgcagggcgtatggctaacccggaatacaacggtggccatcagccaatctcggcaagtcccgttgcagcactgcgtgacaacgcagaaacaccgcttcagatgaccgacgttcagatcgaagcaatgattgaaaaatttggtgatgcaacccgacgcgccattgaagcaggttttgatggggttgaaattcacggtgccaacacgtatctgattcagcaatttttctctcctcactcaaatcgcagaaaggataagtgggggggaacgattgaaaaaaggacgacatttccgctcgccgttttagaaaaggttaagcaagtcgttgcgtctcatgagttaaaaacgttcatcattggctatcgtttctcgccagaggagctggaagagccaggaattcggttcgatgagacgatgtatcttttggataaactggcaacccagggtcttgactaccttcatttttcaatggggagctgggcgcgcaactctattgtaaatccagaagacaaagagcccctcatcaccaaatatcgccagctacaatcggatattttatctaaggtaccgctcatcggcgttggcggcattattcaacgtgctgatgctgaaaatgcgctcgcgcaaggttacgacatcgtgagcgtgggtaaaggatatttggtagagccaacctgggctacgaaagctatcaataatgagccttgtgccgaatttgctgatattgcccagcagggggagctgcaaataccgacaccattgtgggaaaccatggattatatgattgtggacagcgcagcggaggcgcttaagcatcaaagaatcaaagaactgcaaaatgttaaaattgaatttaatccgggcaaatatactgcgtatggacgcggccacaatagcgatctaccggtaacggtaaccttttcacaagataagatccttaatatcagtgttgattcgtcaaaggagtcggacggtattgcaaacccggccttcgagcgtattcctcagcaaattatcaataatcaaacgttgaatattgacgttatttctggggcaaccgtcagcagccaggctgttattgacggtgtttcaaatgcggttgaccttgctggcggcaactctgaagcgcttcgctgtaaggcgagaaaacctgtcgagtggtcatctgagactattgaacaaaccgttgatatcgtggtggttggcggcggcggcgccggtttaagtgccgcgcttgcagctatagaaaaaggtaagtctgttattttattagaaaaatttccggcagtcggcggtaatacagtgcgtaccggcggttgggtaaatgcggcggagccgcagtggcagaatgctttcaacgctttgccgggagaaaaagagaccttagcagcgcttgccgctacgcctgagtcggaatttgtagacggatatcttgccgattttaaaatactgaaagaacagctcgaacgttattttgctgatgtggacagcggtaaacactatctttttgattctgttgagcttcatcgaattcagacttacctgggcggaaaacgtaccgatctgaatggtcaatctatacatggtcagtacgacttagtaaaaacgctgacgtcgaatgcaatggaatccatcaattggctaactgataaaggtatcgattttgatcgcagcgcggttgaaattcctgtcggtgcgctatggcgccgcgcgcacaaaccaaaacgcgccaaaggtgttgagtttgttgataagctacagaagcgaattcaggaaaaaggcggccagatcatcaccgatacccgcgcaacagatttgattgttgaagagggaaaagtcgttggtattaaagcgacgcaggagaatggcacccggctagtgctccatgtcaataatggcgtagtacttgcttccggtggtttcggggcaaacaccaaaatgatccagaaatacaatacgtactggagagaaattgcagataatatcaagacaaccaactctcccgcactcattggtgatggtatcgttattggtgagaaagtcggtgcagagttagtcgggatgggctttgttcagctgatgccaatcggcgatccgaagtctggcgcgctattaacgggattaattgtaccccctgaaaactttgtttttgtaaatcaacagggtaagcgcttcattgacgagtgcgaaagtcgtgatgttcttgcagatgcttttttcgataacggcggcctggtgtatatgattgccgatgagaaaattcgtcagacagccgcgaatacctccgatgaaactattgagcgagaaatcaaagaaggtatcattatccaagccgattcccttgaagagctggccgagaaaattgctgttcctgcagctgaattaatagctaccatcgatcagtacaaccgctatgttgagcaaggccacgatcctgaatttcataagagtgcattcggtttgaaagtggaacggggaccgttttatgcaacaccgcgccagccctccgtgcaccatacgatgggaggactaaaaatcgatactaaagcccgcgttatcagtaaagaaggtaacgttattcctggcttgtatgcagcaggagaagttgctggcggtattcacgcaggtaaccgtttgggtggtaatgcgttaattgatatctttacttatggtcgcattgcgggtgagagtgcagccgggcagatttaa

SEQ ID NO: 200628 - DNA, 480 bp, Klebsiella oxytoca
atggaaaatattaatgatttaaaaaataagattgatacaaaggtaatgaactttgttttattatctattgtaactggtggtatttatcctatgatgtggttatatcttaaccagccaaagcttacagagcaaatgaaaagtgattttcttgcgaaggattacccacttttgttggccatcgttaccggatttggttggttattgtcagatattggtatcgctataaatagtgatgtgactttacttgatcaggttgcaagaattttctctttggcttcaactgtaatgattatagtatgggcattcaaagctaaagcggccttacaggcttatgctctaaatgaatttaagtttgagttgcggatgaatccattttatacatttatctttaacgtatattatatcgtttattgtattaatgatatggaatcagagttgcaaaagcacaaggttatttatagtaagaatatagttgaataa

SEQ ID NO: 200629 - DNA, 417 bp, Klebsiella oxytoca
atgaataaattattattgagcgcaatttcaggtctggcctgcattatctcaattcctgcatatgcaaaccctgacgattcctgcgacggtgaacaaaccatctttgatgcttacaccgctaagggtggcaagcacgtgggtgtatgttacgtatacggcaatattcgttatgtgtatgggaaggatgataatcctgaaattttaataaatgtaccaattgaaaaagtcgacttcatccagtctggtaatggagaccaaagcgttactattcccaatggaaaatataaatatattgttggggagtacttacgtggtgggccatttattcaagtctggaaagaacagagctttgtcactgagataaagttaaatggtattgattttgaaaatgatattgagcgttacatacataattaa

SEQ ID NO: 200630 - DNA, 402 bp, Klebsiella oxytoca
gtgaacactgaatctctaagcaaagaaagtattaaagcttttctgattaagtataagaaggttttaatttctgtatttgtcctcttctgtatctataatgctatcacaggatttattgcggatccagaactacctaagtgcaacgatcgcgatcttattgataataagatccctggaatggttgttaaaaaactagagggatactccgctaatgctcatcttttaaagatgacagtttctgatgttgaagagactctctatgacaaaaaagcaggattaagacagtgcactgcagccatgacaatgcggattaaaaataatgttcatacaactgatttcgaataccaaattgcctggactgatgaaaaatcaggtcaatatcaagttaagattctcgactga

SEQ ID NO: 200631 - DNA, 462 bp, Klebsiella oxytoca
atgaaaaacaaaaatgcttttattttacttgttatgagttctttgttttcagtatcttcttttgccaatgaaaagtatgacctgaagtgtactctcgattctggtaaagaaatgaccgtaagccatagtaaaaacacagtctacattgggtttaaaaaacctgcaagtgattcaagagacgagagtgttattgagctcgatattcttttaggggaagccaggcaaattctcgctgatagtggaatcggacaagttatttatgggttacgtggagataataaggagatgaaaaatgcggtcattattcaatatataaggcgaggggatgaagctaatctatatttctctgaaattgataaggctggtaaagatttgtcaaaaagttattgtaagccaaaaacaattatgttcaatgaatccctaactcaaaaagggatagatggcgttaaatttattgattaa

SEQ ID NO: 200632 - DNA, 171 bp, Klebsiella oxytoca
atgcaagtaatacttatcatcttgttttttctcgttgtaatcccgttgctttttaagtttccaaaaatattcaaggcaatccttggtggtatttttggttttttaattttctttataaaaagctttcctgacgcaattaataaagcgagtaatggaaacagaaaggattga

SEQ ID NO: 200633 - DNA, 138 bp, Klebsiella oxytoca
atgtctgatcgttttgaagatagcccagagtacgaagactggattcaggaaactggtggaagagatgaagaccactcagagtactacaacaaatgggagcggagaaaacgtacagagtcattacgcaagaaaaagtaa

SEQ ID NO: 200634 - DNA, 1176 bp, Klebsiella oxytoca
atgaaacttacaatacgtcaaatagatacgcagaagcccagagataaagctttcaaactttctgatggtgggggcctgtatctgctaattaatcctaatggatcgcgctactggcgacttaaatatcgttttgctggtaaagagaagcttctggcagttggcgtttatccggaggttactctcgctaaggcacgcagcagtagagaagaggcaaaaaaattactatcagagggtaaggatcccgcacaggagagaaagatggataaactctcccgtcagattgaagtcgaaagctcattcgaagccatcgccagggagtggcacaagagacggtttgataactggtcagtttcatacagagaagagatgatgcggacctttgaaaaggatgtgttccctttcattgggcacaggccaatcaaagatattaaaccacttgaattactcgatgttctctcaaaactggaagagcgaggggcaacagagaaggccagaaaggttcgtcagcgctgtggcgaggtttggaaatacgcagtaattacggggcgagctgattataatccggctccagatttggcgagtgcgcttgtaccgcatgagaaggaacactatgccttcctgactaaagaggaattacctgattttctaagtactcttgaaacctacagtggaagcattctggttaaaatcgctatgaaattaacgatgcttactggcgtcaggcccggagagctgcgtaaagctgaatggtctgagtttgattttgaaaagtgtctctggaatgtacctaaagagcgaatgaagatgaagcggcctcatatggttcctttatcgagacaggtgttagtgctacttaaccaactgcgtccaataacaagcattaacagcttattatttcccggacgaaacgaccctaaaaaaccaatgagcgatatggcacttaccgttttggtgagacgtttagggtatgcagggcgagtaacaggccatggttttcgccacacgatgagtaccatcttgcatgagcagggtttcaattcagcgtggattgagcttcagcttgctcatgtggataagaacagtattcgcggtacgtataaccatgcgcagtatctggatggaaggcgagagatgatgcagtggtatgcagattatctcgactcactggctaactaa

SEQ ID NO: 200635 - DNA, 684 bp, Klebsiella oxytoca
gtgcaggcgccgctgtttgtcctgacgccgccctcggtgccgcacgcttttatcaccgagtccgatagcgatggtcacgtgctgacggtgcacgaggatctggtctggccgctgctggaggtgctgtaccccggcacccgggaggccttcggcctgccgggcatctgcctgtcgctggccgataagcccgatgagctggcggcgctggcgcactactggcggctgattgaacgggaatcggcctcgcagctgccggggcgggaacacaccctgacgctgctggcgcaggcggtattcaccctgctactgcgcaacgcgaagcttgacgatcatgcggccagcgggatacgcggcgagctcaagctgttccagcgttttaaccagctgatcgatagccactaccaccagcactggacggtaccagattacgcctgcgagctgcatctgaccgaatcccggttaaccgatatttgccgccgcttcgccaaccgaccgcccaagcggctgattttcgacaggcagctgcgcgaggccaggcgattactgctcttctccgacattacgatcggtgaaatagcctggcagctgggctttaaagatccggcctatttcgcccgcttttttaaccgcctgacgggctgttcgccgagcgcgttcagaatgcaaaaagtaccggtgtcttag

SEQ ID NO: 200636 - DNA, 399 bp, Klebsiella oxytoca
atgaatagtgtttttgataaagatgaagttattagattttttctacttcagagtgagctggttaaagccttatttaaaacctatccaatggcaaaagacattgagtggttattagattttcccaaaaatggacatgttcatattaatggggatgtatggagtttttccaaacatggaaaggggatcaggttctttatagaaggttcacatactggcaaagtggttgatgtacataataatataagttgtcctgaattggttgatacatggcgattactacagtacttttcgcttgatgatgaaaaccagcttgaggcgcttttgaatgagatggttatctcaggtgaattagagaaaatatcggataaattataccggttaaaagaaatcccggcctga

SEQ ID NO: 200637 - DNA, 333 bp, Klebsiella oxytoca
atgctggtagacccggcgtgtaaggcgctgttcgtggcgacggacggtctggcggggttgcaggccaacggcatcaccaacgtggtcggggcgtatatccgggcatcggggctggccagatggggaagctgccacctgttccgccacgcgatggcgacgcagatgctggagaacggggcggacttaaggtggatccaggcgatgctgggccatgcgagcgtggagagtacgcagatctacacgcaggtgagcatccgggcgctggcggcggtgcatgcctcaacgcatccggcggagcaggacggaacagcggagccgccggagagcccgtaa

SEQ ID NO: 200638 - DNA, 315 bp, Klebsiella oxytoca
atgaaaataaaagagagagatggtgaagttgttgatgtatatgcagtttactttattggtggtgatgttaattttttagggatgcctaaaaattatggtgggttatctgctttttcagctagagaagtagaaattgttgaatctgagatgaaatataacagtatctattttaaaaataatggatatggtatttaccactgggccttaattaaagaaaagctactggacgatcttcttgaactggatgaaacggcctataaacgcttccttgaaatcgtgaaagctgaaggtctggtagatcctgatttttattaa

SEQ ID NO: 200639 - DNA, 237 bp, Klebsiella oxytoca
atgcgtccccagtttgccgagatgtacgcgcgcgctgttcccgcgaaagacgctctactccagcgcttcgttacgggcaataatgccgtgcagcaaggtaagccaaaggataagaaagaagtgtttctttcacatatccttgcacgcctgaacgaactctttataaccgataacctcacggacaaggacatgattaattatgccttaaccgtgcgcgataaattatcggaaaactaa

SEQ ID NO: 200640 - DNA, 1275 bp, Klebsiella oxytoca
atgctgtttgaccgtgataactgggaaaccgggttcgagagcctgtgggtgcgccagtcacgcccgtatgccggtgacacctacggcctgcatctgccgctgctggcaggcaccgaagtggcgattggttttgaggacggtaacccggacagaccgtacatttcaggcgtgctgcatgactcagcgcacggtgaccatgtcactatccgaaactacaaacgtaacgttctgcgcaccccagcgaacaacaaaatccgccttgatgacagccgcgaccaggagcatatcaaggtctccacggagtacggcggcaagagtcagctgaatctcggacatttagtggatgctgagaagcaaaagcgcggtgagggttttgagctcagaaccgacagctggggagccatccgggcacagaaagggatgttcatcagcgctgatggccagacgaaagcacagggtcaggtgctggagatgcagccagcggtcagcaatctgggtgatgcccgggagcagatgacgtctatctccgatgatgcgcagaaggcaaccgcgaacccggccgatctccaggcgcaaatcaaactgctggaacagcagctgacagacctcaaaaaatcagtgctgctgctcagtgcaccggatggaatggcgctgaccagcggacaacatctgcaggtatcagctggccagaacctgatagcctctgccggtaaaaatgccgacgtcagcgtggtgaaaaatctgtttatcggggtgggtaatgccctgagcgtttttgtgcgtaagctgggcataaagctgatagcaaaccagggaccggtacagatacaggcccagaacgatctgatggcattgctggcacgaaaagaaatcagcatcgtcagcacggaagatgaaatcaaaatcatcgcgaagaagaagctgacggtaaacggcggggggagttacatcactctggatgtcaatgctattgaatcagccactatgggagatttcaggacaagagcagggcattacgcgagacagacgagagcgcagcataagcctgatatttcacctttagccaatgctatagatgatggcagccataatattcgttatttgtgtgtagatgataatggggtaccgatgcttaataccccatacaaggcatttctggctgatggttcagtaatagagggtgttagtgatggtgaggggtatacgaagttgtttacgtctgcacagactcaggatgttctgctacatatgatgccggaggctattaatgcctaa

SEQ ID NO: 200641 - DNA, 381 bp, Klebsiella oxytoca
atgaatgaaacgacagaaaatgtctctttgcaaaagtatggagacagatatgttttttcaaaagagtattttgataacaccaaggctatagagtttattacatttaagtatgaaaacaaagtcctttcacctgtaacatattattatattgagagttctattgatttcagtaataacgtaaagaaatggtctggcaaggaatgtggtacatcggcaggaaaaatccctgaaaaaaaagatggcttattgttacaagtggcctcagaattatgtgttaatcaagttaagttagcatacaccccaaataaatatataggaagtgatatcttatttcatctatcgcaatttattaatggtgttgaaaaaaacagcttcctgtaa

SEQ ID NO: 200642 - DNA, 681 bp, Klebsiella oxytoca
atgcatccgatggtgtttttgagttcaatgatggacgaaaatgagatggctcttaattggttaaaagtaccgaaagggcagcttactttcgatgctgagggaaatgatattaatactagcccatggtttagtcgtaaaattcattggccaggcggagtatcaggtgtgacaattgggcgtgggtatgatcttggacaacaaactacggcaaatgctgaccttactcagataggtattgccaaactattaaaatcttggcttgtcggttctcagggtttatctgggctagatgcccaatcaaggtttaactcagcttctgaagatatacggaactctacgataaccagaaaacagcaatatgatatgtttatgattagttatcaaaggctagaagacgatgttaaaagaatatgccagaagctaaatacgattcgtgtctatcacccaaatcctcaagcaacaccagagcaagcatggaacgatataccagagaaaataaaagaagtacttattgatctccgctatagaggtgattatacaccccatgccagatctcttatgcaacggtatgcatattcaggggatttaaactcgttcggtaatgttttatctacccgaagcaattggctaaatgttccagaagaaagatttaatcaaaggatttctttttatgaaaactaa

SEQ ID NO: 200643 - DNA, 585 bp, Klebsiella oxytoca
atgcaccgcctgaaggtactcctgctccgagtaatacccatcctggttactgtcaatcaacgccagcaatcgctggtagttatatttgttcagggcatgagtggtgcgcgtttcatcctgtgccgctttatacaactgctccagaatacccttcaccacgttattcggttgttttattccatcaatcaggtcaaaactttccggagccttattcagtgtgacaaatccgagctcaccaagcgcatactgcgatactttctgaacactggctgcggccagccagccaccttcaggacgtatctgataatatgccgcatccttgttactgctcagcgtattcccctcagcatcaacgccagggacttttgccagtgtcagaatacccgatatctttgttttacgactgcccgcaaccattccccgctcacccttttcaaacaatggtgcatcagctttccaggtcagatacaccggcgcatcctctcctgctcttccgggattagtgatgaacttctccatatcatccatgctcaggcactctatatgtacctggtagcgcgagcgtttgccgttttcttccggtag

SEQ ID NO: 200644 - DNA, 1110 bp, Klebsiella oxytoca
atgagtcaaagaactataaacgctctcctttctagaggcatagatagtgagttagcagaaaatctttctgctaaagggtttactctgaagttcttaaaacaaatgaacgctgaaatgctttcacgaattggtttatctaagcttgatataaagcagcttcattcgggtgaacgacctcctatacctgaaagtacactgataaatttactttggcacaaccgcagaacttgttgtgtttgccgtaaacagcacaagtcaatcatcgttcaccatatagaggaatggtctgtttcacgagaccattctatagaaaatttggctgtactttgcttagattgtcatgatctagctcacacaaaaaagtctttaagtcaaaacctgaatccaaaagagcttagagaatataagaaaaggtgggagatgattgtcagaaaaaatgatatccagactcttttcaatctaaaaaccgcccgaagctctgctcgttgggattggataaattgccgtcgtgtttttgagctttttgaaaagttaggtttcactataggtgaccttggtgaattcaataatctaaaagaagacggatttattgatgatcgaggatttattacaaatgatttgaaatggaatattgataagagcagaagattttatttccttgattttggtggcgcatttcatattgcaagttatctcggctcaatccttgatattgtgttaaaaaacactccggttatcgacataacaccaatactcaataaaaggaatgaccttagagcgctcgttgaaatgggaagtttcatttcaatacaagcacccttctacttttcgactatcgaaggtggtcttaatgatgttgacgaggtaaaaaaagcatattaccgaggttataatttaagagtggaattcacatttcaaccttggtattgcacgagttctagcgcgaagttcggagctatgactggacgtcatgttcagactgtgtttggatttgtccgcgacatctctacttacgatgatgaacttataatctctctctcttgtctgggcgcgggaacaggtttcaaaaggcatgaaaatagagtgaaatcaatctttgatatgtactaa

SEQ ID NO: 200645 - DNA, 720 bp, Klebsiella oxytoca
atgaatacatggaaagccgcttatgatgcactagaagatttatatgattataatgataatgcattaggcttatttgctctcggattgcgttttggtttagatgacttatcaagtattggagttgatgcagttactgatggtgctgatgacaaaaaacttgatattgtatttattaacaaagaagaagaatacgcagttattggtcaatgttactactctgaaaaagaaagagagagtgctccttcaaataaagcaagtgatttaaataccggggtcgcctggttgctgcaacgtgcaataccagaggttcctgatagaataaaatctgctgcaattaaccttcgagaagccataaaggatggaactgtaaaaaatatttatatatggtttgttcacaaccttccagaatcgcaccatgttgagaatgaattagttactgtacaacatacaacgacttcaattcttaaaacggtatatcctggaataagtattgatgtttctaataaagaagtaggttcaaatactttacaagaatggtatgaagattgtagaactcctatattaataaataaaagtgtaacgttaaatacaataggtggctatgaaatttctgggaagggatggtcatcttactcaacagctatacaggctagagatctggccaaattatataaaaacataaaactaaaattttttctgctaatattcgtgactatttag

SEQ ID NO: 200646 - DNA, 669 bp, Klebsiella oxytoca
atgcaagagagtatccaactggttattgattccgcgccttttctgctgaagggcgcggtatttacgctacagctcagcatcggcggcatgttttttggcctcgtgctggggtttattctggcgctgatgcgcatgtcgcccgtctggccgattaaatggctggcgcggatgtacatctccatctttcgcggaacgccgctgattgcgcagctgtttatgatctattacggcttgccgcagttcggcattgagctggatcctatacccgcggcgatgatcggcctgtctttaaacacggcggcctacgcggcggaaacgctgcgcgcagcgattgcctccattgataaagggcagtgggaggccgcggcgagtattggtatgacgcgctggcaggctatgcgccgcgcgattcttcctcaggccgcgcgcgtggcgttaccgccgctttccaacagttttatcagcctggtgaaagatacctcgctggcggcaactatccaggtgccagaactgttccgtcaggctcagctgatcacctcccggacgctggaggtattcaccatgtacctggccgcttcgcttatctactgggtaatggcaacggtgctttccacgctgcaaaactattttgaaaatcagctgaaccgccaggagcgagatccaaaatga

SEQ ID NO: 200647 - DNA, 285 bp, Klebsiella oxytoca
atgactgttagtggcaccacatctcgtatcagcctggtcgcctgcacactctggctggcgacgatcccggcccatgcggtcgatctcaactcacaggatctcattccggctcctgccggtaccgatgccattctggcgtatttcacctacgccacgcgagacagctttacccccacaggtggcgacgaaattaagcaaggcaccgggatggactccttcgtcagcatcttacgttacgtccactatatggatgtgggggcttcacggtcgcgccgcaggtgctga

SEQ ID NO: 200648 - DNA, 243 bp, Klebsiella oxytoca
atgaaaagagacggtaaaggcattctgttaaaattgttgatacctgcattcattgtgctagccctgctctattgtatcagtgcaagagccggacaaatcaccctaaccaacccacaggaggaacagacggagaacgggaaaacgctatgcacgtatcagaacagcaattatctgttcacctacgtaactaaggggaaatgtccctatacgaaaaccttcaatgcagaggattcagaagagtga

SEQ ID NO: 200649 - DNA, 162 bp, Klebsiella oxytoca
atgagtattgattcattacgtcttgtttttgtttctggtgtgatcaccattatcattttttcattgctctaccttgcactttggacagaaaactctctcgactctgttactaacttcggttggatgttaaccgaactggccaagcgcttattaaagccatag

SEQ ID NO: 200650 - DNA, 1398 bp, Klebsiella oxytoca
atgaatcaacttatcaaagaggagattgctctagttaggcgtgctgcggccgcaaggcgtagtgtcacacaagccactcagacagcctctataagcactggagggaagttagcaggtgtagggaaagggtttatgtctgggggcttcctaggggctggcacaggcgctctggctagtgctgggatggcaggtggtggtgtattagctgccggatacctgggggaacgtatcagaacggctgtgaccgaacaggcgagggacgttaatgagctatcagcatccgctaaaagcgttaacgtagacccaaataccatcctcgccatgcagaggtatgcacaggttaacgggattgatagtgggtctgatggtgtgacaggacgtcaaaaattggtagatggtatgaaagatttgactgaaaagctcaaccaatctggacaagacagcacatttgataaaaagtctggaaaatggaagggcggcaactctgcaattgataccataatgactgacctgggaatgagtaaagaagaaatcaaacaatattccacatctcccgctgattttatgaatcgtattgttaacgggtatcagaaaaaaggcctcactcctgagcagatgagtaataaaattgagtcattatatgatgatgccatgtattatactaaactctgggctaataacagcgcagaactttctaataattttgaagagttaaagaaagcagggggattgctgactatagagcagcaggatgctgcgaaggaattagcacgcactatgagtttaggtggggctgctatggattcgaaccttcgtcaaatgatggttggatttactcaggcattcggtaacagcgatgattttgttaactctattcagaaattaggacctgcttttaaagagttagggagtgaaacaggcaacctgattaagaatatcaccatgtttgctacccaaattacagatggctattccaaatttatgggatggttacagaaagaatttccctcagtctttaaatctggcgataacagtgtgattgatagtgtaaatggcatggtgtccggctctgctgatggtgctgcttcatgggtaaatgatgtattcggatttgaccctagaaatgtaggaagagggtttaaaggagatggtgggtattctcctaacgttcctcttattacggggaacaatgccatccctcaaagctaccagcctgcatcctattctgcgcctaatatcaccgtcctccctgcacaggtgatgaacgtaattgatgttaaaccggattacagcagaatggggcagtttatcgacctggaagtgacgagtaagcttcaggctcaagctgatcaactagcaattgatctacaaggcgctacgagtgctagcggtaactaa

SEQ ID NO: 200651 - DNA, 186 bp, Klebsiella oxytoca
atgactacgaatgattttatggaagagcaggaagtattcgacctactcaaaaagaaaaaaacagctgtttggcgtttacgaaaggatcatggattccccgaccctgttctcacctacccttccaggtatagccgtaaagctgtaatgaaatggatagacgagggcggcgttaatcgagctgtttaa

SEQ ID NO: 200652 - DNA, 684 bp, Klebsiella oxytoca
atgaccagcaaattaaccagagagcgtatcgagctaatcgctaactttcatcgcgcaatgacactaccgccgagtcacgatgaaattgaagagttggcccgcatggcgctggccgcaatggacagcagcgagtcggttgaactgccgcttgactacctgcaggggcacaaagacggtctggagtgggccgcccaactggcagaagccaatcaccctgaaaccggagactggctttacgatgaccctatcgagctggcaaaggctattcgcaagggtccagatatgccgccagcgcaatcggtggacagcgagccagtggcgtggacgtggcaacatcgcgagcaatggcatgtcaccaatgacgaggagcgcgcaagggatttaacgtgggatggagtcaaggttgagccgctctatcgccacgcgcagcagccggtagtgccggggggtgttcgccaggcgcttagccaaatggacgatgaaattcttgctgagcttaaagacgatgaatcccgtcaagaagggataagaaaatgcatagctgcattgggttatcaccatagacgtgctggagagtgttcacccggctacgctggctcaagccttgaggaggataccctgacggggattgacttcctcagaggagcaaaccgcgccgccatgctcaacggaggtaagtcatga

SEQ ID NO: 200653 - DNA, 405 bp, Klebsiella oxytoca; identical to SEQ ID NO: 194713

SEQ ID NO: 200654 - DNA, 411 bp, Klebsiella oxytoca
atgaacatctcaacagtaaacgagctcattcagtcgcttgagtcggcgggcgagctgtcaatcaaagagcggaagtatctggagttggcgaaagcgtatctggatgtgactgcggagaatgtggggctgaggctgttaatcgccgagaactggaatatgcgtgacctgcttcgtcagttaatggctggacgcccgggcggggtatatttcaacaaatgggagaagctaatcattagggtgctgaacgaaacccacgcaaccgatcgcatcgtagccgggattaaggctgatggggtggaagagtttgcagcgcatcttcgcgctaatgataacggggcatcagtttgcaaaatgattgcgctcggagccgatgatttcgccaagcagctgcgcgagggggccgacaaatga

SEQ ID NO: 200655 - DNA, 399 bp, Klebsiella oxytoca
atgcacaaaacagcacagcagctgattcgtgaagcatacgaggccgctaatggccttccaccagcttcagcggcacttgtaaaagaactggcgtcccgccttgatgtttctatggcggccaccagccaggcttgtgatgagcgctctgccgccatcaataccattaccgctacccgcgttaacagcgaatgccctgaaggggttgatgtccaggagtgggttaaacggatatatgccgaaaacaaaagcttgaggtctgaggtaatggcctgggctaaagagtgtgatcgcattgttgaacgccacacaaaaacccgcagcaatatgcacgtcctggaagctatgcgcgatttgaaaaatatctcttcctcatccaccggcgatgcggaggctgtctga

SEQ ID NO: 200656 - DNA, 234 bp, Klebsiella oxytoca
atgaacaacgaacttatggagttaaggatttccgccattgaggctgcaattaaaactatttcagcagccatatgtgctaacgaaggtccggtatccgaagatttgcaaaaccagatcaaaattctacgcaaccaacttgctagcccaggaaggacagtgaatcaggaggcaattaattatcaggtaattaagcttcttgatccgcttcattgcgatccttgggaaccgttttaa

SEQ ID NO: 200657 - DNA, 654 bp, Klebsiella oxytoca
atgaaaaatgaaaccatcagtgatcgtatcaaccgccgcttgaaggctcttaaacttcggagcagcaatctcattgcagcaacaggtgcatcaaaaggcaccgttagccagtgggttaatggtgggacggctccatcagctaagtacctgagtaaactggcagatgtcctaggagtttctgaaagatggctaactgaaggtgggcttattgaggaaacaatcaacaacgctcacccgggtccggatattagaaggcgtgttcctctactatcatctgttcaagcgggtcactggaaagagatggtagaagggaatcttgatgaagtgactgaatggattgaaacaaccgctaaagtttccccttattcgttttccttaagagttgctggcgactcaatgtcaagcccagcaggctctggggtttccttgccagatggatcaattgttattgttgatcctgatatagagcccactagtggcaagattgttgtagctaggttaaatggctctaacgattctactgttaaaaaattagttattgatgggccaaacatgtatctaatgcccttaaacccagccttcaagccaatcacgatcgattcgacttgtgaaatagttggcgtttgcgtccgagttgaaatgaatttgccataa

SEQ ID NO: 200658 - DNA, 198 bp, Klebsiella oxytoca
atgtttaaacaacaacttattgaccattacggaacggctactgctgctgctaaagcgctgggagtatccaaatccacagtaagcctttggaaagaatgcgtaccttggaagtacgcattgctggctgaaaaagtgacaaatggggtgctgaaatatgacccaacagcatacaagcagcttactcataacgcctcttaa

SEQ ID NO: 200659 - DNA, 381 bp, Klebsiella oxytoca
atgaacgaccagctaattgaaaaacaaattgtggctaagggtaaaaccgcaccacgagtaaccccttcccgtgttgaggcaatcatccgcagcgaacattattttactgcatacgacggccgacgcggggcactggtaaacgaaacttacgaagctcgtgagaaaccgctcgacgcggatgcggatcttgtcccactccaactgctcactttctgtgttctggtccttgagaatggcttcacagtcaccggcgaaagtgcttgcgccagccctgagaacttcgacgcagagattggacgaaacatcgcccgtcaaaatgcggtgaataaaatctggttgcttgaagggtatctgctgaaacagcggctgcatgaagcttaa

SEQ ID NO: 200660 - DNA, 3066 bp, Klebsiella oxytoca
gtgaccattcgattatacccgtcgcgtctgcctggtgagccgctggaaacgtacgaacaccgggatacgacacttcacgactggatgctgcagcacgtcgataactaccgtgacgagacggtgcagcgtgtcgcttttgaggttaacggtaaaccggtcccgccggcagagtggccgttatgttttatcagcgctgagagtgacgtaaaagcgtacccgatccctggtgaaggggtgaccgctacgaccattgcggcatgggcggcagcggctattgctgcagcgtcggctgtttatgtgctgatcaccatgtcgaacatggataaaggcgggtactcgtcctcaaacggccttgggctggatttaaacccggctaaagcgaaccaggcaaaactgggcgatcccattcgcgaagtgtttggccgctgccgtatctatcccgattatgtcgtacagccagtgacgcgctttaatcctgatgatcccacgctaatgactgtcgaaatgatggtttgcctggggaaagggaacttcgcgtttacgaatggcgatattcgggtgggctcaacgccaattttggcgttaggggattcgtttagtcacaacgtttattcacctggcgcggatgtctcaggggatcggcgtagtgaaaactggttcaactcgacagaggttggtggtacctccagcggcagcggtcttgatatggcccagacttcgccagattctaccgatatcactgccgacagcatgacggtttcagggccttccgtaacgttttcggggttggtcgattccagcgttgacgatgatgaagggaactcgctgccagaatcctgggttactggcgcgctggtgacaattgtcgcgccggctaacttccagatatcgacatcggcgggttatagcgtactgacaaatgatcttatcgcggagattaacccgagcccaggaatgccagtcacgctagaaattaacggcgcccagtatgatctgttcattgctacctataccccaaaacaggatgcagtgcctggtgtcggggggaccgcttctgcggtgcgtggaaatgctgcaccgactacttacgatttttcagtaaataatgaaaacttctctctgttctggcagggccactactattttgttcaacttgtggataactacatcacaatgtcagggttgctggatgcaattaactccaagctgacggggtctggattgattgcccatgacgatggcggggtggtgcggatcgtggaaatctccagcccgtggaaaggcggcgatattgattcaattttccctgtatcggttttcggcgatgaccctgagtttactctcgggacagcatcgagtggtgggagccctgcaattacagctaacgtcacgctggcgtatggcagtgaaaccggcgcggcattctcgggcataccggaaggatcgcagcggctttctctcgcacatcgtggtaacgaatatcggattgctgatgcagacggcacgaccgcaacggttcagcgcctgattgacggtgttattgatcccacctggcttggtttttcgccgcgcacgatgattgactaccaggctacggggatcagcgacaacaatacctggatgggacctttccttgtatgcccggaaaatgaagtcgtggacgcttttgaggtgaatttctcgtttccgtctggcatttgtgggttcgacagcaaaggcaaaaagcgcattcgccactgcgagtgggaaattcagtaccgtgtttatggatcgggcgctggctggacgagcaagcagggcgtctatgctctgaaaaacgttaatggcctcggcttcacggagcgattcaatctggcgtcaccgggtctcgtagaggttcgctgcaggcgcctgaatgagcaggggtccaacaacgcccgcgactcgatgtactggcaggcgctacgtggtcggctactggctcggccatcatcctatgctggcgtcaccctgatgggggttacggtagagacgggggggaaactggcggcgcagtcagatcgacgcgtaaacgttgtagccacgcggatttatgattccggcgttgcccgtagtatttctggcgcgctgtatcacgtcgggcaatccctgggtatggagatggacacggccgcgattgatgccctggaggagacctactggaccccgaacggcgaaacattcgactttgctacaggcgacagtatatccgcgctggagatgctgcagaaaatcgccgcggccggaaagagttattttctgctgaatacccagtccgttgcgtcagtgggccgtgaaggggttaagccctggaccggggcgataactcctcacgagatggtgtccgagctgcagacagatttcagcacggttaccgacgatgattacgatggcgttgacgtcacctatatcaacggcacgacctgggcagaagaaacggtgcaatgccgcctacctggcaacccgacacctaagaaaatagaggcataccgggctgatggtgtagggaatccggatcacgcgtaccagattggtatgcgcagactgagaaaataccagctgcagcgcttgacgcataaaacgacaacggagctggacgcgctctgctacaacgtcggggatcgtgttgtgctgacggatgatatcccaggcagtaacactatctcgtgcctgattgagtcaatggctactgctggtggggtgacaatattcgacgtatcggagccgctggactggacgtttgcaaatccgcgaatctttctacggtatcaggatggtacggcgtcacggctgtttgaggcatcaccgacgggagacaactatcaggtatccgttccgtatcaatccgagtttgccgatattctgatgggggatccgataatcgaaccgccccggttaattttctgcagctcagagagtgacctctacgacgccattgtgtccgaagtcgtcccgcaggatgacgggacatgcgaggttaccgcccggcaataccgcgctgaattttacgactacgacaacgccacctaccccggcgacgtcgcgtaa

SEQ ID NO: 200661 - DNA, 318 bp, Klebsiella oxytoca
atgggctttccgtctccagcaactgactatattgagcgcaggatcagcattaccagtctgtgcaaccttggcgcaaatacgcttgtagttgaaaccagtgacggctacgcagtcattgatgtgtccaggcgaccagtgcagggcggcactgtgctgattcgatacgatggacggatggagtttgcgaaagtgatgggaagggcgttaatcacggctgacggggaggcgatcgagggagaggcacttgatgacgttgaagttggcggagtggtaacgcataccatcatcgatttgctgagtgatgagtcgccggtttga

SEQ ID NO: 200662 - DNA, 1755 bp, Klebsiella oxytoca
gtggctacaactgtcaacgagttgacagttcagcaatatattgattcggtgtcgcacatttcaatacttcaatacatcaggccccgtaaatggaaataccttaataatccaaccacggcagaagcgaatatcggagaccttcacgacgccataatgcaggctcagaaagacgccgcatttagtggaaaacctttagttttttgcgggccgtcagcgaaatacctcgaaggagtgacatcaagtcagaatttcttcttccctacatcacctgttgagtgggtagaaggtgctgttatcctggccaccgggcacgggaagtgtcgtctggtccctgttgctggtacacctgacaatgcgtttatattcacgatacccccggccacaggaaagccccgtgtagtcattgatggcttagggttcacaggaggtaactaccgggataaaaatgttgcggggtttgcgttaaaacgcggatgttacacgtcgcatatacagaatatttttattcaggattgttatggcggcgggttcgttattaagcctgaaaatgcgaccgggcaaacagcagcggaagatatcgtaaacctgaatattgataatttaatgattgttaattcaggaacgcaaggtgcttatcaggcattcgacctccagttttctacggaatggggtagcggaaactggacagatggagcagtacgtaacatcgacatatcaactgcgtttgctgacaatacgacaatagccaccgccccaatatctctgaacatttataacgttgggaagcagatatttaacgtcctctttgagaggtggtatacgtctgcaaaagccgcaacacatgtaaaagtgtattcaaacagtgacattcgaaacacaaatctatctttccgtaatttcagcggcgacggcatcgtaaaaacctctgaaccaatgattgatattaatggtcttggatggagccatttagaggatgtatacagaggctctttgattaatggaggccttcgggtcgctaccgcgcagaatgttacattctcgaatatggtgtttggcgcatcaacagatgctgcagggaattatgtgccgcagctccaggttctttcaacggctgtagataccaaattccagaactgcacaatacgtaatccgtttggcacctctgcaccctataactaccgtaagtggtttactgactggattattgatgccggtgttaacacgcagtgggatgggccgcaattcaagtctgatgtgatagtacagcgttcgttcgatttctttaatactgttgcgtctaagaaatgtaccaatgcgtcatcacaaaacgttgatatgaaagccgtgcaaactgacagctatcttcagttaacgtatccggcgacaacgagtgctgcgagtccaaccattaacttccccctgccgttgaatctcaggcagggtgtagcaggggatgattacgtttatgtcatgctgaaagtgtcgtgttcatcagccactatcggtattcacaggttaagtatcaacctctttgacacggagattcggtttactcctgaatccacaggggaggatgtctttatattgggtaaatttccggtgaactcagcggcggtgaatacagggttcagtatcgggctgggatccactgcggcaacaacaaacgattttactattcaacttaaagagattgcaattacgtctggtgcgttaccgtgggcaccaaactaccgcaagacactacaggtaatgtga

SEQ ID NO: 200663 - DNA, 255 bp, Klebsiella oxytoca
atgtctttgattgttgatacggtatttaaggggatttcagttgagagcgcaaaagtcaccgtcggtgatatctatattgctgacggacatacggtgctgtctgtaacggcaaactggtcagcgcctggttcatctgaattttttaaacaaacgacctataactgcccgtacgacatcaacggagcagacccggtaactcaggcttacgcatatctgaaaacgctcgaagagttcagtggtgcaactgagtcgtaa

SEQ ID NO: 200664 - DNA, 2154 bp, Klebsiella oxytoca
atggcagaagttccactcccaacgccgacgcaggttccggtaccgagtaccgatatccgtaacgcggtatttgcaggcgcgaagcttgacgaagaagttactggagccggtgaattctatactgaccgtcttggtgtaaagcgcctgacgaacaccggaagaaataatcagttcgatgccgcgcagctggacagagctaatcggtttgagcaattccttctgtcctccggctacgtttttcttggcgactatgaggatggcccattccagttcagtgcccgtaaccagtacatccgctataacaaccagtattaccgtctcaatgctgctactgatgtcggttttacaactaccggaaccgacgcaaccagctttgcgaatgatgtgactcacttcgttctgatggatggcgatactcttcgctcaaacctgggttcaagcgaagagggaatgggcgatgatattgttacacactctgacggcaaaacagtccgggagcacatcaaatatctggagcgggataagctatcgttttacggatccacggcaacagggctactgaattttctggcatacgccgcagcgtctggccgtgagtgcattgttgataccgtggtgaatttaactgttgctgttaatttcgatgcgcagttctcaaatattcatttgcgctgggaagcgccgattaacagcgatacgcagctatttaacctgcataatctcggccctaaatccattctcaaagatatgtggtttcagaacatcacagccccctgggttattaatcgctgggatacggacggaaactggatagataacgcagaaatcattgccaattcagtcgttcagacgaatgaagaagcaggatatcaaccaaccgccagcgataaagatgtctggcctttattgtctgacacagtaaagaatcaacagatttgtggcggccccatcattcacacctcccgtggtgtcacggtgctgaatccgagggggagatatattgcgattaccttcatggactgtaatttctgtaaagtcgtccagccatcagtaatgggcgggaagcaccagtacggcaccattcttttcaataacaccgggacaactgcatggggtaagggaaataaagtcattgatggcgaagtgagatatggctctgtatcaggagtggtatatatgcgccataaaggaaagtcgagtcgtatttctggcaccaatgcctaccggtgcggagagtccggatttaaaacgtatcagaatgaggtcaatggccgctcagcgcgttgctacggcatgaagtgggataacctcacagcggagcagtgttatttcgacggtttcgacctggcgtcagattatggtgatgccgctcagcgtgtagatgattacaagctggagcaatttgcatggaacctgcttccgctcaaacatgaagttaccaatctgacggctatcggttgtcacgggacgggagcctggggagacggtcagggcagcacttacaagggccttcacatacaggattgctacagttcgggaactaattttatcggcaggtataacatcattgatgacgtgttctcgaagaacaacaaccggaagaatgcagcaatagctgacctcgtcgctcagattaaggttccgggacaaaataacaaggtcagccgcgtcactatcatcgtcgacgatacggcaattaccggcggatatgggctctacgcaccatcgtcgatggtaactgacctcgatactgactggtgcaccttcccgagcctcccttcgtttagtgagttgtcgaacctgtcactgggctcctattcctcgactgaaacacaggtatggattgacgggcatccgcgcggggcattcctgacgaacgcgatagggagactcctcttcgagttgacttacggtgttgctggaagtgagcgagggaatgtgagtctccgaccggtttacggcggtttattcacaaatggtctgagggccaggggggaatatggcggcatggcaattttaggtgtcggctcacaaagcaacagcgcatatcttaatcccggagagatgctgctttatgaatctggcggtgtcctcaaactacagttcaaaaatgccgccggaacagtcacaacatacacactcacacaaggttaa

SEQ ID NO: 200665 - DNA, 1395 bp, Klebsiella oxytoca
atgaaccttacaagtattcatgttaaatccctcgccatcaacgcttccaacatctcaacgacaactatcaacggccaggaacactacgtcattcgtggtgcggttccgatagtcgatgacatcgtgatgaatggcggcttgtacccggcggaggagattaacaacagctaccagacgatggaaggcaagctgatgcctctgccgcatccgatggtagatggcaagtacgtcagcgccaacgacccgcgtgcgattaatgcttatcacgtcggtgcttgggcgcagaacgtcagtaagtcgggcgaccaggtcgtcatggacgtttacatcaataaggctgtcgctgagacaaagcccgacggtaagcgtctgattaaccgtctcgacgagatgatcgcagggactaatgttgaccctatccacctctctaccggattgctcaccaacaaagagaaaaaggccggcgagtcgaagggcaagaagcactcctggattgcccgcaacatgcaattcgaccatatcgccatcctcctggatgagcccggagccggtacgccagaagagggcgtcggcatgttcgtcaacgccgacggacaggagggggaagtagaaaccgccagcctcatcgaagccgcgaacagcatgaaagacgggctctggaataaagccaaattcttcttcagcaacgcatccgaaatgtcgtttgacgatatctaccaggcgctgcggatgtccatcaagcaggacgataaaaaatggcgctatgtcgtcagcgtctggcctgaccatttcgtttacgaagaaggcggcgacggcaccaaaccgaaactcctcgatcagaagtacctcatcactgacaaggtagtgaccctggtcggtgaccctgtagaagtcgtgcgcaaacccactgagtacgaagtcaaaaccaacggagaaattaacccgatgaaagagaagatgatcgccgcgcttaatgccgccggcgtaaaaaccgaggggctgaccgacgatcaggtctgggatgcctacaaccagcaggctcagaagaaagcgggcggcggagacccgggccagccacagattaattctgacgcgattaccgcggcggtgaacctggcaattaagccgcttaccgatgagatcggcacgctgaaaacccaactgcaggcgaacgctgagaaagacctcaccactaagcgtcaggctgtcaaagctaaattcccgttcatgactgaagcggcgattaactcgctggccggcgacgcgctgaacgacatgtattcgcagtgccagaccagtactggtcttaacccggcattccagcaagtaaatgctgagaacgaccagtggaaagactacgacctcaatgctggcatggatcaggagaaaaaataa

SEQ ID NO: 200666 - DNA, 345 bp, Klebsiella oxytoca
atgaaaaaatggttattggccttagtgtttgttgtcactattcccgctcatgcaggcttcatgactggcaatgagctttatgagctctacaaagcgtcaatccgtgctggtcaagcgtcggcaagtgacaaggactttcgcgatgcgaacgagtatttgggctacgtaacaggcgtatgggatacgctcgaaggctttgccgtttgcactggtgacaaaatcacaagagggcaaatcggcgacatggtcggtgaatatcttaaaagcaacccaggcatccgagataaacaggctagttccataatcatgatttacctgaactctaaatatccatgcaaaaaataa

SEQ ID NO: 200667 - DNA, 660 bp, Klebsiella oxytoca
atgagcggaaaatactcactgatttatgccgatccgccctggtcttatgggaacacaatcagcaacggcgccgctgcggaccactactcgacgatgcgactcatcgacctgaagcgtctgcctgtgtgggagctcaccgcggataacgccgtactggcgatgtggtacaccggcacccacaaccaagaggcgatcgagctggccgaggcctggggcttcacggtgcgcacgatgaagggtttcacctgggtgaagctgaaccagctggccgagcttcgcattaacaaggcactggctgagggtgacgtcaccgacttttacgacttcctcgacctgctgaatgccgagacgcgcatgaacggcggcaaccacacccgcgccaataccgaagacgtgctgatcgccacccgcggcgccgggctggaacgcaaacacgccggcattaagcaggtggtctacagcccgctcggcgcacacagcgagaaaccgtgggaagttcgccaccgcctggagctgctctacggcgacgtgccacggattgagttgttcagtcgctgcgctgcgccaggctggagtcattggggcaaccagtgcgccaccgcttccgttgagctaatccccggctgcgccatcgacgttgttaagacggaggtggcatga

SEQ ID NO: 200668 - DNA, 981 bp, Klebsiella oxytoca
atgaggtcagcagcttactacaacgagatagacccattcgcggcgcagtggctgcgcaacctgatcgccgccgggcatatcgtcccgggcgaagttgacgaacggagtattgaagatgtcagacctgacgacctcagaggatttacccagtgtcattttttcgccgggatcggcgtctggtctcattccctccgcctcgccggatggcctgacgatcgcccggtctggactggttcctgcccgtgccagcctttcagcgcggcaggcaaaggagatgggtttgctgacgagcggcacctttggccagccttcttccacctcatcagcgagctcagacctcagcatgtctttggcgaacaggttgcagctggtaacgcaaatgcatggttcgaccttgtacaagcagacctggaaggaatggattacgccttcgggcttgtgccgtttacgtcagcgagcatcggtgcgccgcacatcagagagcgggcctactgggtggccaacgccaacagcggcatctgtgaccggagcgggaacatcaggtcgtcagggcgggatgaatattcaaacggcggcgaatgcgccaaacaggggaacaacattgggcggggcggacagaatggcgggctgggtaactccaacgtcgcgcgactggaaggactcagcgggaatgactgcgcagcggggcgggaaagagcgactggaccagttgccgcgtcaggcttacacctgcgggcccttgaggttaacggtttttggcgagatgcggactggcttctttgtcgagatggcaaatggcgtccagttgaacccggcacattcccgctggttgatggggctgccgcacgcatgggacgagtcgagcccggggtggcaagagtggcaagcagcaaccgcgtcggccgcctgaagggttacggcaacgccataaacgcacaggctgccgcggctttcattcgcgcttatatgggggtcacatga

SEQ ID NO: 200669 - DNA, 3561 bp, Klebsiella oxytoca
atgacctgcttattcgcaccttccttagatgaaaacaaatcctttgtatcctctctggcatactggacctcaaccggtaattcaacagataaagccaggctatctggtatcgctacaactaatggttttatttatatccgtatccgttctggagcgaacttcagccttacctaccgaaaaaaaacattactggcgaaatctgatattgacgcagccgggggcgtagcgagctatgccagctatcagaacgtgctggcgaataagcctcttgtcgatattacttcagctcagagtactgcatgggtgaacgggcgagtgatttatgccgatggtacccattcagatgccgccggacaggcatggcgtgccgcttacgttccggtaagcaaaggagatattctcgagtatcacggtgagattggaagtgccactccggatgagcttctggcctacattattcagctcgacaccagccttaatgtggtgggtaatctgacgacgtacctctccacgggaacgccaaaaacaggtgttttatcaggtgttgccacccaggatggcttcgtttacatccgtgtacgggtgacaacaccagcagctgtcatttatcagagcaggcagcgtttcatgcctggcgctgatgtgtttggtgttaaaaccgattctaatgtggccgaggctaatcgcgtgactacagatatcaccgaagcttcaaccactacgtacattcccggtcgggtcatatactctgatgggctggtttctgattcagcgggcgaaagctggaaagcggcgtatgttccggttaagaccggggatatcgtgcgctacttagggcagatcggctctgctacggcaggcgaggtcattgcctacatcattcagctggatgcgacaatggcggtggtagccaacctcgccacttatacctcaccggggggattcagtaatggggtcatgaccggtgtcgccacgcaggacggtttcgtctatgtgcgcgtgcgcgtcactaccccggccgctacgatcaccaaaacgtcgtcgctatttgtgaccgtagaagaccctctcactctgcgcacgaaggcttcgcttactgcgaccaacaggacaactaccgacgtcactacatccgacacaagctacaccgtaaccgggcgggtgatgtacgcggatggaacggtaaccgacaatgccggcgccagctggcaggccgtataccttccggtgaaggccggagatctcgttacgtataaagggcagctagggtctggtaactcaggagagttgatggcttacgttatccagttggataacgcgctgaggtacgtggggaatttaggcgtgtatacctcgccggggtacacgagcgacgggaccatatcgggtaaggcgactcaggacgggtacgtatatgtccgcgttcgtgtgactccgacggccgctacgattacgaaaacggcccagttgtacgctttctccgacaatatcacgggcgcaccagtaaccgttgattacaccagcaatgcatcagctattgtggataactccgtgatgtatagcggaggacgtgtagtatcgggttccgcttatattgcgtggcggatgtattacatcccggttcgtaaaggcgacattgttctgatgtacgggcagtacgggtcagcgattgtcggtgagcagatcgcctatatgatgcagtgcgacatgaaccgcggatgggtcgaagacctgtatgttttctccagtgccggaggttatgtctccgctaccaggcgagccgcggccactcaggacgggtacatagctgtaagggtgagaaagactatagaccccgtgtacagtgttaagcggcagtaccctaacagcctcgcccgggtagacgacgtttctgcaatgatcgcgcaagcagcctacagtactcgtcctgtagcgaaagtattcaatgcgcctcatcacgttgacctgtcagggcttcctgagaggaccccgggatttgagagtttcagcaaccctctgggatacactttcactaagcaatgggcccgccgggatttttacaatgcagctgactcgttcatgctctctttcatggacctggaaaacaatccctggaacctgcagagcaatatctacgatattcccgccgggaatgtgtttacttattcctggtcagcaggaaaagtctctttccgcaacccgacagcaaatggccgggtggtgatgttcgcggaccgctatatgccctttgcaaccagtgagattgcgatcgaccggctggcaggtaatgccacaatggggattatgtttgcggatgttgaccagcagaacagtgtttcggtccgcgtctcaaacagccaggttatctgcgaaatttacgccgccgggagtctgcttgatacgaccacgttcaccggctcggatatgaccggcgcagtgcttcaggtgcagaataccggggtgtcactgctgctgaaaaaagtgaacgctgacgggacatggaaatggatcggtcgctatgaacattacgccatttttgatgcacgaaaactggaatacctcgatacatggaaaacctgtgtgtttgcgcagaccgatgcatattcttccagtgatgtggctgtcttcagtggtttttcaaaccgcattgccagcggggcaaattccgtctccattcgctttctgacctatgaagacggaacgtttattcagcgcgggaactggctttattttctcgttgagggaacagggaccactatctccgacctgtacacacagatagtacgtatcaacttcaacagcggtgaagtacagatgatcggcgctattttccaggtgcggactgacggaaccgatgaggatgtcgtgctgggtgatgacagtatcaaggcggtgtatgaccggaacagtcagagctggaaaggtatctcgtgcggtatggactatcagggtaaagggctggccgataacaaccggccaaaactctattttgagacgaaacaagacttactgcagggcggcgtgatcatcgtcagaaactccgtgcaactgaagaacgcaaacggcaacttctttggcatcggctccagctatgtggaagacatcgacttctactatgaggcgtcaagcagtcagtgggtgatgacgggaaacaccatctccagtggatgcaaaaccttccggagcccgacgctgtacgacggtattgtgccggaatatacgacggcagaagtcccggctggcgtgcgcgataccgggaatcagttcgttcatttcggcgagacaacctacctgacaagcggaggaacggccaaccgactgcatctgcgcaagtatgaggcaggtctgaccttcttgggggaatttgtgcaggatgtgtatctggcccctaataccaccgggccgtggtgcacgctggtcccattcaccaatggtgatgaaacggaacttttcatgctttcctttgaccgttcagatttgtatgaagggctgggcaacggcgctgcaacgtacgatcacgggggtctgtactgctggaaagcgaaccgtactccagcttaa

SEQ ID NO: 200670 - DNA, 150 bp, Klebsiella oxytoca
atggttataaccataaccataatagctactagcctttttcactataccgttcaaaatacagcctttaaccatcacaccactttgttcaaaacgtttaacactgacctcaatctctttagtcgtattctgctcaaagcgtgcaaccaataa

SEQ ID NO: 200671 - DNA, 609 bp, Klebsiella oxytoca
atgttgaaatcaccactattctggaaaatgagcaccctgctggggtgcattttactgttgtcgatcccgctgatgctggtccggcaactgatcgttgaacgcgcggactatcgtagcgacgtggttgacgcgctggagagcagcaccagcggatcgcagaaactggccggaccgctgattgccattccggtaaccgagacgctaacgcgggttgagggaactaaaacggtagaatatcaaacccaatgggtacactactggctgccggagacgctggcggtcaccggtaatcaggatgttgaatcacggcgaatcggtatctatgaggggcagatctggcacaataatctcagcgtcaaagcgcattttgatccttcgcgcatcaaggcgctcaggaagcagacgattacgctgggcagaccgttctggttgtcagcgtcagcgatgcgcgcggtattggcgagattaagtcaccagagctcaatggcgagaggctacccgttgagcctgggccgggtctcgacgatagcggggagggcattcatatgccgatgccgctgttactccctgaacaaaaagcgctggatattgaattcacgctcaatctga

SEQ ID NO: 200672 - DNA, 612 bp, Klebsiella oxytoca
atggcaatgactgagagaaccggccatctggcctggtgtgcactggtggcgcttgcgctggccagaaagaacggcgatgtgctgtcaccggtacaggaaaatctctttctcacccgctggctggcggcggcgctgaagcaacgacgattctcacgtgatgtcacgccggacattgagtggatgttgaaacaggggcgtcagctgggcgtaagagcaaaccttgccagcaaactggactatgtctggcgctcctgtaccggcgagctgactgagcagaacgacatgttccggctgacgtatgcgctggaaaccgcgaaagacatggcctggaattaccgcgtaatgagcgacagggaatgggccggacgatatgctgtggtactcaattctggagtaaacggtgtttatctcttacggacaaatctcgatgccgcttttgacgacaatggccagcagacaaatccgctgacagtacgtctgacagggaacgtagcagggataatgaaactgttaaatcgctgtggctggcaggctgagcctgagtctggtgcctccctgccccaccagttttcattgatggcccggcagggagtgacaggaaagggggattag

SEQ ID NO: 200673 - DNA, 222 bp, Klebsiella oxytoca
atgaccatcgcacaacagctcgagcaaaaaggtattgagaagggtatccggctaggcaggcaggaaggtctcaatgaaggcaagctgcaaggcaagctagaaggtaagctggaaggcaagctggaagttgcccgaaccatgctacagaacggtattgaccgcaataccgtgataaaaatgaccggcctgacggaagacgacctggcacaaatccgccactaa

SEQ ID NO: 200674 - DNA, 513 bp, Klebsiella oxytoca; identical to SEQ ID NO: 130531

SEQ ID NO: 200675 - DNA, 471 bp, Klebsiella oxytoca; identical to SEQ ID NO: 130530

SEQ ID NO: 200676 - DNA, 306 bp, Klebsiella oxytoca; identical to SEQ ID NO: 130529

SEQ ID NO: 200677 - DNA, 432 bp, Klebsiella oxytoca
atgacgaaatccattgccaccgcctcgatcaaccgcgaaaccgccgtcgccctcatcgacgcggcgatcgccgcggcacgtacaatcggcatcccggctgcggtcgccgtcgtcgacgccaccggtaacctgcgcgcgttcgagcgcactgatgacgcgccgtttctcaccgtcgatgttgccatcgacaaggcttggagttccgcctcgtttgggtaccccacccatgtctggaacgactatgtttcgaacgatccaaaagtggcgccgctggcctatcgcccccggatggtcgctgtcggcggaggctatccgatcctggaagacgggaagttgatcggcgggatcggcatctccggaggcaactatcagcaggatcaggatgcgtgcgtcgaggcactcacgaaaatcgggttcgagctgccagcctga

SEQ ID NO: 200678 - DNA, 1011 bp, Klebsiella oxytoca; identical to SEQ ID NO: 130527

SEQ ID NO: 200679 - DNA, 1269 bp, Klebsiella oxytoca
atgactattatcaacgctaattactatctggagcaactcttggctcccgccgcactcgagcgcattgctcggctctgcaagttttgtctgcgtcagcgtgccattaccccagccatgctcgtacctgcactgctgcgggccatgggaggcgaccaggtcaatgacattgccggtttacaccgccatttcaatgccttgcaactggtaaacacccatcaggtttcttacaaaccgtttcacaatcagctgcgcaaagagagctttgccctgtttatgaaagccctggtcgagcgggccatcgccttgcgtatcgaccatcaactcaaagcagcctccctcggcgcgttcaagcaggtgttactgcacgatggcacctcctttgcggtgcatcggcgccttgctgctgattttcccggccggttcaagaccatcagtccggcagctatcgagtgccatatgaccatgtcactgtcggagcagagcccgttgtgcatgagtgtgtctgccgataccgcaggggaacggcaatttctgcctgaagcccacacgctgaccaactgcctgctgctggctgacgcaggttacattgacagggcttggtttgagcaggtgaacgacgctggcggattttatctggtgcgcggcacgaaaagcctgaaccccaagataatccaagcctggcgcggtgatggacgggaagtacccaagctggcgggactatctctgagagaggccggacggcgacgctgtcgggccgaggtactggatatggtggtgaagtccggccaggtcgagtaccggttgatccggcgctggtttgctgaggaaaagcggttctgtctgtggatgacgaacctaccgcgagcagcatggtcagcagagcaggtgatgagcctgtatcgctgccgttggcaggtggagttgttatttaaagagtggaaatcgcacaaccggctcaaggggtttgtgacgggcgagaaagcgattgccgaggggttggtgtggacgagcctgctgtcgctggtgatgaagagacgggtcgcgcagagtgtgatgagtggggcgctatcgatgctgaaagcgtcgaagaacagtgcgacgtggtggctaccgctattggaagcagtggcccatagggcgctgacagaaataagggaaagattggaatgggctgccgattatttggccaagaacgcctgccgaaccaagcagagaaagtcgatacagaacaggaccttggaaggcgttttaaatggactcgccgcttaa

SEQ ID NO: 200680 - DNA, 372 bp, Klebsiella oxytoca
atgactcaggaaaggatccagacccgctacccactcggcggccccttcgccacccaggctgagctggagcaggccatcacccaggccataacgacccacagacaagatttcttccctctgctggaacggctggtggacgtgggggacacccgggtcaacctcagtcaggagaacccgctgcgggtgctcagcatcgaactcgctgacggccgtgaaggagtggcccatatcaactacgagtccaacttcgccgagagctgcctgattatcaacgaatacgaccagcaccagaccagcctggcctttcgcctcgacggggatgcacttatcttcgacgtcgaactgccgatcgcgtggaatttcaataactga

SEQ ID NO: 200681 - DNA, 1275 bp, Klebsiella oxytoca
atgactattataaatgcaacccagtacctcaagcaacttcatagctcttctgaactcaaccggatcggtaaatttaccggtttttgtcagcgactccgggatatccagcctgcgagactactcccggctctgctctcagggcttggttgcgacaaggtggatggtattgctggtttgcatcgccatttcaatgcgttgcagctccatgatactgaccaaatagcgtataaaccctttcacaaccagttacgcaagcagggttttcccttgttcatgcgcgcactggttgaacgagccatcgccttacgcctcaaggagtgtctaccggacgcccacggactggcaggctttgagcaggtactgctgcaggacgggtcgtcattcgcgttacatccgcaattggcagaacatttcccgggccgattcaataagcacagccccgctgcggtagagtgtcatatgaccatgtccttgctggaccagtcgccgatatcgatgagtatcacggcggataccgaatcggagcgcaagcatcttccggccgcaaattcgttaaataacaaactgttattggcggatgccggttacatcagccgcgagtactttgctgatgtgaccaaagccaaaggaagctatctggtcagagggagtcaaaatctcaatcccaaagtacaggcagcttaccgacaggacggcagggaaatgcccaagttactcggaaaaaagctcaaggatatcgatcggagaagctgcagagccgaggttctggatctggatgtgagttcgggaaagtataaatatcgactcataagacgttggtttgcagaggaaaaacggttctgtatatggatgaccaatcttccgcgtgagcgatggccagccgagaaggtgatggcattgtatcgttgccgttggcagatcgaactgttgttcaaagagctgaaatcacataaccggttgaaggcgttcgcgacacgacaaaaagcgatagcggaaggcttgatctgggctagtttgctggccttgctggtcaaacgtcggctggcgctgacgctgattggcagcgcggagttatcgatgctgaagattgccaaaaacagcgcgctttggttaatgccgatattggcgagcatcatccatggtgcgtggcaggaaataacagagaagttggagtgggcaatggtgtatttatccaaaaacggcaaaaagagtaggcagagaaaatccaagcaaaacaacacgttagacggtattattaattcgcttgccgcttaa

SEQ ID NO: 200682 - DNA, 990 bp, Klebsiella oxytoca
atgacgacctcgcaccccgccggatggacggcgaccgagttggcgcaggcggttgtgcgcgggcaacttgagctgcattaccagccgatagtcgatctgcgcagtgaccagattgtcggtgcggaagccctgttgcgctggcgtcatccgacgctcgggctgctgccgcccggccagttcctgcctgtggtcgaatcgtccggcctgatgccggaaatcggtgcctgggtgctgggcgcagcctgccgccagatgcgcgagtggcggaagctggcgtggcaaccgttccggctggccgtcaatgtttcggcgagccaagtgagaccgggtttcgacgggtgggtaaaggacatgctggctgatgccgagttgcccgccgagtctcttgaaatcgagctgaccgaatcggtcgcgttcggcgatccggcgctcttccccgccctggaagccttgcgacaaatcggtgtgcgcttcgcagccgatgacttcgggacggggtattcctgcctgcaacacctgaagtgctgcccgattactacgctcaagatcgaccagtccttcgtcgccggactcgtcgccgatcaccgcgaccgaaccatcgtgcgctccgtccttcagcttgcgcacgggctgggcatggacgtggtggccgagggcgtggaaacgccgaccagtctcgcactgttgcggcaagcggagtgcgatacgggacaaggcttcctgttcgccaagccaatgccggcggcggccttcgccgcctttgtcagccaatggaggggtgacaccatgaatgtaaataatccgactaccagcagttgctgcgtgtgctgcaaggaaatcccgctcgatgccgcctttaccccggaaggcgtggagtacgtcgagcacttctgcgggctggagtgctatcagcgcttccaggcgcgggccaaggcagagaacgaaaccggtgctgatccgaacacctgcggctcgctgccgtcagactga

SEQ ID NO: 200683 - DNA, 237 bp, Klebsiella oxytoca
atgaacggcccggaacgcctgccgaccaagacacgcaagccgttcaccggctacctgtggggcgcgctggccgtgctcacctgtccctgccatttgccgattctcgccgttgtgctggccggaacgaccgccggcgcattcatcggggagcattggggtattgcagccctcacgctgaccggcttgttcgtgctgtccgtgacgcggctactgcgggccttccggggcggatcatga

SEQ ID NO: 200684 - DNA, 423 bp, Klebsiella oxytoca
atgggactgatcacacgcattgccgacaaggctggcgcgcttggcagcgttgtttccgcgatgggctgcgccgtgtgcttcccggccatcgccagcttgggcgcggccttcggcctcggttttctacaggaatacgaaggattgttcatctccaagctgctgccgctgttcgctgtcgtggctttgctggcgaacgcattgggctggctcagtcatcgccaatggcaccgcagtctgctcggcatgatcgggccagccatcgtgttcgctggaactgtctggctgcttggcaactggtgggcagcacacctcgtatacaccggcctggcgctgatggtcggcgtgtcgatctgggacttggtttcgccggcacatcgccgttgcggcccggacggttgcgaactccccacgaaacaaggctga

SEQ ID NO: 200685 - DNA, 627 bp, Klebsiella oxytoca
atgggaaaggttatatcgatcgttggtcagaaaggcggtggttcaaaaagcaccgaagctagaacgcttgctgttggattttcagaagctggatggaagacgcatctggctgatatagacaccaaacaacaaacctcactgaagtggacagaacgacgcgagaaaagtgggctaagcccgatagattgtgctctttaccgccgggttgaaactgctgtcaggatgaaagatagctgtcatttgctgatcatcgatgggcgccctgcagcagagacaacgtcactggatgtcgcagatgaatctgacctcgtcattattaccacggggactactattgatgatcttgaaccctcacttgaactggctcgtgaattgataaagaaggggattgataagagcaagattgtctttatcgtttctaaatcaccatctcaatcgcagggcgaaaaagctcaggaaacaatcaaagcgtggggttataaagtaatcaatacagtcatccccttcaaaaccagttacggcgaagctcttgatactggacgggcattacatgaaacgccattcaaatcgttgaatgagactgcaaaacaaatgattgaagagattcatgatataattaattcatga

SEQ ID NO: 200686 - DNA, 228 bp, Klebsiella oxytoca
atgaaaggccctggtaaatcaattaaaattgagcccccgaaagaggacgaaccgacactggatgttaccggaaaaggggctgttccggattcggctgtcaaacctatccaaatcaaagttccggtgtcgaaacataaagaaatgaaggcatatgcagcagagcaggggatctcgatgaccgatatgctccttgccgggtatgacatgtacagaaataaaatgaaataa

SEQ ID NO: 200687 - DNA, 462 bp, Klebsiella oxytoca
atggctgccggaatgagtcgcagggagcccctgtttgacccggaggcggtgttcactcttccggccacgccatcttccctgcagctgcccctgtttgcggatgcctgtgcggcgggttttccgagccctgccggggattatgttgagcaggagctggatttaaacagcctgtgtatccgccatccggcagccacttatttcctgcgcgccagcggagagagtatgaaagacctcggtctgtatgacggcgacattctggtcgtggaccggtcggagaccgccgtggacggcgatgtggtgattgcggaagtggacggcgggtttacggtaaagcggctgcgtctgcatccccgccctgccctggagccgatgaatccggcttatccgacgctctggccggaagaactcacgctgttcggcgtggtgatgcacttcattcatcgtacccgcgcccgcctgtaa

SEQ ID NO: 200688 - DNA, 246 bp, Klebsiella oxytoca
atgttgcagatttccgtccgtttttccccggagcaggtgaaggccatgcgcagcggcacctttgccgcactgcagcaggaaattgagcgccgcctcaccccacgataccctcaactctggctgaacatcggaaaaagttcgcagaccgcgctggatgtcagcggcgcgcgcagcgacaaggaaaagtcggacatcatgaacacacttgaagccatctggcaggacgacacatggctgccggaatga

SEQ ID NO: 200689 - DNA, 258 bp, Klebsiella oxytoca
atgtcgcagattgaaaatgctggaacttcctcatcgaaaacgaaacgagtcaatcgaaaaaggcaacctttatcgggggcagagaaacagaaaatgtttgtttcccgtaaaaaagaaacgcataaagcaattaatgtctttatcgataaacaacttaaagatgatcttgtccagctgtgtgaaaccacaggattgactcagactcagatgattgaacgctggattcagagtgaaaaagcccgtgttttcaacccataa

SEQ ID NO: 200690 - DNA, 561 bp, Klebsiella oxytoca
gtgaaaaaaatgaaccgtacgctccgcagatgttgtctgtacgggcttatcagcctgtctttgtttgcaccagttccggccgtgtatgccgccagcatcgagacggggtattcgccggaaggaacggctctgcagctggtcctgaagactattaattctgcacagcaggaaatccggctgatgggctattccttcacctcacccgaagtcgccggcgcgcttgtcagggcaaaacagcgtggtctcgatgtgaaagtggttctggaccacaaagccaataccggtgagcgcaacaaggccagccgggctgccatgaatctgctggtcagcgcgggtataccggtccggacggtggatacctacaaaatcctccacgacaaagtgatcatcgctgacgggcgtaatacggaggtcggttcgttcaatttttcccgcgccgccgatcgcgccaactcagagaacgtgctcgtcgtatgggatgaccctgtcgttgctcaacgctatctgcagcactggtcatcccgctggtcgaagggaacggactggaaacagacgtactga

SEQ ID NO: 200691 - DNA, 645 bp, Klebsiella oxytoca; identical to SEQ ID NO: 92409

SEQ ID NO: 200692 - DNA, 2688 bp, Klebsiella oxytoca
atgaaatatcatttttttcagaaaaatagactcacccttattactctggcaagtttagcgttactggcggggtgtgataattcggatgattatagcgagaatcatccctcacatcagcagtcatcgtatcttgaaaaatatcgccctcagctacagtttactgcggctaaaaactggcaaaacgaccctaacggcatggtttattttgacggcgaatatcatcttttttatcaatataatccgaatggtaatagctggggagatctctcgtggggacatgccgtcagtcgggatctggtccattgggaggagcttcccgttgcgctgccggtggaaaaagatgccgatggtaacgtcacgcagatgtatttttccggcagcgcggtagttgatttcaataatagtagcggttttggtaaagcggatcggccggcaatggtggctatgtacaccagctattatccaaccgacatgacgctggataatggaaagaccatcgcggcaggaacccaggcgcagtctattgcttatagcctggataaagggcgaacctggacgcagtatgaagataatccggtcatccctttaccgccagcgggctatgagagtcagtttaaggaatttcgcgatcctaaaatattctggtatgcgccggaaaataaatggatcatggtggcggtcattgcgactcagcataaagcggtattttattcatcgaccgatttgcgtgattggaactttatgagcgaatttggtccggcgaatgccgttggtggcgtctgggaatgtcctgatttatttgaactgcctgttgacggtgacagtaataataaaaaatgggtaatggttataaatattaatcccggcgggcctgctggcggatcgggtaatcagtattttattggtcactttgatggtgaacgtttcacgcctgatgatgatagcgtgttcaacggcgaggcgcccgtcggttcactcattgccgatttcgaggaaagcgagagcgaatccggctggacggcgacaaaagatctgcagggggcttatctgtctaaaggcgaccgcgccgggcagtctggcgttagccagtatctgggagagcagctcgtcaataccttcgttaatggtgatgccagcgtcggcagcataacgtctccggcgtttaaaattaccgatcgctacatcaatctgctggtcggcggcggcaatcatccgcgtaacccggatgcggtcgaagacagcgttccgccttccggcgatctgctgtttgccggtgccgattttgagggggaagatggcgcaacctatgatgatattggttggacctcaagcggcgattttgttggccaggtcgttgccagcggcacgatagcgacgcagcagcaggtctccggttttatgggcaggaaactggtcaacagctattttggtgaattagtgggtaaagggggagatgcggtgacggggaccctgacttcagcgaacttcaccatcaataaaccctatatcaacttcctcgttggcggcggtaatcatccttatggcgcggaaggcgcggcggccgtcgtgctgttggtcgatgataaagtcgtcaggtcagcgaccggtagcgacagtgagtcgctgaactggacgcactgggatgtacaagagtatcagggtaagcccgcccggataatgatcgttgatgaaaataccggtggatatggccatatcctggctgaccagtttatggccggggatgagccggcgcagccaatatcaacggagaccacggttaacctgctggtggatggcaaggtcgtttatagcgcaaccggggataattcggaaacgctgggctggcgctcctggaacgtggccgcgctgaagggagagatggcgcaaatccgcattgtggacaatagcaccgccggttttggtcatgtgctggtcgatcacatcatacagtccgatcggcccaaacagattgcgaactggggggacttcgggtcggatttttacgcggcagtgacctggaatggcgcacctgatggtaaacgctattggcttggctggatgagcaactggaactacgcgggcagcattcctaccaccccgtggcggggcgggcagactctggttagagagttaagtttgcagacgattgataataagattcgcctggtacaaacgccggtggatgcgctgaaatcgctgcgtaataacgccttgtttaccctgtccgaggagaaggtggttgcccctggcgacacgctattagcggatagccaggttcagggccatgtgtatgaaatcgaggcggagctgcagccaggcagcgcgagcgaagcgggctttaaggttcgcacggggagccacggcgaggagacgctggtcggctatgatgccgcggccggcgaagtgtttatcgatcgtacaaaatcgggaacgaatgcgtttaattctggatttgcggcccgccatagcgctccgctgccgttgtcggataacgcctcggtagcgctgcgtattattgtcgatacttcatctgttaccgtcttctcagggaaaggcgaagtcgtgctgacggatcagattttccctgagccgaccagtcaaggcattgagatatacagtaaaggtggagatataaacgtaaaatcgttgactatctggcctctgaaatcaatctgggcagataaataa

SEQ ID NO: 200693 - DNA, 1218 bp, Klebsiella oxytoca
atggccggtaacgtcagctatggctcgctgccgttcagcgagcagatcgccttcttccgtcgcaagttcagtacgaagaccgatgcctggacagatgtctatggctccgcgcatgacaatgagtttatggttgccggagccagccgggatgccctgctggcagacctgcgtaccgcagtcgagaaaagtcttgacggtggtacgctggaaaccttccgcaaggacttcgcggccatcgttgcccgctatggctggagctataacggcggctttgagtggcgttcgcgagtcatttacgagaccaacctgcgcagttcttacatggccgggcgctaccagcagctcatggccatgcgggatactcacccctactgggagtacgtccacagtgatgtggtcgaacacccgcgccaggaccatctgggctggaacggtatggtgctgcgggcggatgacccgtggtggatttaccatttcccggtgaatgcctggggttgccagtgtagtgtgattgcccgcaccgaagacgacctgcgacgcatgggcaaagatggcccggatactgcgcccacgattaaattcatggcccgcgtgattggtcagcgcagcccgggcggtccaaggaccgttattgtgccggaagggatcgaccctgggtttgagcataccccgggccgcagccggtatttcagcgaggtgcctccgccccggggcaatagcccggtcggagacggaccgttcaccccagtggcggaagctccggctaaaacggcaccgttgccagcaccccgtccggctctggtgcctgaaggcgagaccgaccctgtggatgcgttcctgcagctgttcggcgcgaccgctgaccgtgatgcggcgttccgggacccgacgggccagcgcattgccattggcagcgacatgttcgcgtcgccggagggtcagggccagatacccctgacgctggcgcaggcactgcacctggctgagaccattcgtcaccctgacgaaatatgggcgcagattgtctggttgccggaagagcagcagtcgctggtccggcgttattacctggcccgtctgcagcagcaaggtgaagcggacccgctgtcggtagtgttcgccaccggtcgtgatggctgggccggaaatatttcaactgacgatacgctgctgcagtcgctgcgccagggtatccagctgtggtcgcgggagaattga

SEQ ID NO: 200694 - DNA, 273 bp, Klebsiella oxytoca
atgatccgactcgcactgtccctcatcctgctttgcctgctgagcgggtgtcatccggtcttcgcggtcagcattccggttgaggcccgacaataccagcgcgagctgacccgcaatgcccgcgctgtctgggggcttaatgcccctgtatccaccttcgccgcccaaatccatcaggaatcacagtggaatgcccgggcccgttcgccggtcggagcgcaggggctggcacagtttatgcctgccaccgccagctggattgccggtacctga

SEQ ID NO: 200695 - DNA, 261 bp, Klebsiella oxytoca
atgcgccagaccattaccctgatgatagcccttaccgcactgttgctgcctgcggctgcccttgccgcccgggagcgcgtagaggtgctgcagaaccagcttgaacacccgtgggcgctggcctttcttccggacgatcggggcattctgatgaccctgcgcggcggcgagctccggctgtggcagcgggaaaaaaggcctcgcgcctgcgatctcgggcgtaccgcaggtctgggccaacgggcagggggggctgcttga

SEQ ID NO: 200696 - DNA, 933 bp, Klebsiella oxytoca
gtgaaaacactaacaagaaatatcctccgtaccgcaatcactgtgatactggttatccttgcatttatggcgatttttcgcgcatgggtgtattacaccgcctcgccctggacgcgcgatgcgcgttttagtgcggatattgtggccatcgctcccgatgtctccggcctgatttcgcaggtgaatatcaaggataaccaactggttaagaaagaccaggttttgttcgtcattgaccagccgcgttaccagaaggcgttagccgaggctgaagccgatgtctcctactatcagactctggcgcaggagaaacgcgtcgaagccggccgtcgtaaccgccttggcgtccaggccatgtcccgggaagagatagaccaggcgaataacgttctgcaaaccgttgagcatcaattagccaaagcgacggcaagtcgcgacctggcgaagcttgaccttgaacgtacggtgattcgcgccccggccgacggctgggtgaccaacctgaacgtttaccgcggcgagtttatcacccgaggctccaccgcggttgcgctggtgaagcagaataccttctacgttatggcctatcttgaagagaccaagcttgagggcgtgcgccccggttttcgtgctgaaattaccccgctgggaagcgtacacaccctcaggggcaccgtcgacagcattgctgcaggcgtcaccaatgccagcagcagcagcgattcaaaagggctagcctctattgattctaaccttgaatgggtacgtctggcacagcgggtgccggtacgtattcgcctcgatcaacagcagggcaatctctggcctgcgggtaccaccgcgacggtggtgattaccggtaaagaggatcgcgatactcgccaggcaaacttcttccagaaactggcgatgcgcctgcgtgagttcggttaa

SEQ ID NO: 200697 - DNA, 141 bp, Klebsiella oxytoca
atgcagaacagcaacattatggcgttagcgctcgcgctgtgcaacgccggaacaaatagccgggtgacaatcccccgtttaaccgggaaggagctaaagctattgctggaatggctatcagtgctgagagcaacactataa

SEQ ID NO: 200698 - DNA, 219 bp, Klebsiella oxytoca
atggtgatcaacatgaaacacttatttgtgctgacgctggcgctactgccagccctggcgaatgccggacagataaccttaaccaatccacaggaggaacagacggagaacgggaaaacgctgtgcatctatcagaacagcaattatctgttcacttacgtaactaaagggaaatgcccctatgccaaaacttttgatacagaggattcagaagagtga

SEQ ID NO: 200699 - DNA, 546 bp, Klebsiella oxytoca
atgagttcgtctgcgtcgcagaataataaagatcaagttgttacatacaagggtcgagtactgcatacgcacagcttctcggccctttgtgcatctgaccctgaactaaaaaagcttgctgatgcgtttttagcgttctggaagactggttaccatccagaacttggtaaagatgcagccttcgctcgtccggctgaaatccttagtctcaatgtacgacacactcatgcagataccaaagactacgtaccagaagatagcaaaaaagatcactctgggaaaaaatcttcgtgggatgcatggaaaaacattgcctctgttaaagttaaatacaccccaactagcgatagttttttagtctattcggtgaatcacaatcgcgatgctcttgttatgttttttgtggatagtgatgcccacagcaagacagaaaaagatgagttcaaagaggcagcgatagcggttagctattcattttttgaaaaaacaaaaacccagccaatgccactggaagaagaccttttcgatgagaaatgggaagagtaa

SEQ ID NO: 200700 - DNA, 249 bp, Klebsiella oxytoca
atgaaaaaagcttttggtaaaaaagagttgttgctggtggttcccttatctatgagtacaatcgatcgccttgaacacaaaggacaatttccaaaacgcttttatattaccgatggacgctgtgcgtgggatggtgatgagatcgaacagtggctcgacgaacgtaaggccaatagccctaaagaattcgggagccagaaacctgatgtcaataagcggaaatatcgaccggtgagtaatgcagcatga

SEQ ID NO: 200701 - DNA, 519 bp, Klebsiella oxytoca
atgctggccttcgacatgggcggtccggtgaataaagtcgcctacgccttcatgctgatttgcgtttcccagggcgtttacagcgtggtggccatcgccgccgtcggcatcgccgtgccgccgctgggcatgggcctggcaacgctgattgggcgtaaatacttctccgcggaagagcgcgaaaccggtaaggccgcgctggtgatgggctgcgttggcgtgaccgaaggcgcgatccccttcgccgccgccgacccgctgcgcgttatcccggccaatatgatcggcgccgccgccggctgcgttaccgccgcgctgctcggcgcccagtgctatgccggctggggcgggcttatcgttctgccggtcgttgagggtaaaggcggatttattgccggcctcgcggttggcgccatcgtcagcgccgcctgcgtcatcctgcttaaggccctggcgaaaaagaaaacgtctgacgccaaagccgatgacgagatggatcttgatttcgaaattaactga

SEQ ID NO: 200702 - DNA, 558 bp, Klebsiella oxytoca
atgaatgaactggtgcaaatattaaaaaatacccgccagcacctcatgaccggggtttcacatatgatcccgtttgtcgtgtccggagggatcttgctggcagtctccgtcatgttgtacggcaagggcgcggtgcccgatgccgccaccgaccctaacctgaaaaaactgtttgatatcggcgtggccggcctgacgcttatggtgccgtttctggcggcctatatcggctactccatctccgaccgcgcggcgctggctccctgcgccatcggcgcctgggtcggcaacagcttcggcgccggtttcttcggcgcgctaattgccgggattattggcgggctggtggtctactacctgaagaaaatcccggtgcacaaggtgctgcgctcggtgatgcccatcttcgttatcccgattatcggcacctttattaccgccgggatcatgatgtggggcctcggcgagccgattggcgcgctcaccgccagcctgaccggctggctgcagggcatgcgcgaaggcagcatcgtgattctcgccatcatatgggcctga

SEQ ID NO: 200703 - DNA, 384 bp, Klebsiella oxytoca; identical to SEQ ID NO: 197970

SEQ ID NO: 200704 - DNA, 531 bp, Klebsiella oxytoca
atgaagctgactgctcgtcaggttgaaactgcgaaacccaaagagaagccctacaaactcgctgatggtggaggtctttacctgctggttaatcccaacggcaaaagatactggcgtctcaaataccgttcactaggtaaagagaagctgctcgctattggcgtttaccccgatgtttctttagctgaagccagaagcaagcgagaggatgctaaaaggacattagcggctggcaacgatccttctcttgaacggaaaattgagaaacttagtcgtcaacaagacgctgaaaactcgtttgaggctctcacgcgggagtggtatcagcgtcgctatgaccgctggtctgtgtcctatcgtgaagagatgatgagaacctttgagaaagatgtatttccttatatcggtcaccggccaatcaaagatatcaagccgatggagttgcttgcagttctttcaaagatagaagcacgaggggcaacagagaaagtgatcttgaccctccatctccgaacagcttttgtatcttaa

SEQ ID NO: 200705 - DNA, 1206 bp, Klebsiella oxytoca
gtgtcgatcaagaataattcatacctatttaagcggcaggacggatactggcagtttcagatattcgtccctctctacatgagacatctataccctaacaggatgtggagaaagagcacagggacacgggacataacagaggcgaggaggtttagaaatcatctcctgcttgagtgggaggagcttaaacggaaatatcgccctgcaaatcctgataaatatataaccagtgccattgagtcattgcataaacgtgctgtaaattctcctccttcattgcataccagaacagcccctgctttacgtgcagtgtgtaaggagtatgcggaggcgtatagagagagacgttctctgtccactctgagtaaatcagcaaggtctgtagagatatttctggagagccttaataaaacagatatacatataactaaaatagggaggaggcttgttagtgacttcctagaggtgcagggtggtagaggggtttcaggtcagacgctacagaactggttaacgtgtttaggttccctctatgaatatgctaagaggcgttatgacaatataccggagggaaaccccttccacggtcataacctagaagcacgtagaacaatagagagctatcagccattcaccacaaaacagcttgtaactcttgtagagaatgcagaggatgaattacagggcgtgatcctgattgggctatacagtggaatgaggcttgatgaaatagcatccctcaagcgggacgatattgtagagatagacgggatcagagtgttcagcgtaacaaaatcaaagacgaaggctggcataaggtgcgttcctatacattctagggcacttcccatcgttgacaggtggctctccttaaaatctggtgagtatctcctgccaactgctaacagaattcaacgtgcagacgggaagaaagggccgttttactcccaggcatttacacgactgaggaataaagtgatccctactgcaactaacaggcaatgtttccatagtttgagggggcatttcataacacaattagatagagagggagtagaagaaaccagaataggctctatcacaggtcaggtagagaagaaagctaaaactgaggcattcaggacatatagcgcagggccattaatgaaggaattaaaagggattgtagagcttgtgtcatacccagaaatagaaaaaggggcgtaa

SEQ ID NO: 200706 - DNA, 189 bp, Klebsiella oxytoca
atgcgatttataatgaaagcggctaatttagcattgaaaggtgaagatgcagagaggcttattaatgtgtcagagttatgcagacaattcaaccttaacgtgaacacattcaatacaatgagatttagatatgggtggagtattgagcaaactctgtgcgtaatgttagcagataaagaagaggagtaa

SEQ ID NO: 200707 - DNA, 651 bp, Klebsiella oxytoca
atggctgaaaccatgtttagacagtggttcattttagatgaaacgggtgcatcagttaatctagaacaaataattgactttaatccaaagcgaactttaactaaaagccaagacgctacttatttggacatggctggactaagtacagatatttttcgtgctactggatattacaaacgtccattttcttcgggaaccaaattcactaaacgagatactctgttagcgagaattaccccatgtttagaaaatggcaaagcggcctatgttgattttttagataacaatgaaactggatggggttcaactgagttcatagtcatgcgtcctaaaaaagaaattcatcctatgatttcatatataatgtgccgaaatccagacttcaaggaatatgcagaaagttgtatggaaggttcaacaggcagacaacgagttaacttggattatcttaagaagttcaatgttaatctgccaacaggagcttccctacgcaaaattaatgagttattagattcatttgaaagtaaacttattaacaactcaaaacaaattgacagcttagaaaaacttcgcaacaccctacttcccaaactgatgagcggtgaagtacgggttcagtatgctgaagatgcaatcgcatcagtagcataa

SEQ ID NO: 200708 - DNA, 975 bp, Klebsiella oxytoca
atggcgagaagatcgaagaagagcgtaccggaaacgctgcgtaaacagcttctggcgttgattaccgactttgagtttaagctcaaggacgactccctacgggaacaggttttagcactaatacctgccaatcatttattgcgggatttaggcagttctttgatgaatgatgagaattgcaattcagcccgtgatcgaattctggcttatttactcaaataccccggtgtcatcatccatggtgacgaactgatggttgttgcgggtatcagtgaatatgccagaaggatcagagagctgcgtgtgcagtttggctggcccgtattaagcggcattacgttgaaggaaatgattgaacaaggagaggtgacgctggaagagctccatgcctgtacgattaacgttcttaaaaccgacgtttatgcactgatggcagcagaacaggacagggaagcagccctgcgctggaatgaagctaatatcctcagacgaagcaaaatctccacgaaagataaaattctgtcttatctgcgtaagaacgttggccgtcccgtgaccggcgaagagctacgataccttgcaaacgatagcaaggaatgggcgcgacgaacacgtgagctacgtacggaagatggatggccaatcgccactaagaattcaggaagaccggagctggaggtgggggcatatttacttgaggaagatcggcaggctgaggtacatgatcgaaaaatccccgatcctgtccgtgtcgctgtgcttgagcgtgatcatcatgaatgcaggcactgccactggtcgcatgctcgtaaaaccgctaatgaccctagaactttcctcgagctacatcacattgaacatcatgctaatggcggagaaaatacactggataacttaattactctctgtaatgtttgccatgatgaggtacatcgtcgcaggatttcgcgagaggagttaattcgtcttctgtag

SEQ ID NO: 200709 - DNA, 933 bp, Klebsiella oxytoca
atgtttaatctaattatgggcggagaacctgactattttgaacattggcccatgtatgaaaaggttaatggtagttgtgacttcccaatctcccgcatgttagaaggcacctctgaggacatccgactgaagttaacccctttgaatgacaaggcactatcttatattgagaaattacctacgttattcatgtcagagctttattccagaaatggtgttgagtacataactcttcggcttggtgttatatcaaatctacgaacagttaacaaaaacgttgagttttatttccaaatcactcattcacaagatgatgtggtcgtgatagacaaagagttatatcaaacagttttagaattaggttcatatggattgaaacgtactcactggggaataaaggctcgcgatttaaatcaaacgctagcccttctaaatataacaacaagaagcatgccactccctcctgccgaagcacttcccgatgaaatcgataattacccaataattgataatgttcaaagtttcatggcgtgtgttttagaacaagaacataaagaagatgaagagatcttttatcgcggacattctgatgtgtcttatgagttggcgccatctgttttcaggaaaaacaaaaaaggtaactttaagcatttacacaatgaatcaagcttagtccgtgaagccctaacagcaaggccagctgagtttgttgacgacaaaacaatgctggacaagttagtaagaatgcaacattacggactaccaactcgcttgttggatataacatcaaatcctcttatcgcactctattttgcttgttgtgatattaataataatgaaccagataatgatattaatgggcatgtgattattttcaaaacaaaaagagaacgtataaagttttttgactctgatacagtaagttgcatctaa

SEQ ID NO: 200710 - DNA, 1005 bp, Klebsiella oxytoca
atgaaatttttagtaactggagccgcaggattcatcggctttcatacctgcaagcgccttctggaggcgggtcatgaggttgtcggcctcgacaacatgaacgactattatgacgtcaatcttaagcaggcccgtctggatttactgcaatctcccctgttcagttttcacaaaatcgatctcgcggatcgtgaaggtattgcccggctttttgctaacgagaaatttaaccgcgtgatccatctcgccgcgcaggcaggagttcgctactccctggaaaacccgttcgcttatgctgacgctaacctgattggttatctgaacattcttgaaggctgcagacacaacaacgttgagcatttgctctatgcctcatccagttcggtctatggcctgaaccgtaaaatgccgttctctacggaggattcggttgatcatccggtttcgctgtatgccgccaccaagaaagcgaatgaactgatggcgcatacctactcgcatctttatggcattccaaccaccggactgagattcttcaccgtctacggcccgtggggccgtccggatatggcgctgttcaagtttacgaaagccatgctggaaggcaagagtattgatgtctacaactacggcaagatgaagcgcgacttcacctacattgacgatatcgttgaggcggttgtaaggatgcaggacattatcccgcagcctaatctggaatggaccgttgaaacgggttcaccagcggatagctcggcgccataccgggtgtataacatcgggaatagctcaccggttgagctcatggattacatcactgctctggaagaggctctggggatggtggcggagaaaaatatgatgccaatacagcccggcgatgtgctggaaaccagcgcagataccaggccgctgtatgatgtggtgggattcaggccacaaacgacggttagccagggggtgaagaacttcgttgactggtataaagcctattacaaggcgtag

SEQ ID NO: 200711 - DNA, 606 bp, Klebsiella oxytoca
atgacgattgatgattttattttggatgaagctatatcaatactttcttggcaagttgatgatgatttgaaagttaagctactcgagtttgttaaaacaccgttggctattcatggtaagaattaccctcaggttgttaatgactatattttagaaaataattttaaaccagatgaacttctaatcttgacgtcatcttataaaacttggggaacctctactcagtcgctcatcttgagtcgagcaatacagaatatatcagcattgatagcaagccctaatgatgtttctgaacctttactaaaaaaactgtttgtcgcagagggactgaatatacagaataaaatagcactgctaatcgcttcgttgtcgggtaaggatttgagtaagacgacttgcaaagagtatcttgatctgcttggtttatcagagttcagtaagattttggggcgaggcaaacctaaaattgaagttgattcaactaatcaaagtttattaacagcattaagagataacaacttcttctctgattttgaggtggatgatgaaaatcccacttattataaaataacaaggcggcgctctatgtttggctcagatacatag

SEQ ID NO: 200712 - DNA, 213 bp, Klebsiella oxytoca
atgaataacatgcaggaactcaaatcaacccagagcatccgccagtacgccgcactgacagcctcactgcttgaatgtgcagtgttgcttacatcctcaagcgaccagaaaacagagcgtttagtaccggatcttttgcgtgtggcttttgagcgggctgattctcttgccgacgcgctggaggaaatggaggtaacttatgtcaaaaaatga

SEQ ID NO: 200713 - DNA, 249 bp, Klebsiella oxytoca
atgaggaagaggaagaggaagaggaagagcatcaacatcaacatcaacatcaacatcaacatcaacatcaacaacaatagcagcaagaggcaaagccagaagctgaagcagattcagattcagattcagattcagagccagaggcagcggaagaggcagtgtgccactacaaggcttgttcatccgctcctgccaggcaacagcggcggccgctttatcgacagagactttgtcctgctcgtcttttga

SEQ ID NO: 200714 - DNA, 276 bp, Klebsiella oxytoca
atgagtagtattaatagtatgagccgtgcagggcgcggcagagaagcattagaggcgtataatcaacaacaagctatcctggaaactccggtagggactacagaagaagcagaagcctatcatcatgttaagaacaataaaataacttatcttgatatcttttctgcatacaacgatgaattaaatgggagtatattggtaaacctctgcacagccattgataacttctataacacccctacagctaaggaaggtgcgaacaagttcctgatatga

SEQ ID NO: 200715 - DNA, 378 bp, Klebsiella oxytoca
ttgagtaaaaatagaaacattttaaacgttaacaaactacaacttaaagcagtaggcagaagtaaaagaaaaaatagcggtaaaaatattaagcaatgggatgcaaccccagaatatacagaatccccacccctcacacaagaagaacaagaaataattgatagtatttgtgataacaataatgtttattttaatcctcgtaaacgaataaccactaaatttaacgatgagatcgagaaatggcaggcattaggatttcagagtgaagatgagcacattgcttggaagcgactcaataacagggatgaggcgtctagcacttatacagacctcgcagataccatcctaaaaatcacgcagggacagaaaattgactga

SEQ ID NO: 200716 - DNA, 1401 bp, Klebsiella oxytoca
atgaaccttaaaccacgcaactttgatgaagtcattgaaaatgtattagttgaaaaaggtgtttgcacccctgatacactgaataaatattcaaaaaaagagaagttttattactttaatcagtttctgatcggagccaccaacaggagaaagcatctcaaagatgagtacgcgttctcactttattcctatgagagacgaaaacatataccgagagcttcgagatttgatgacatgataaaagatattcctttaatcaaaaaaagctgtaattaccgggcagataattggcctaatggctatagagttactagtactggatatgacattttttcggcatgttgcagagcagttcctagccgatgcggtctctataacgaaggaaaaccatacaacccacctcggaatggcatccgctcccaattaaaaaatagcaataaatgtaatgtagaagccaaggtccctaaagaaattcctcttaatgagttttctctcaggcgatacatgaagagactccagcagagcggcaatcatagaaatatgattagtcaaattgaatacctgttaacgcttgcgaaagcgagtaaaagtggtttattaccgataacatacgtgcaaagtaacgggggacgtttatatgcagaaggcgctgtaaatcttcaaaattgtaagagagagattcgtaaaactgcgttggctggcatgtttgatgtggatatcgagaattgtcactacaacttactggaacagatgtgcgctcggatcggtataaaaacgccgcgtataagccattatgtccgtaacaaaaaacaggtccgtaaagaagtagccactacgttacaatgcacagaagaacaagcgaaggtagttttgattgcccttatctatggcgccaatctagggcctcgtggggtactaaaaaagctggacattgataccagtgacgaggctctcaaagatacctggattagcaaactaactgaggaaatcaccaatgtgagacgttatgtgattgaggattatacagcgcggactagaggctattgcaaaatcaaaaacgacgctggaatgattgttaagaccataacagaaaacggagaatcggttaagaaatcaaaattattagctcatcttctccacggtgcagaatcactgatacttcagtacatgattagctttcttggtgataatgttgtcttgcttcagcatgatggtgtcacatgccccaatcctgtagatacagatgaactcagtgactatatcgcagagaaaacaggctatcgtgttcaatttgatattgagcagctgaaaccagacttctatgtcgatgccactgatagatttcaacaacaagacctggaagacatttttgaaatctttaaatatgaaatggctgcgtga

SEQ ID NO: 200717 - DNA, 501 bp, Klebsiella oxytoca
atggtcagtttctacggctggaaccgggtggaccgctttatggccgcgtggaaggcggcggggttctatgccgtgggccagcttgtgttcaccaaaacctatgcttccaaccgccgtaatgcgaaagaccgtcgcggattcgtggactaccgccatgaaggggcttatgtccttgccaaaggccgcccggtgccgcccctcagaccgctgccggatgtgatgccttttccgtataccggcaacccactgcacccgaaccagaaaccggtggaggcgctacagccgctgattgagtcattcagcgccccgggcgcgattgtcctcgacccgttcgcagggagtgcctcgacctgcgtcgccgcataccgcgccggacgccgctatatcggcattgaaatgctggcgcagtaccaccgggccggaaccgagcgactggccgccatgcaccgggccgtcaacaccccggcggcgaacgatgaatggctcccggaggtggcgtga

SEQ ID NO: 200718 - DNA, 399 bp, Klebsiella oxytoca
atgctcgtactcgtcagccagtacgcgccagtcaccaaaccgcctgtccatcagtcgcggcgtgacggacggtttcagcgcagcggcaaggcggtgcgcatccagcctgacgatttccgctatctgcgtgagggaggctttcaggaaagccagcagatcgtcacattccgccgccgtcagccattcctgtgcataaggcagatgaagtgtctgggcgtccgccagtttttccggcggcataaagccctttgccgggtacagatacagccgcgccggggttcccgccagccgccgggcgctggcggtcagcaacccggcccggccataggtcagcggcaggcaaaggtgcgtgaccagcgccagaatgtgcgcggcatcgagcgagccggtggcgactga

SEQ ID NO: 200719 - DNA, 300 bp, Klebsiella oxytoca
atgcctgttgtcgtgtcttatcgttacgactggttccgtataatcgaggacatttcacgagagggccttacacttagtgatattgcgaaagaactggatgtatcaaaaacagcggtaattggctggaagcaaggggctgaaccccgttactttgctggtgatgctcttatctctttgtggtgccacattaagcaaagacggaaggaagacctgccgactcaaatcctgtcgcgaaagttcattcataactacacatcccggcgttacgcaaacgcgcaaaaacatgcggacaccgcatag

SEQ ID NO: 200720 - DNA, 231 bp, Klebsiella oxytoca
atgacgatttctattctttcaccttccactgaggctgtaaagccccgtcgtcaccagcgcattctgcgcgatgacatcgccgcgcgggagattgacccggcgctcaaagccttcggacggcatattgcccggagcattcgcaaggggcgcggcgtccatatcccggcgatgaacaacaccgccttcgggcaggtactccgcacgcttgaacttaaacgcgcatgtaactga

SEQ ID NO: 200721 - DNA, 480 bp, Klebsiella oxytoca
atgcgcaacggcaaaatcctcggctgggcatggggcgcggggtttgttgacgggattggtcagggaatagagcgcgcttctcagccggctgtcgggctgggggccacggcgacgctcggtgccggtgatgtactcaaaatggggtttggaggcggtgcgtcaaaaggaagttcaacactgagcgagtactacattaaacgttcagagcagtaccaccctgttatcccgattggtgccggcaatgaggtgacggtggtctttcaggatgggttccagctgaaaaccatcgaagagctggaagcggaaaagaacgggcaacagcaggcacagaatcaggagccggtcgcgcagcctgaatcgcaacagtcaggcagcaacctgaacgggtttaacactgacgaaatgctgaaaaagctgggcaagctggaccctcgccagttctcaccaggcggagaagtgcagggagaaaatcatggttaa

SEQ ID NO: 200722 - DNA, 513 bp, Klebsiella oxytoca
atgggcaagaacggggtgaaaggggaagtcgtgatgcgtaacggcaaaatcctcggctgggcctggggtgctggctttgttgacggaattggtcaggggatggagcgggcgtcacagccgtccgtgggtctcggggctacggcgacggtcggtgccggcgacgttctgaaaatggggattggcggcggtgcgtcgaaagcggcgcagacgctgagcgagtactacatcaaacgtgccgagcagtaccaccccgtcattccgattggggccggcaatgaggtgacggtggtctttcaggatgggttccagctgaaaaccattgaggagctggaggcggaaaagaacggacaacaacaggcgcagaatcaggagccggtctcgcagcctgaagcgcaacagtcaggcagcaacctgaacgggtttaacactgacgagatgctgaagaagctgggcaaacttgaccctcgccagttctcaccaggcggagaagcgcagggagaaaatcatggttaa

SEQ ID NO: 200723 - DNA, 603 bp, Klebsiella oxytoca
atggttaagtcccgcactgctctcgctctgtccatgtcctcgctgcgctggttccgctggctgattcagcatgcggtggtgtatccgatggccaccatgatgctgctgattgtaacagtgctgtggcgtggtcatatcacgcccggtcagatgctggtgaataccatcgaatcggtgcagcgggaaggatatgtcattcacgactgcacgggacccgcttcgcgcgaagcactcaatggtgatgcggtgaagccattactgcctcctgttttacaggaggattgctcttctttcagtacggatgcggcagggtatgcagcacatatcgaccagggctacacgaaaaatatcctctggctctggtttctgatggcggtggtgtttacgggtgtcgcggtggttttcggccgtacccctgccagcagaacaggtatcacgtgggtgagggatgcgcgggggaatgtttttcccggatgcagacccggcaaaggcgcgatatcaccgttactggccggatatcagaaacgcggtgagaccatcgtgatttatgacccttccgccagatttagcgaggaagataaaaatgaaaacaaagagaaataa

SEQ ID NO: 200724 - DNA, 618 bp, Klebsiella oxytoca
atggttgatgccgtcgagcaccttcatcagctcatcactgtgtgctctgggctgtacgtcatcaaacagattcagctgagagatgccggtcggggagaaatcgttcagcatgatgccggctttggcatagcggtggccggagacccagatcctgtccagcgctctgactgcagcagtaataatgtcccgggtgtcccgcgtgggtgtcatcagtttctctgttgccagattgccataacagggctcgttgatggcgaacggcgaagttttaatgaaggccgagatatgccggcagtactggtgctctccgcgcagcttctccgctgcgcgttctgcatgccggcagacggcctgacgcatcgcctcgtaggtggtgacgcgctctccgaaagaacggctgcagacaatctgctgttttggcgggggggcttcttccagcgaaatgcacggctctccgttcagttcacgaaccgttctctccagtaccacgttgaagtttttccggatgaaggttggattcgcgcgcgccagctgcagcgcagtggtgatacccattgtccccagcgtcttcgaaattctccggcccaccccccagatttcttccaccggctgcagtga

SEQ ID NO: 200725 - DNA, 426 bp, Klebsiella oxytoca
atgaagtttattgctgcctcccccgaacccggggtcatgaccctccccctttttaccgagcgttgcgccgccggttttccttcaccggcggcagattacacggaagcggagctggacctgaacgagtactgcatccggcaccgggcctccacctattttgtccgggctatcggcaactcgatgaccgatattggcctgaattcaggcgacctgatggtcgtcgacaaggcagagaagccggtacacggtgatattgtcatcgccgaaatggagggagaatttaccgtcaaacggcttctgctgacgccccgtccggtactccagcccatgaacccggcctaccctgcccttcaccctgacccggagacgctgcagatttttggtgtggtgaccgcgtttatccataagacgcgcggagtggactga

SEQ ID NO: 200726 - DNA, 444 bp, Klebsiella oxytoca
atgatgagtgaggacacccaaagaatcacccagatcaatgatcacggagagatcgttggcggctttgtcgcagtaattaggcccaaacaaaaatcagcattccagaggcatttcaccatgaaccaagacgcattaagaatcctcgccaaggagctgaccggtgagcagttcaaagtcctgatgctgatgcttgcagatctggattacgagaatttcatccagatagcacaggcagacattgcccagacgctagggatgcagaaaacgcacgtaagccgtgccgtccgtgcattgctggatgttggggttatctttgaaggtccaaaggtaggtagatccaaaacctaccgtctaaacgagcagtttggctggaaaggaaccgtcagcaaccacaaaagagccctcaaaaacggtctcagcgttatccagggaggcagagcttaa

SEQ ID NO: 200727 - DNA, 378 bp, Klebsiella oxytoca; identical to SEQ ID NO: 146978

SEQ ID NO: 200728 - DNA, 963 bp, Klebsiella oxytoca
atgcttaatgcactgaatgtatttgatggtgttccttctgatacttctaaaattgtaatctcagatatcgttactactaacgaatccctgctgaacactcctaagagccgttatagctctgagcatgatgttactaaacgtgattttgggactgaccgcattatcgaaattcctttcttccatcgtgaagacatggtgaaagtaagtgacatccagggcaaacgtaaatttggcactgaacttgaacaaaccttgctggatgtatcgagtgattatgtagcccgccacgctattgcatattaccgcacacgtgaaaaagcatttgcacaggccctgtttgctggcactgtaactaccccgtacactgatgaccagctgattgactggagcaccactttcgatgcaactcgaatgactaaagtgattgacctcacttctaccactgttaacccgtttgaaatgtttgatgaaatcatcgatgcaactaacgagaaagctgatggcctgatgagcaagatcgagcgtgttgtagtattcgcaactcctgcattctataatgctctgcgttattctgcacagtttgctactgcattccagtatgtattgccacaagacccggctaacgttgtattccagcgtcgtgagctactacctaacgtatcattcttctctattccagggactaatattgatatcgttaaagtaagtgacccactgctttcacagtttattcctgataattcagcaattgcaattcctgtatttagtgcaggtgctaatgtttatcagaatgtgtatggccctgcttctacacgtttcgacctgatgaatcagagtgcgagtgaatactacacctggcagatgctgcgtgaacgtggggatgctctggatatcgtgactgaacatagcacacttccagttaaccacggattcggcttctctaccctgatcactcagtcgtaa

SEQ ID NO: 200729 - DNA, 432 bp, Klebsiella oxytoca
atgaatagctggataattgccttaatagataaactcaggatggaagcgatgaggataagcaatggcgggatattaacgaagtcgtacgggttatttatcatcagtattggctttgcatcgatatccattaatcccgcctgggcctatgatacgtcgagtagcgtcaattttaatatcaccggtaaaattgaagagcccgtatgcgaggtctcggttaaaccctccagcgcgatcgatctgggtaccgtatcttatcaaaagcttaccaacaaaccgggcgcgagcagtgatgccacgaccgtgtccattgcctttgataattgttcaacgggtacggcgtcagtgacgataacgtttagcggtaattcatttgacagtacttactccagtatttatgagaatgagctaaggaaggtgcgaacaagttcctga

SEQ ID NO: 200730 - DNA, 870 bp, Klebsiella oxytoca
atgttactcaacaaagaccgctttggcaaactcacgtcaaaatctcttgattctattgctgctctcggactccgcgaggcgaatgccgagcttccttgtctatttagaaacaactgcaccgagatttcatcaaaaacaccttccgacaccttgccacatcaggcttttgagctttctacaaacctcaaaaaatccgcctctgctctggcttggaatgtccaatattttgttgatacctacggcctttcaaacgttggttttttaaccctgacttttcgtgaccatgtgaccgatcccaaagaggcgcagcgccgttttcattcccttaaaacacatatccttgccaaaagataccgcgcttacatccgtgtcatggagcctatgaagtcagggcgcatccactatcacttactcgttgcactgcactccgacattcgtaccggattcgatttccccgctgtatatcgccaggactactcctccgcaaacaaggctatccgctccgagtggtcattctggcgcaagactgcgccgaaatatggcttcggtcgcactgaattgatgcccgttcggtcaaattctgaggggatagggcgctatgtaggcaaatacatttctaagggcatagaatcgcgtacagagcaatttaagggcgttaggctggtagagtattcccgcaaggctaaaatcgcttctacgcgcttccagttcgtttctgacgggtcttatgagtggcgtcgcaaactttctatcttcgttcactacatcgcggataacatgggttgtgaaccatcattcgacggcttacgccgtgttcttggctctcgctggtcttatcactggcgtgatttcatcatgaatatcgaatag

SEQ ID NO: 200731 - DNA, 231 bp, Klebsiella oxytoca
atgacgatttctattctttcaccttccactgaggctgtaaagccccgccgtcaccagcgcattctgcgcgatgacatcgccgcgcgggagattgacccggcgctgaaagccttcggacggcatattgcccggagcattcgcaaggggcgcggcgtccatatcccggcgatgaacaacaccgccttcgggcaggtgctccgcacgcttgaactcaaacgcgcatgtaactga

SEQ ID NO: 200732 - DNA, 348 bp, Klebsiella oxytoca; identical to SEQ ID NO: 136886

SEQ ID NO: 200733 - DNA, 339 bp, Klebsiella oxytoca; identical to SEQ ID NO: 136887

SEQ ID NO: 200734 - DNA, 216 bp, Klebsiella oxytoca
atggccaccaccactgcaacggacctgatgaagtccggtgataccacggtcaagggtaccttcggtaagtcttccagcgtggtcaaatgggtggtgctggctgaagttatcgcaggtggcatcatgtacatgatgaccaagaacgtgaaattcctgttcggcttcgccattatttccacctttatcaccatcggtatgtcggtcgccggttactga

SEQ ID NO: 200735 - DNA, 222 bp, Klebsiella oxytoca
atggtgggctgcattagccgccagcgccgcatcgacatcggacggggcaaactccggagcacgaacattctcgccgcgggagttaacaaagcggccaagaccgccgaacgcaacgccgagcactgcatcaatcgccattgcctgacggtcaaaaacatcgtactgaccggccatatcatcgtaaccggcgttgcgcagggtttctgccgtcattccgcgtag

SEQ ID NO: 200736 - DNA, 333 bp, Klebsiella oxytoca
atgcgtgtctgcattggaggagatgaacagccagccattgggcctgtcctcacgcacaccgcgcatccagtcccggatagtgaacggctcgccattcttctcaatgccctgcaggtagcggatggccttgacgtagttggtcagcaccgcacggatactgatagcggttttctcaattttttcttccaccaggttcgccgccggggtgttctgcagataggcgcgcagcttgtcgattttgatggagagcatggtatcaaccagcttctcgtagctgcggtccttgtcttcgcgcatcagatacgcgccttcggcaaagatggtgcgccctga

SEQ ID NO: 200737 - DNA, 207 bp, Klebsiella oxytoca
atgaaaattcaaaatgaattcagcaagacacactatacgaaaattcttatgctattcatccgcttcctcctgctcatcaggaaagaatgtacgcatgacttcctgaacatcctcctggatattttgaaccatacccttccattgccaccggggatcatctttgacatgagggctcaggcactcaatgcccaaaactttattcactga

SEQ ID NO: 200738 - DNA, 621 bp, Klebsiella oxytoca
atgcgccagaatgcactgctgcttgagcgtaaacccgccgtacccccatcgaaacgggcacataccggcagagtggccgtgaaggaaagcaaccagcggtggtgctctgacgggttcgagttccgctgtgataacggtgaaaaactgcgtgtcacgttcgcgctggactgctgcgatcgtgaagcactgcactgggcggccagcacgggcggcttcgacagtgaaactgtacaggacgtcatgctgggagcggtggagcgtcgcttcggcagcggccttccggcgtcgccggtggagtggctgacggataacggttcgtgctaccgggcgtatgaaacacggcagttcgcccgggtcgtgggtcttgtaccgaaaaacacggctgtgcggagcccggagagtaacggaatagcagagagcttcgtcaaaacgatgaagcgtgactacatcagtatcatgcccaaaccagacgggttaacggcagtaaagaaccttgcggaagcgttcgagcattataacgaatggcatccgcatagtgcgctgggttatcgctcgccacgggaatatctgcggcggcgtaccagtaatgggttaagtgataacaggtgtctggaaatatag

SEQ ID NO: 200739 - DNA, 342 bp, Klebsiella oxytoca
atgggcatcattcaggaacgagccttcactgttccacctgacgtgttcagagtttatgccacgaatagcaaggttcatctttgccagacgccatgttgtttggttggattcctgaccatagatagaaatatcgtcgatattaccctgatgagcttgaacaaatttttccgactggacgaacataccaccagagccacagcaggggtcaaaaactcggcctttgtaaggttccagcatgttaaccagcaggcttacgatggattttggcgtatagaactgaccgccctgtttgccttctgccagtgcgaattcaccaaggaagtattcgaatacgtggcctaa

SEQ ID NO: 200740 - DNA, 411 bp, Klebsiella oxytoca
ttgggtcgtttcgtcattttgcacaagccagccgccgggatccgcttcgcgggctttcagtacctgagtcagcttagcctgcgcggtggcgtacagctcctgctggtatttaaaatcaggcgcggattcctgcggctgcaatgcctgcactgcggccagcccctgctggggcgttccctgtacgatggactgatagactggctgaaggctcattgcctgctgataatggcggaaggtttgctccagctgcatgcgctctgccggtgtcgcctgtacgggcagggtggaggcccacgcttctggcgttatcggggaaacgtttttgcccgcttccagaagcgcaagatcatcctgcattttgctttgcagtgcgacgcggccggcggatgcccgcatgtcgtacagcgctga

SEQ ID NO: 200741 - DNA, 498 bp, Klebsiella oxytoca
atggcgccaccgctgtcggtctgctcctggttggtcagtccgccatccagactgttaatcgcggtgatacgatccccgggtacagtaaaaaggttcgggtcggtgttactcaccgcgatattagcctgcccgccgttggtcaggggaaccacggtcggggccaacgtaccgctgagggtggccgacatcgcaggcaccgtaaataacaggcaacctgaaataaataacggattaatcattttcattatttatttctccaaagcgtgccagccagctgacaccgtcgacacgactgaactgaatgacataacttttaatttcgctgtagggcttcgagtcaccaatccatgttttcagttcgccccggatatcaacgcggttctccgcaggccaggcgcggaccgatgtcatatagaaggtggcgttaacattattttcttttattcgtttcgcatcctcagccagctggaccttaagactgttctgcgaggccggtaa

SEQ ID NO: 200742 - DNA, 366 bp, Klebsiella oxytoca
atgccgggcgtcagggacactatccgccgggaagggatagccacggtcagcgatccggcctgtggtgccgccgggatgctgattgcatatgccgaatgcctgctcgaagcggatatcaatccttccatgcacatgttcggcagctgcatcgatatcgatccggtggcggcagatatggctttcatccagctgtctctgctggggattgccgccgaagtggtcacgggtaacaccctgacaatgcagttccggcgggtaagatacactcccgtgtactacctcaatgactttgaaaaacggctggctgacctgacccggttcagggcgatgcgggactttatgcgcgggatacaggaggctgcgtaa

SEQ ID NO: 200743 - DNA, 267 bp, Klebsiella oxytoca; identical to SEQ ID NO: 11114

SEQ ID NO: 200744 - DNA, 189 bp, Klebsiella oxytoca
atggatatcgaaaccttcctgctcagtaatggcatgaagcccaaagcagggcaactggtacgcttgctaaatgtgccgctggagaaatccaccgcatttcatggtttgccttctggtaaggctcacgctgatgcattacgcgatgcctggacagttatccttagaaaccttgccaactttttccattga

SEQ ID NO: 200745 - DNA, 240 bp, Klebsiella oxytoca
atgatgcccgattgtggccgcgtccatatggtcagcacggaaagctggtttgaccgcattgtgagcgctgacgcggcgggcattattctgacatcgctggccgttaaccgtcgtctggcggcaaatcatgacagcggcaacccggccctgactcacctttatatgctgcgtgatgcccagctctggaatcacatcacccttcacccggaatgcaacgccatttacgccgcgctggactga

SEQ ID NO: 200746 - DNA, 492 bp, Klebsiella oxytoca
atgcatcagaccaagaaaggcaatcagtggcactttggcatgaaggcccacattggtgtcgatgccaagagtggcctgacccacagcctagtcaccaccgcggccaacgagcatgacctcaatcagctgggtaatctgcttcatggagaggagcaatttgtctcagccgatgccggctaccaaggagcgccacagcgcgaggagctggccgaggtggatgtggactggctgatcgccgagcgtcccggcaaggtaaaaaccttgaagcagcatccgcgcaagaacaaaacggccatcaacatcgaatacatgaaagccagcatccgtgccaaggtggagcacccgtttcgcatcatcaagcggcagttcggcttcgtgaaagccagatacaaggggctgctgaaaaacgataaccaactggcgatgttattcaccctggccaacctgtttcgggtggaccaaatgatacgtcagtgggagagatctcagtaa
